United States Patent Application Publication US 2025/0333767 A1 - sequence listing, part 8

SEQ ID NO: 34917 - protein, 979 aa, synthetic construct
  REGION 1..979: note = engineered CasX variant
QEIKRINKIRRRLVKDSNTKKAGKTGPMKTLLVRVMTPDLRERLENLRKKPENIPQPISNTSRANLNKLLTDYTEMKKAILHVYWEEFQKDPVGLMSRVAQPASKKIDQNKLKPEMDEKGNLTTAGFACSQCGQPLFVYKLEQVSEKGKAYTNYFGRCNVAEHEKLILLYQLKPEKDSDEAVTYSLGKFGQRALDFYSIHVTKESTHPVKPLAQIAGNRYASAPVGKALSDACMGTIASFLSKYQDIIIEHQKVVKGNQKRLESLRELAGKENLEYPSVTLPPQPHTKEGVDAYNEVIARVRMWVNLNLWQKLKLSRDDAKPLLRLKGFPSFPLVERQANAEVDWWDMVCNVKKLINEKKEDGKVFWQNLAGYKRQEALRPYLSSEEDRKKGKKFARYQLGDLLLHLEKKHGEDWGKVYDEAWERIDKKVEGLSKHIKLEEERRSEDAQSKAALTDWLRAKASFVIEGLKEADKDEFCRCELKLQKWYGDLRGKPFAIEAENSILDISGFSKQYNCAFIWQKDGVKKLNLYLIINYFKGGKLRFKKIKPEAFEANRFYTVINKKSGEIVPMEVNFNFDDPNLIILPLAFGKRQGREFIWNDLLSLETGSLKLANGRVIEKTLYNRRTRQDEPALFVALTFERREVLDSSNIKPMNLIGVDRGENIPAVIALTDPEGCPLSRFKDSLGNPTHILRIGESYKEKQRTIQAKKEVEQRRAGGYSRKYASKAKNLADDMVRNTARDLLYYAVTQDAMLIFENLSRGFGRQGKRTFMAERQYTRMEDWLTAKLAYEGLPSKTYLSKTLAQYTSKTCSNCGFTITSADYDRVLEKLKKTATGWMTTINGKELKVEGQITYYNRYKRQNVVKDLSVELDRLSEESVNNDISSWTKGRSGEALSLLKKRFSHRPVQEKFVCLNCGFETHADEQAALNIARSWLFLRSQEYKKYQTNKTTGNTDKRAFVETWQSFYRKKLKEVWKPAV

SEQ ID NO: 34918 - protein, 979 aa, synthetic construct
  REGION 1..979: note = engineered CasX variant
QEIKRINKIRRRLVKDSNTKKAGKTGPMKTLLVRVMTPDLRERLENLRKKPENIPQPISNTSRANLNKLLTDYTEMKKAILHVYWEEFQKDPVGLMSRVAQPASKKIDQNKLKPEMDEKGNLTTAGFACSQCGQPLFVYKLEQVSEKGKAYTNYFGRCNVAEHEKLILLYQLKPEKDSDEAVTYSLGKFGQRALDFYSIHVTKESTHPVKPLAQIAGNRYASVPVGKALSDACMGTIASFLSKYQDIIIEHQKVVKGNQKRLESLRELAGKENLEYPSVTLPPQPHTKEGVDAYNEVIARVRMWVNLNLWQKLKLSRDDAKPLLRLKGFPSFPLVERQANAEVDWWDMVCNVKKLINEKKEDGKVFWQNLAGYKRQEALRPYLSSEEDRKKGKKFARYQLGDLLLHLEKKHGEDWGKVYDEAWERIDKKVEGLSKHIKLEEERRSEDAQSKAALTDWLRAKASFVIEGLKEADKDEFCRCELKLQKWYGDLRGKPFAIEAENSILDISGFSKQYNCAFIWQKDGVKKLNLYLIINYFKGGKLRFKKIKPEAFEANRFYTVINKKSGEIVPMEVNFNFDDPNLIILPLAFGKRQGREFIWNDLLSLETGSLKLANGRVIEKTLYNRRTRQDEPALFVALTFERREVLDSSNIKPMNLIGVDRGENIPAVIALTDPEGCPLSRFKDSLGNPTHILRIGESYKEKQRTIQAKKEVEQRRAGGYSRKYASKAKNLADDMVRNTARDLLYYAVTQDAMLIFENLSRGFGRQGKRTFMAERQYTRMEDWLTAKLAYEGLPSKTYLSKTLAQYTSKTCSNCGFTITSADYDRVLEKLKKTATGWMTTINGKELKVEGQITYYNRYKRQNVVKDLSVELDRLSEESVNNDISSWTKGRSGEALSLLKKRFSHRPVQEKFVCLNCGFETHADEQAALNIARSWLFLRSQEYKKYQTNKTTGNTDKRAFVETWQSFYRKKLKEVWKPAV

SEQ ID NO: 34919 - protein, 979 aa, synthetic construct
  REGION 1..979: note = engineered CasX variant
QEIKRINKIRRRLVKDSNTKKAGKTGPMKTLLVRVMTPDLRERLENLRKKPENIPQPISNTSRANLNKLLTDYTEMKKAILHVYWEEFQKDPVGLMSRVAQPASKKIDQNKLKPEMDEKGNLTTAGFACSQCGQPLFVYKLEQVSEKGKAYTNYFGRCNVAEHEKLIKLYQLKPEKDSDEAVTYSLGKFGQRALDFYSIHVTKESTHPVKPLAQIAGNRYASGPVGKALSDACMGTIASFLSKYQDIIIEHQKVVKGNQKRLESLRELAGKENLEYPSVTLPPQPHTKEGVDAYNEVIARVRMWVNLNLWQKLKLSRDDAKPLLRLKGFPSFPLVERQANAEVDWWDMVCNVKKLINEKKEDGKVFWQNLAGYKRQEALRPYLSSEEDRKKGKKFARYQLGDLLLHLEKKHGEDWGKVYDEAWERIDKKVEGLSKHIKLEEERRSEDAQSKAALTDWLRAKASFVIEGLKEADKDEFCRCELKLQKWYGDLRGKPFAIEAENSILDISGFSKQYNCAFIWQKDGVKKLNLYLIINYFKGGKLRFKKIKPEAFEANRFYTVINKKSGEIVPMEVNFNFDDPNLIILPLAFGKRQGREFIWNDLLSLETGSLKLANGRVIEKTLYNRRTRQDEPALFVALTFERREVLDSSNIKPMNLIGVDRGENIPAVIALTDPEGCPLSRFKDSLGNPTHILRIGESYKEKQRTIQAKKEVEQRRAGGYSRKYASKAKNLADDMVRNTARDLLYYAVTQDAMLIFENLSRGFGRQGKRTFMAERQYTRMEDWLTAKLAYEGLPSKTYLSKTLAQYTSKTCSNCGFTITSADYDRVLEKLKKTATGWMTTINGKELKVEGQITYYNRYKRQNVVKDLSVELDRLSEESVNNDISSWTKGRSGEALSLLKKRFSHRPVQEKFVCLNCGFETHADEQAALNIARSWLFLRSQEYKKYQTNKTTGNTDKRAFVETWQSFYRKKLKEVWKPAV

SEQ ID NO: 34920 - protein, 978 aa, synthetic construct
  REGION 1..978: note = engineered CasX variant
QEIKRINKIRRRLVKDSNTKKAGKTGPMKTLLVRVMTPDLRERLENLRKKPENIPQPISNTSRANLNKLLTDYTEMKKAILHVYWEEFQKDPVGLMSRVAQPASKKIDQNKLKPEMDEKGNLTTAGFACSQCGQPLFVYKLEQVSEKGKAYTNYFGRCNVAEHEKLILLYQLKPEKDSDEAVTYSLGKFGQRALDFYSIHVTKESTHPVKPLAQIAGNRYASPVGKALSDACMGTIASFLSKYQDIIIEHQKVVKGNQKRLESLRELAGKENLEYPSVTLPPQPHTKEGVDAYNEVIARVRMWVNLNLWQKLKLSRDDAKPLLRLKGFPSFPLVERQANAEVDWWDMVCNVKKLINEKKEDGKVFWQNLAGYKRQEALRPYLSSEEDRKKGKKFARYQLGDLLLHLEKKHGEDWGKVYDEAWERIDKKVEGLSKHIKLEEERRSEDAQSKAALTDWLRAKASFVIEGLKEADKDEFCRCELKLQKWYGDLRGKPFAIEAENSILDISGFSKQYNCAFIWQKDGVKKLNLYLIINYFKGGKLRFKKIKPEAFEANRFYTVINKKSGEIVPMEVNFNFDDPNLIILPLAFGKRQGREFIWNDLLSLETGSLKLANGRVIEKTLYNRRTRQDEPALFVALTFERREVLDSSNIKPMNLIGVDRGENIPAVIALTDPEGCPLSRFKDSLGNPTHILRIGESYKEKQRTIQAKKEVEQRRAGGYSRKYASKAKNLADDMVRNTARDLLYYAVTQDAMLIFENLSRGFGRQGKRTFMAERQYTRMEDWLTAKLAYEGLPSKTYLSKTLAQYTSKTCSNCGFTITSADYDRVLEKLKKTATGWMTTINGKELKVEGQITYYNRYKRQNVVKDLSVELDRLSEESVNNDISSWTKGRSGEALSLLKKRFSHRPVQEKFVCLNCGFETHADEQAALNIARSWLFLRSQEYKKYQTNKTTGNTDKRAFVETWQSFYRKKLKEVWKPAV

SEQ ID NO: 34921 - protein, 978 aa, synthetic construct
  REGION 1..978: note = engineered CasX variant
QEIKRINKIRRRLVKDSNTKKAGKTGPMKTLLVRVMTPDLRERLENLRKKPENIPQPISNTSRANLNKLLTDYTEMKKAILHVYWEEFQKDPVGLMSRVAQPASKKIDQNKLKPEMDEKGNLTTAGFACSQCGQPLFVYKLEQVSEKGKAYTNYFGRCNVAEHEKLILLYQLKPEKDSDEAVTYSLGKFGQRALDFYSIHVTKESTHPVKPLAQIAGNRYASYPVGKALSDACMGTIASFLSKYQDIIIEHQKVVKGNQKRLESLRELAGKENLEYPSVTLPPQPHTKEGVDAYNEVIARVRMWVNLNLWQKLKLSRDDAKPLLRLKGFPSFPLVERQANEVDWWDMVCNVKKLINEKKEDGKVFWQNLAGYKRQEALRPYLSSEEDRKKGKKFARTQLGDLLLHLEKKHGEDWGKVYDEAWERIDKKVEGLSKHIKLEEERRSEDAQSKAALTDWLRAKASFVIEGLKEADKDEFCRCELKLQKWYGDLRGKPFAIEAENSILDISGFSKQYNCAFIWQKDGVKKLNLYLIINYFKGGKLRFKKIKPEAFEANRFYTVINKKSGEIVPMEVNFNFDDPNLIILPLAFGKRQGREFIWNDLLSLETGSLKLANGRVIEKTLYNRRTRQDEPALFVALTFERREVLDSSNIKPMNLIGVDRGENIPAVIALTDPEGCPLSRFKDSLGNPTHILRIGESYKEKQRTIQAKKEVEQRRAGGYSRKYASKAKNLADDMVRNTARDLLYYAVTQDAMLIFENLSRGFGRQGKRTFMAERQYTRMEDWLTAKLAYEGLPSKTYLSKTLAQYTSKTCSNCGFTITSADYDRVLEKLKKTATGWMTTINGKELKVEGQITYYNRYKRQNVVKDLSVELDRLSEESVNNDISSWTKGRSGEALSLLKKRFSHRPVQEKFVCLNCGFETHADEQAALNIARSWLFLRSQEYKKYQTNKTTGNTDKRAFVETWQSFYRKKLKEVWKPAV

SEQ ID NO: 34922 - protein, 978 aa, synthetic construct
  REGION 1..978: note = engineered CasX variant
QEIKRINKIRRRLVKDSNTKKAGKTGPMKTLLVRVMTPDLRERLENLRKKPENIPQPISNTSRANLNKLLTDYTEMKKAILHVYWEEFQKDPVGLMSRVAQPASKKIDQNKLKPEMDEKGNLTTAGFACSQCGQPLFVYKLEQVSEKGKAYTNYFGRCNVAEHEKLILLYQLKPEKDSDEAVTYSLGKFGQRALDFYSIHVTKESTHPVKPLAQIAGNRYASHPVGKALSDACMGTIASFLSKYQDIIIEHQKVVKGNQKRLESLRELAGKENLEYPSVTLPPQPHTKEGVDAYNEVIARVRMWVNLNLWQKLKLSRDDAKPLLRLKGFPSFPLVERQANEVDWWDMVCNVKKLINEKKEDGKVFWQNLAGYKRQEALRPYLSSEEDRKKGKKFARTQLGDLLLHLEKKHGEDWGKVYDEAWERIDKKVEGLSKHIKLEEERRSEDAQSKAALTDWLRAKASFVIEGLKEADKDEFCRCELKLQKWYGDLRGKPFAIEAENSILDISGFSKQYNCAFIWQKDGVKKLNLYLIINYFKGGKLRFKKIKPEAFEANRFYTVINKKSGEIVPMEVNFNFDDPNLIILPLAFGKRQGREFIWNDLLSLETGSLKLANGRVIEKTLYNRRTRQDEPALFVALTFERREVLDSSNIKPMNLIGVDRGENIPAVIALTDPEGCPLSRFKDSLGNPTHILRIGESYKEKQRTIQAKKEVEQRRAGGYSRKYASKAKNLADDMVRNTARDLLYYAVTQDAMLIFENLSRGFGRQGKRTFMAERQYTRMEDWLTAKLAYEGLPSKTYLSKTLAQYTSKTCSNCGFTITSADYDRVLEKLKKTATGWMTTINGKELKVEGQITYYNRYKRQNVVKDLSVELDRLSEESVNNDISSWTKGRSGEALSLLKKRFSHRPVQEKFVCLNCGFETHADEQAALNIARSWLFLRSQEYKKYQTNKTTGNTDKRAFVETWQSFYRKKLKEVWKPAV

SEQ ID NO: 34923 - protein, 978 aa, synthetic construct
  REGION 1..978: note = engineered CasX variant
QEIKRINKIRRRLVKDSNTKKAGKTGPMKTLLVRVMTPDLRERLENLRKKPENIPQPISNTSRANLNKLLTDYTEMKKAILHVYWEEFQKDPVGLMSRVAQPASKKIDQNKLKPEMDEKGNLTTAGFACSQCGQPLFVYKLEQVSEKGKAYTNYFGRCNVAEHEKLILLYQLKPEKDSDEAVTYSLGKFGQRALDFYSIHVTKESTHPVKPLAQIAGNRYASSPVGKALSDACMGTIASFLSKYQDIIIEHQKVVKGNQKRLESLRELAGKENLEYPSVTLPPQPHTKEGVDAYNEVIARVRMWVNLNLWQKLKLSRDDAKPLLRLKGFPSFPLVERQANEVDWWDMVCNVKKLINEKKEDGKVFWQNLAGYKRQEALRPYLSSEEDRKKGKKFARTQLGDLLLHLEKKHGEDWGKVYDEAWERIDKKVEGLSKHIKLEEERRSEDAQSKAALTDWLRAKASFVIEGLKEADKDEFCRCELKLQKWYGDLRGKPFAIEAENSILDISGFSKQYNCAFIWQKDGVKKLNLYLIINYFKGGKLRFKKIKPEAFEANRFYTVINKKSGEIVPMEVNFNFDDPNLIILPLAFGKRQGREFIWNDLLSLETGSLKLANGRVIEKTLYNRRTRQDEPALFVALTFERREVLDSSNIKPMNLIGVDRGENIPAVIALTDPEGCPLSRFKDSLGNPTHILRIGESYKEKQRTIQAKKEVEQRRAGGYSRKYASKAKNLADDMVRNTARDLLYYAVTQDAMLIFENLSRGFGRQGKRTFMAERQYTRMEDWLTAKLAYEGLPSKTYLSKTLAQYTSKTCSNCGFTITSADYDRVLEKLKKTATGWMTTINGKELKVEGQITYYNRYKRQNVVKDLSVELDRLSEESVNNDISSWTKGRSGEALSLLKKRFSHRPVQEKFVCLNCGFETHADEQAALNIARSWLFLRSQEYKKYQTNKTTGNTDKRAFVETWQSFYRKKLKEVWKPAV

SEQ ID NO: 34924 - protein, 978 aa, synthetic construct
  REGION 1..978: note = engineered CasX variant
QEIKRINKIRRRLVKDSNTKKAGKTGPMKTLLVRVMTPDLRERLENLRKKPENIPQPISNTSRANLNKLLTDYTEMKKAILHVYWEEFQKDPVGLMSRVAQPASKKIDQNKLKPEMDEKGNLTTAGFACSQCGQPLFVYKLEQVSEKGKAYTNYFGRCNVAEHEKLILLYQLKPEKDSDEAVTYSLGKFGQRALDFYSIHVTKESTHPVKPLAQIAGNRYASTPVGKALSDACMGTIASFLSKYQDIIIEHQKVVKGNQKRLESLRELAGKENLEYPSVTLPPQPHTKEGVDAYNEVIARVRMWVNLNLWQKLKLSRDDAKPLLRLKGFPSFPLVERQANEVDWWDMVCNVKKLINEKKEDGKVFWQNLAGYKRQEALRPYLSSEEDRKKGKKFARTQLGDLLLHLEKKHGEDWGKVYDEAWERIDKKVEGLSKHIKLEEERRSEDAQSKAALTDWLRAKASFVIEGLKEADKDEFCRCELKLQKWYGDLRGKPFAIEAENSILDISGFSKQYNCAFIWQKDGVKKLNLYLIINYFKGGKLRFKKIKPEAFEANRFYTVINKKSGEIVPMEVNFNFDDPNLIILPLAFGKRQGREFIWNDLLSLETGSLKLANGRVIEKTLYNRRTRQDEPALFVALTFERREVLDSSNIKPMNLIGVDRGENIPAVIALTDPEGCPLSRFKDSLGNPTHILRIGESYKEKQRTIQAKKEVEQRRAGGYSRKYASKAKNLADDMVRNTARDLLYYAVTQDAMLIFENLSRGFGRQGKRTFMAERQYTRMEDWLTAKLAYEGLPSKTYLSKTLAQYTSKTCSNCGFTITSADYDRVLEKLKKTATGWMTTINGKELKVEGQITYYNRYKRQNVVKDLSVELDRLSEESVNNDISSWTKGRSGEALSLLKKRFSHRPVQEKFVCLNCGFETHADEQAALNIARSWLFLRSQEYKKYQTNKTTGNTDKRAFVETWQSFYRKKLKEVWKPAV

SEQ ID NO: 34925 - protein, 978 aa, synthetic construct
  REGION 1..978: note = engineered CasX variant
QEIKRINKIRRRLVKDSNTKKAGKTGPMKTLLVRVMTPDLRERLENLRKKPENIPQPISNTSRANLNKLLTDYTEMKKAILHVYWEEFQKDPVGLMSRVAQPASKKIDQNKLKPEMDEKGNLTTAGFACSQCGQPLFVYKLEQVSEKGKAYTNYFGRCNVAEHEKLILLYQLKPEKDSDEAVTYSLGKFGQRALDFYSIHVTKESTHPVKPLAQIAGNRYASAPVGKALSDACMGTIASFLSKYQDIIIEHQKVVKGNQKRLESLRELAGKENLEYPSVTLPPQPHTKEGVDAYNEVIARVRMWVNLNLWQKLKLSRDDAKPLLRLKGFPSFPLVERQANEVDWWDMVCNVKKLINEKKEDGKVFWQNLAGYKRQEALRPYLSSEEDRKKGKKFARTQLGDLLLHLEKKHGEDWGKVYDEAWERIDKKVEGLSKHIKLEEERRSEDAQSKAALTDWLRAKASFVIEGLKEADKDEFCRCELKLQKWYGDLRGKPFAIEAENSILDISGFSKQYNCAFIWQKDGVKKLNLYLIINYFKGGKLRFKKIKPEAFEANRFYTVINKKSGEIVPMEVNFNFDDPNLIILPLAFGKRQGREFIWNDLLSLETGSLKLANGRVIEKTLYNRRTRQDEPALFVALTFERREVLDSSNIKPMNLIGVDRGENIPAVIALTDPEGCPLSRFKDSLGNPTHILRIGESYKEKQRTIQAKKEVEQRRAGGYSRKYASKAKNLADDMVRNTARDLLYYAVTQDAMLIFENLSRGFGRQGKRTFMAERQYTRMEDWLTAKLAYEGLPSKTYLSKTLAQYTSKTCSNCGFTITSADYDRVLEKLKKTATGWMTTINGKELKVEGQITYYNRYKRQNVVKDLSVELDRLSEESVNNDISSWTKGRSGEALSLLKKRFSHRPVQEKFVCLNCGFETHADEQAALNIARSWLFLRSQEYKKYQTNKTTGNTDKRAFVETWQSFYRKKLKEVWKPAV

SEQ ID NO: 34926 - protein, 978 aa, synthetic construct
  REGION 1..978: note = engineered CasX variant
QEIKRINKIRRRLVKDSNTKKAGKTGPMKTLLVRVMTPDLRERLENLRKKPENIPQPISNTSRANLNKLLTDYTEMKKAILHVYWEEFQKDPVGLMSRVAQPASKKIDQNKLKPEMDEKGNLTTAGFACSQCGQPLFVYKLEQVSEKGKAYTNYFGRCNVAEHEKLILLYQLKPEKDSDEAVTYSLGKFGQRALDFYSIHVTKESTHPVKPLAQIAGNRYASVPVGKALSDACMGTIASFLSKYQDIIIEHQKVVKGNQKRLESLRELAGKENLEYPSVTLPPQPHTKEGVDAYNEVIARVRMWVNLNLWQKLKLSRDDAKPLLRLKGFPSFPLVERQANEVDWWDMVCNVKKLINEKKEDGKVFWQNLAGYKRQEALRPYLSSEEDRKKGKKFARTQLGDLLLHLEKKHGEDWGKVYDEAWERIDKKVEGLSKHIKLEEERRSEDAQSKAALTDWLRAKASFVIEGLKEADKDEFCRCELKLQKWYGDLRGKPFAIEAENSILDISGFSKQYNCAFIWQKDGVKKLNLYLIINYFKGGKLRFKKIKPEAFEANRFYTVINKKSGEIVPMEVNFNFDDPNLIILPLAFGKRQGREFIWNDLLSLETGSLKLANGRVIEKTLYNRRTRQDEPALFVALTFERREVLDSSNIKPMNLIGVDRGENIPAVIALTDPEGCPLSRFKDSLGNPTHILRIGESYKEKQRTIQAKKEVEQRRAGGYSRKYASKAKNLADDMVRNTARDLLYYAVTQDAMLIFENLSRGFGRQGKRTFMAERQYTRMEDWLTAKLAYEGLPSKTYLSKTLAQYTSKTCSNCGFTITSADYDRVLEKLKKTATGWMTTINGKELKVEGQITYYNRYKRQNVVKDLSVELDRLSEESVNNDISSWTKGRSGEALSLLKKRFSHRPVQEKFVCLNCGFETHADEQAALNIARSWLFLRSQEYKKYQTNKTTGNTDKRAFVETWQSFYRKKLKEVWKPAV

SEQ ID NO: 34927 - protein, 978 aa, synthetic construct
  REGION 1..978: note = engineered CasX variant
QEIKRINKIRRRLVKDSNTKKAGKTGPMKTLLVRVMTPDLRERLENLRKKPENIPQPISNTSRANLNKLLTDYTEMKKAILHVYWEEFQKDPVGLMSRVAQPASKKIDQNKLKPEMDEKGNLTTAGFACSQCGQPLFVYKLEQVSEKGKAYTNYFGRCNVAEHEKLIKLYQLKPEKDSDEAVTYSLGKFGQRALDFYSIHVTKESTHPVKPLAQIAGNRYASGPVGKALSDACMGTIASFLSKYQDIIIEHQKVVKGNQKRLESLRELAGKENLEYPSVTLPPQPHTKEGVDAYNEVIARVRMWVNLNLWQKLKLSRDDAKPLLRLKGFPSFPLVERQANEVDWWDMVCNVKKLINEKKEDGKVFWQNLAGYKRQEALRPYLSSEEDRKKGKKFARTQLGDLLLHLEKKHGEDWGKVYDEAWERIDKKVEGLSKHIKLEEERRSEDAQSKAALTDWLRAKASFVIEGLKEADKDEFCRCELKLQKWYGDLRGKPFAIEAENSILDISGFSKQYNCAFIWQKDGVKKLNLYLIINYFKGGKLRFKKIKPEAFEANRFYTVINKKSGEIVPMEVNFNFDDPNLIILPLAFGKRQGREFIWNDLLSLETGSLKLANGRVIEKTLYNRRTRQDEPALFVALTFERREVLDSSNIKPMNLIGVDRGENIPAVIALTDPEGCPLSRFKDSLGNPTHILRIGESYKEKQRTIQAKKEVEQRRAGGYSRKYASKAKNLADDMVRNTARDLLYYAVTQDAMLIFENLSRGFGRQGKRTFMAERQYTRMEDWLTAKLAYEGLPSKTYLSKTLAQYTSKTCSNCGFTITSADYDRVLEKLKKTATGWMTTINGKELKVEGQITYYNRYKRQNVVKDLSVELDRLSEESVNNDISSWTKGRSGEALSLLKKRFSHRPVQEKFVCLNCGFETHADEQAALNIARSWLFLRSQEYKKYQTNKTTGNTDKRAFVETWQSFYRKKLKEVWKPAV

SEQ ID NO: 34928 - protein, 977 aa, synthetic construct
  REGION 1..977: note = engineered CasX variant
QEIKRINKIRRRLVKDSNTKKAGKTGPMKTLLVRVMTPDLRERLENLRKKPENIPQPISNTSRANLNKLLTDYTEMKKAILHVYWEEFQKDPVGLMSRVAQPASKKIDQNKLKPEMDEKGNLTTAGFACSQCGQPLFVYKLEQVSEKGKAYTNYFGRCNVAEHEKLILLYQLKPEKDSDEAVTYSLGKFGQRALDFYSIHVTKESTHPVKPLAQIAGNRYASPVGKALSDACMGTIASFLSKYQDIIIEHQKVVKGNQKRLESLRELAGKENLEYPSVTLPPQPHTKEGVDAYNEVIARVRMWVNLNLWQKLKLSRDDAKPLLRLKGFPSFPLVERQANEVDWWDMVCNVKKLINEKKEDGKVFWQNLAGYKRQEALRPYLSSEEDRKKGKKFARTQLGDLLLHLEKKHGEDWGKVYDEAWERIDKKVEGLSKHIKLEEERRSEDAQSKAALTDWLRAKASFVIEGLKEADKDEFCRCELKLQKWYGDLRGKPFAIEAENSILDISGFSKQYNCAFIWQKDGVKKLNLYLIINYFKGGKLRFKKIKPEAFEANRFYTVINKKSGEIVPMEVNFNFDDPNLIILPLAFGKRQGREFIWNDLLSLETGSLKLANGRVIEKTLYNRRTRQDEPALFVALTFERREVLDSSNIKPMNLIGVDRGENIPAVIALTDPEGCPLSRFKDSLGNPTHILRIGESYKEKQRTIQAKKEVEQRRAGGYSRKYASKAKNLADDMVRNTARDLLYYAVTQDAMLIFENLSRGFGRQGKRTFMAERQYTRMEDWLTAKLAYEGLPSKTYLSKTLAQYTSKTCSNCGFTITSADYDRVLEKLKKTATGWMTTINGKELKVEGQITYYNRYKRQNVVKDLSVELDRLSEESVNNDISSWTKGRSGEALSLLKKRFSHRPVQEKFVCLNCGFETHADEQAALNIARSWLFLRSQEYKKYQTNKTTGNTDKRAFVETWQSFYRKKLKEVWKPAV

SEQ ID NO: 34929 - protein, 979 aa, synthetic construct
  REGION 1..979: note = engineered CasX variant
QEIKRINKIRRRLVKDSNTKKAGKTGPMKTLLVRVMTPDLRERLENLRKKPENIPQPISNTSRANLNKLLTDYTEMKKAILHVYWEEFQKDPVGLMSRVAQPASKKIDQNKLKPEMDEKGNLTTAGFACSQCGQPLFVYKLEQVSEKGKAYTNYFGRCNVAEHEKLILLYQLKPEKDSDEAVTYSLGKFGQRALDFYSIHVTKESTHPVKPLAQIAGNRYASYPVGKALSDACMGTIASFLSKYQDIIIEHQKVVKGNQKRLESLRELAGKENLEYPSVTLPPQPHTKEGVDAYNEVIARVRMWVNLNLWQKLKLSRDDAKPLLRLKGFPSFPLVERQANEVDWWDMVCNVKKLINEKKEDGKVFWQNLAGYKRQEALRPYLSSEEDRKKGKKFARYQLGDLLLHLEKKHEGEDWGKVYDEAWERIDKKVEGLSKHIKLEEERRSEDAQSKAALTDWLRAKASFVIEGLKEADKDEFCRCELKLQKWYGDLRGKPFAIEAENSILDISGFSKQYNCAFIWQKDGVKKLNLYLIINYFKGGKLRFKKIKPEAFEANRFYTVINKKSGEIVPMEVNFNFDDPNLIILPLAFGKRQGREFIWNDLLSLETGSLKLANGRVIEKTLYNRRTRQDEPALFVALTFERREVLDSSNIKPMNLIGVDRGENIPAVIALTDPEGCPLSRFKDSLGNPTHILRIGESYKEKQRTIQAKKEVEQRRAGGYSRKYASKAKNLADDMVRNTARDLLYYAVTQDAMLIFENLSRGFGRQGKRTFMAERQYTRMEDWLTAKLAYEGLPSKTYLSKTLAQYTSKTCSNCGFTITSADYDRVLEKLKKTATGWMTTINGKELKVEGQITYYNRYKRQNVVKDLSVELDRLSEESVNNDISSWTKGRSGEALSLLKKRFSHRPVQEKFVCLNCGFETHADEQAALNIARSWLFLRSQEYKKYQTNKTTGNTDKRAFVETWQSFYRKKLKEVWKPAV

SEQ ID NO: 34930 - protein, 979 aa, synthetic construct
  REGION 1..979: note = engineered CasX variant
QEIKRINKIRRRLVKDSNTKKAGKTGPMKTLLVRVMTPDLRERLENLRKKPENIPQPISNTSRANLNKLLTDYTEMKKAILHVYWEEFQKDPVGLMSRVAQPASKKIDQNKLKPEMDEKGNLTTAGFACSQCGQPLFVYKLEQVSEKGKAYTNYFGRCNVAEHEKLILLYQLKPEKDSDEAVTYSLGKFGQRALDFYSIHVTKESTHPVKPLAQIAGNRYASHPVGKALSDACMGTIASFLSKYQDIIIEHQKVVKGNQKRLESLRELAGKENLEYPSVTLPPQPHTKEGVDAYNEVIARVRMWVNLNLWQKLKLSRDDAKPLLRLKGFPSFPLVERQANEVDWWDMVCNVKKLINEKKEDGKVFWQNLAGYKRQEALRPYLSSEEDRKKGKKFARYQLGDLLLHLEKKHEGEDWGKVYDEAWERIDKKVEGLSKHIKLEEERRSEDAQSKAALTDWLRAKASFVIEGLKEADKDEFCRCELKLQKWYGDLRGKPFAIEAENSILDISGFSKQYNCAFIWQKDGVKKLNLYLIINYFKGGKLRFKKIKPEAFEANRFYTVINKKSGEIVPMEVNFNFDDPNLIILPLAFGKRQGREFIWNDLLSLETGSLKLANGRVIEKTLYNRRTRQDEPALFVALTFERREVLDSSNIKPMNLIGVDRGENIPAVIALTDPEGCPLSRFKDSLGNPTHILRIGESYKEKQRTIQAKKEVEQRRAGGYSRKYASKAKNLADDMVRNTARDLLYYAVTQDAMLIFENLSRGFGRQGKRTFMAERQYTRMEDWLTAKLAYEGLPSKTYLSKTLAQYTSKTCSNCGFTITSADYDRVLEKLKKTATGWMTTINGKELKVEGQITYYNRYKRQNVVKDLSVELDRLSEESVNNDISSWTKGRSGEALSLLKKRFSHRPVQEKFVCLNCGFETHADEQAALNIARSWLFLRSQEYKKYQTNKTTGNTDKRAFVETWQSFYRKKLKEVWKPAV

SEQ ID NO: 34931 - protein, 979 aa, synthetic construct
  REGION 1..979: note = engineered CasX variant
QEIKRINKIRRRLVKDSNTKKAGKTGPMKTLLVRVMTPDLRERLENLRKKPENIPQPISNTSRANLNKLLTDYTEMKKAILHVYWEEFQKDPVGLMSRVAQPASKKIDQNKLKPEMDEKGNLTTAGFACSQCGQPLFVYKLEQVSEKGKAYTNYFGRCNVAEHEKLILLYQLKPEKDSDEAVTYSLGKFGQRALDFYSIHVTKESTHPVKPLAQIAGNRYASSPVGKALSDACMGTIASFLSKYQDIIIEHQKVVKGNQKRLESLRELAGKENLEYPSVTLPPQPHTKEGVDAYNEVIARVRMWVNLNLWQKLKLSRDDAKPLLRLKGFPSFPLVERQANEVDWWDMVCNVKKLINEKKEDGKVFWQNLAGYKRQEALRPYLSSEEDRKKGKKFARYQLGDLLLHLEKKHEGEDWGKVYDEAWERIDKKVEGLSKHIKLEEERRSEDAQSKAALTDWLRAKASFVIEGLKEADKDEFCRCELKLQKWYGDLRGKPFAIEAENSILDISGFSKQYNCAFIWQKDGVKKLNLYLIINYFKGGKLRFKKIKPEAFEANRFYTVINKKSGEIVPMEVNFNFDDPNLIILPLAFGKRQGREFIWNDLLSLETGSLKLANGRVIEKTLYNRRTRQDEPALFVALTFERREVLDSSNIKPMNLIGVDRGENIPAVIALTDPEGCPLSRFKDSLGNPTHILRIGESYKEKQRTIQAKKEVEQRRAGGYSRKYASKAKNLADDMVRNTARDLLYYAVTQDAMLIFENLSRGFGRQGKRTFMAERQYTRMEDWLTAKLAYEGLPSKTYLSKTLAQYTSKTCSNCGFTITSADYDRVLEKLKKTATGWMTTINGKELKVEGQITYYNRYKRQNVVKDLSVELDRLSEESVNNDISSWTKGRSGEALSLLKKRFSHRPVQEKFVCLNCGFETHADEQAALNIARSWLFLRSQEYKKYQTNKTTGNTDKRAFVETWQSFYRKKLKEVWKPAV

SEQ ID NO: 34932 - protein, 979 aa, synthetic construct
  REGION 1..979: note = engineered CasX variant
QEIKRINKIRRRLVKDSNTKKAGKTGPMKTLLVRVMTPDLRERLENLRKKPENIPQPISNTSRANLNKLLTDYTEMKKAILHVYWEEFQKDPVGLMSRVAQPASKKIDQNKLKPEMDEKGNLTTAGFACSQCGQPLFVYKLEQVSEKGKAYTNYFGRCNVAEHEKLILLYQLKPEKDSDEAVTYSLGKFGQRALDFYSIHVTKESTHPVKPLAQIAGNRYASTPVGKALSDACMGTIASFLSKYQDIIIEHQKVVKGNQKRLESLRELAGKENLEYPSVTLPPQPHTKEGVDAYNEVIARVRMWVNLNLWQKLKLSRDDAKPLLRLKGFPSFPLVERQANEVDWWDMVCNVKKLINEKKEDGKVFWQNLAGYKRQEALRPYLSSEEDRKKGKKFARYQLGDLLLHLEKKHEGEDWGKVYDEAWERIDKKVEGLSKHIKLEEERRSEDAQSKAALTDWLRAKASFVIEGLKEADKDEFCRCELKLQKWYGDLRGKPFAIEAENSILDISGFSKQYNCAFIWQKDGVKKLNLYLIINYFKGGKLRFKKIKPEAFEANRFYTVINKKSGEIVPMEVNFNFDDPNLIILPLAFGKRQGREFIWNDLLSLETGSLKLANGRVIEKTLYNRRTRQDEPALFVALTFERREVLDSSNIKPMNLIGVDRGENIPAVIALTDPEGCPLSRFKDSLGNPTHILRIGESYKEKQRTIQAKKEVEQRRAGGYSRKYASKAKNLADDMVRNTARDLLYYAVTQDAMLIFENLSRGFGRQGKRTFMAERQYTRMEDWLTAKLAYEGLPSKTYLSKTLAQYTSKTCSNCGFTITSADYDRVLEKLKKTATGWMTTINGKELKVEGQITYYNRYKRQNVVKDLSVELDRLSEESVNNDISSWTKGRSGEALSLLKKRFSHRPVQEKFVCLNCGFETHADEQAALNIARSWLFLRSQEYKKYQTNKTTGNTDKRAFVETWQSFYRKKLKEVWKPAV

SEQ ID NO: 34933 - protein, 979 aa, synthetic construct
  REGION 1..979: note = engineered CasX variant
QEIKRINKIRRRLVKDSNTKKAGKTGPMKTLLVRVMTPDLRERLENLRKKPENIPQPISNTSRANLNKLLTDYTEMKKAILHVYWEEFQKDPVGLMSRVAQPASKKIDQNKLKPEMDEKGNLTTAGFACSQCGQPLFVYKLEQVSEKGKAYTNYFGRCNVAEHEKLILLYQLKPEKDSDEAVTYSLGKFGQRALDFYSIHVTKESTHPVKPLAQIAGNRYASAPVGKALSDACMGTIASFLSKYQDIIIEHQKVVKGNQKRLESLRELAGKENLEYPSVTLPPQPHTKEGVDAYNEVIARVRMWVNLNLWQKLKLSRDDAKPLLRLKGFPSFPLVERQANEVDWWDMVCNVKKLINEKKEDGKVFWQNLAGYKRQEALRPYLSSEEDRKKGKKFARYQLGDLLLHLEKKHEGEDWGKVYDEAWERIDKKVEGLSKHIKLEEERRSEDAQSKAALTDWLRAKASFVIEGLKEADKDEFCRCELKLQKWYGDLRGKPFAIEAENSILDISGFSKQYNCAFIWQKDGVKKLNLYLIINYFKGGKLRFKKIKPEAFEANRFYTVINKKSGEIVPMEVNFNFDDPNLIILPLAFGKRQGREFIWNDLLSLETGSLKLANGRVIEKTLYNRRTRQDEPALFVALTFERREVLDSSNIKPMNLIGVDRGENIPAVIALTDPEGCPLSRFKDSLGNPTHILRIGESYKEKQRTIQAKKEVEQRRAGGYSRKYASKAKNLADDMVRNTARDLLYYAVTQDAMLIFENLSRGFGRQGKRTFMAERQYTRMEDWLTAKLAYEGLPSKTYLSKTLAQYTSKTCSNCGFTITSADYDRVLEKLKKTATGWMTTINGKELKVEGQITYYNRYKRQNVVKDLSVELDRLSEESVNNDISSWTKGRSGEALSLLKKRFSHRPVQEKFVCLNCGFETHADEQAALNIARSWLFLRSQEYKKYQTNKTTGNTDKRAFVETWQSFYRKKLKEVWKPAV

SEQ ID NO: 34934 - protein, 979 aa, synthetic construct
  REGION 1..979: note = engineered CasX variant
QEIKRINKIRRRLVKDSNTKKAGKTGPMKTLLVRVMTPDLRERLENLRKKPENIPQPISNTSRANLNKLLTDYTEMKKAILHVYWEEFQKDPVGLMSRVAQPASKKIDQNKLKPEMDEKGNLTTAGFACSQCGQPLFVYKLEQVSEKGKAYTNYFGRCNVAEHEKLILLYQLKPEKDSDEAVTYSLGKFGQRALDFYSIHVTKESTHPVKPLAQIAGNRYASVPVGKALSDACMGTIASFLSKYQDIIIEHQKVVKGNQKRLESLRELAGKENLEYPSVTLPPQPHTKEGVDAYNEVIARVRMWVNLNLWQKLKLSRDDAKPLLRLKGFPSFPLVERQANEVDWWDMVCNVKKLINEKKEDGKVFWQNLAGYKRQEALRPYLSSEEDRKKGKKFARYQLGDLLLHLEKKHEGEDWGKVYDEAWERIDKKVEGLSKHIKLEEERRSEDAQSKAALTDWLRAKASFVIEGLKEADKDEFCRCELKLQKWYGDLRGKPFAIEAENSILDISGFSKQYNCAFIWQKDGVKKLNLYLIINYFKGGKLRFKKIKPEAFEANRFYTVINKKSGEIVPMEVNFNFDDPNLIILPLAFGKRQGREFIWNDLLSLETGSLKLANGRVIEKTLYNRRTRQDEPALFVALTFERREVLDSSNIKPMNLIGVDRGENIPAVIALTDPEGCPLSRFKDSLGNPTHILRIGESYKEKQRTIQAKKEVEQRRAGGYSRKYASKAKNLADDMVRNTARDLLYYAVTQDAMLIFENLSRGFGRQGKRTFMAERQYTRMEDWLTAKLAYEGLPSKTYLSKTLAQYTSKTCSNCGFTITSADYDRVLEKLKKTATGWMTTINGKELKVEGQITYYNRYKRQNVVKDLSVELDRLSEESVNNDISSWTKGRSGEALSLLKKRFSHRPVQEKFVCLNCGFETHADEQAALNIARSWLFLRSQEYKKYQTNKTTGNTDKRAFVETWQSFYRKKLKEVWKPAV

SEQ ID NO: 34935 - protein, 979 aa, synthetic construct
  REGION 1..979: note = engineered CasX variant
QEIKRINKIRRRLVKDSNTKKAGKTGPMKTLLVRVMTPDLRERLENLRKKPENIPQPISNTSRANLNKLLTDYTEMKKAILHVYWEEFQKDPVGLMSRVAQPASKKIDQNKLKPEMDEKGNLTTAGFACSQCGQPLFVYKLEQVSEKGKAYTNYFGRCNVAEHEKLIKLYQLKPEKDSDEAVTYSLGKFGQRALDFYSIHVTKESTHPVKPLAQIAGNRYASGPVGKALSDACMGTIASFLSKYQDIIIEHQKVVKGNQKRLESLRELAGKENLEYPSVTLPPQPHTKEGVDAYNEVIARVRMWVNLNLWQKLKLSRDDAKPLLRLKGFPSFPLVERQANEVDWWDMVCNVKKLINEKKEDGKVFWQNLAGYKRQEALRPYLSSEEDRKKGKKFARYQLGDLLLHLEKKHEGEDWGKVYDEAWERIDKKVEGLSKHIKLEEERRSEDAQSKAALTDWLRAKASFVIEGLKEADKDEFCRCELKLQKWYGDLRGKPFAIEAENSILDISGFSKQYNCAFIWQKDGVKKLNLYLIINYFKGGKLRFKKIKPEAFEANRFYTVINKKSGEIVPMEVNFNFDDPNLIILPLAFGKRQGREFIWNDLLSLETGSLKLANGRVIEKTLYNRRTRQDEPALFVALTFERREVLDSSNIKPMNLIGVDRGENIPAVIALTDPEGCPLSRFKDSLGNPTHILRIGESYKEKQRTIQAKKEVEQRRAGGYSRKYASKAKNLADDMVRNTARDLLYYAVTQDAMLIFENLSRGFGRQGKRTFMAERQYTRMEDWLTAKLAYEGLPSKTYLSKTLAQYTSKTCSNCGFTITSADYDRVLEKLKKTATGWMTTINGKELKVEGQITYYNRYKRQNVVKDLSVELDRLSEESVNNDISSWTKGRSGEALSLLKKRFSHRPVQEKFVCLNCGFETHADEQAALNIARSWLFLRSQEYKKYQTNKTTGNTDKRAFVETWQSFYRKKLKEVWKPAV

SEQ ID NO: 34936 - protein, 978 aa, synthetic construct
  REGION 1..978: note = engineered CasX variant
QEIKRINKIRRRLVKDSNTKKAGKTGPMKTLLVRVMTPDLRERLENLRKKPENIPQPISNTSRANLNKLLTDYTEMKKAILHVYWEEFQKDPVGLMSRVAQPASKKIDQNKLKPEMDEKGNLTTAGFACSQCGQPLFVYKLEQVSEKGKAYTNYFGRCNVAEHEKLILLYQLKPEKDSDEAVTYSLGKFGQRALDFYSIHVTKESTHPVKPLAQIAGNRYASPVGKALSDACMGTIASFLSKYQDIIIEHQKVVKGNQKRLESLRELAGKENLEYPSVTLPPQPHTKEGVDAYNEVIARVRMWVNLNLWQKLKLSRDDAKPLLRLKGFPSFPLVERQANEVDWWDMVCNVKKLINEKKEDGKVFWQNLAGYKRQEALRPYLSSEEDRKKGKKFARYQLGDLLLHLEKKHEGEDWGKVYDEAWERIDKKVEGLSKHIKLEEERRSEDAQSKAALTDWLRAKASFVIEGLKEADKDEFCRCELKLQKWYGDLRGKPFAIEAENSILDISGFSKQYNCAFIWQKDGVKKLNLYLIINYFKGGKLRFKKIKPEAFEANRFYTVINKKSGEIVPMEVNFNFDDPNLIILPLAFGKRQGREFIWNDLLSLETGSLKLANGRVIEKTLYNRRTRQDEPALFVALTFERREVLDSSNIKPMNLIGVDRGENIPAVIALTDPEGCPLSRFKDSLGNPTHILRIGESYKEKQRTIQAKKEVEQRRAGGYSRKYASKAKNLADDMVRNTARDLLYYAVTQDAMLIFENLSRGFGRQGKRTFMAERQYTRMEDWLTAKLAYEGLPSKTYLSKTLAQYTSKTCSNCGFTITSADYDRVLEKLKKTATGWMTTINGKELKVEGQITYYNRYKRQNVVKDLSVELDRLSEESVNNDISSWTKGRSGEALSLLKKRFSHRPVQEKFVCLNCGFETHADEQAALNIARSWLFLRSQEYKKYQTNKTTGNTDKRAFVETWQSFYRKKLKEVWKPAV

SEQ ID NO: 34937 - protein, 978 aa, synthetic construct
  REGION 1..978: note = engineered CasX variant
QEIKRINKIRRRLVKDSNTKKAGKTGPMKTLLVRVMTPDLRERLENLRKKPENIPQPISNTSRANLNKLLTDYTEMKKAILHVYWEEFQKDPVGLMSRVAQPASKKIDQNKLKPEMDEKGNLTTAGFACSQCGQPLFVYKLEQVSEKGKAYTNYFGRCNVAEHEKLILLYQLKPEKDSDEAVTYSLGKFGQRALDFYSIHVTKESTHPVKPLAQIAGNRYASYPVGKALSDACMGTIASFLSKYQDIIIEHQKVVKGNQKRLESLRELAGKENLEYPSVTLPPQPHTKEGVDAYNEVIARVRMWVNLNLWQKLKLSRDDAKPLLRLKGFPSFPLVERQANEVDWWDMVCNVKKLINEKKEDGKVFWQNLAGYKRQEALRPYLSSEEDRKKGKKFARYQLGDLLLHLEKKHGEDWGKVYDEAWERIDKKVEGLSKHIKLEEERRSEDAQSKAALTDWLRAKASFVIEGLKEADKDEFCRCDLKLQKWYGDLRGKPFAIEAENSILDISGFSKQYNCAFIWQKDGVKKLNLYLIINYFKGGKLRFKKIKPEAFEANRFYTVINKKSGEIVPMEVNFNFDDPNLIILPLAFGKRQGREFIWNDLLSLETGSLKLANGRVIEKTLYNRRTRQDEPALFVALTFERREVLDSSNIKPMNLIGVDRGENIPAVIALTDPEGCPLSRFKDSLGNPTHILRIGESYKEKQRTIQAKKEVEQRRAGGYSRKYASKAKNLADDMVRNTARDLLYYAVTQDAMLIFENLSRGFGRQGKRTFMAERQYTRMEDWLTAKLAYEGLPSKTYLSKTLAQYTSKTCSNCGFTITSADYDRVLEKLKKTATGWMTTINGKELKVEGQITYYNRYKRQNVVKDLSVELDRLSEESVNNDISSWTKGRSGEALSLLKKRFSHRPVQEKFVCLNCGFETHADEQAALNIARSWLFLRSQEYKKYQTNKTTGNTDKRAFVETWQSFYRKKLKEVWKPAV

SEQ ID NO: 34938 - protein, 978 aa, synthetic construct
  REGION 1..978: note = engineered CasX variant
QEIKRINKIRRRLVKDSNTKKAGKTGPMKTLLVRVMTPDLRERLENLRKKPENIPQPISNTSRANLNKLLTDYTEMKKAILHVYWEEFQKDPVGLMSRVAQPASKKIDQNKLKPEMDEKGNLTTAGFACSQCGQPLFVYKLEQVSEKGKAYTNYFGRCNVAEHEKLILLYQLKPEKDSDEAVTYSLGKFGQRALDFYSIHVTKESTHPVKPLAQIAGNRYASHPVGKALSDACMGTIASFLSKYQDIIIEHQKVVKGNQKRLESLRELAGKENLEYPSVTLPPQPHTKEGVDAYNEVIARVRMWVNLNLWQKLKLSRDDAKPLLRLKGFPSFPLVERQANEVDWWDMVCNVKKLINEKKEDGKVFWQNLAGYKRQEALRPYLSSEEDRKKGKKFARYQLGDLLLHLEKKHGEDWGKVYDEAWERIDKKVEGLSKHIKLEEERRSEDAQSKAALTDWLRAKASFVIEGLKEADKDEFCRCDLKLQKWYGDLRGKPFAIEAENSILDISGFSKQYNCAFIWQKDGVKKLNLYLIINYFKGGKLRFKKIKPEAFEANRFYTVINKKSGEIVPMEVNFNFDDPNLIILPLAFGKRQGREFIWNDLLSLETGSLKLANGRVIEKTLYNRRTRQDEPALFVALTFERREVLDSSNIKPMNLIGVDRGENIPAVIALTDPEGCPLSRFKDSLGNPTHILRIGESYKEKQRTIQAKKEVEQRRAGGYSRKYASKAKNLADDMVRNTARDLLYYAVTQDAMLIFENLSRGFGRQGKRTFMAERQYTRMEDWLTAKLAYEGLPSKTYLSKTLAQYTSKTCSNCGFTITSADYDRVLEKLKKTATGWMTTINGKELKVEGQITYYNRYKRQNVVKDLSVELDRLSEESVNNDISSWTKGRSGEALSLLKKRFSHRPVQEKFVCLNCGFETHADEQAALNIARSWLFLRSQEYKKYQTNKTTGNTDKRAFVETWQSFYRKKLKEVWKPAV

SEQ ID NO: 34939 - protein, 978 aa, synthetic construct
  REGION 1..978: note = engineered CasX variant
QEIKRINKIRRRLVKDSNTKKAGKTGPMKTLLVRVMTPDLRERLENLRKKPENIPQPISNTSRANLNKLLTDYTEMKKAILHVYWEEFQKDPVGLMSRVAQPASKKIDQNKLKPEMDEKGNLTTAGFACSQCGQPLFVYKLEQVSEKGKAYTNYFGRCNVAEHEKLILLYQLKPEKDSDEAVTYSLGKFGQRALDFYSIHVTKESTHPVKPLAQIAGNRYASSPVGKALSDACMGTIASFLSKYQDIIIEHQKVVKGNQKRLESLRELAGKENLEYPSVTLPPQPHTKEGVDAYNEVIARVRMWVNLNLWQKLKLSRDDAKPLLRLKGFPSFPLVERQANEVDWWDMVCNVKKLINEKKEDGKVFWQNLAGYKRQEALRPYLSSEEDRKKGKKFARYQLGDLLLHLEKKHGEDWGKVYDEAWERIDKKVEGLSKHIKLEEERRSEDAQSKAALTDWLRAKASFVIEGLKEADKDEFCRCDLKLQKWYGDLRGKPFAIEAENSILDISGFSKQYNCAFIWQKDGVKKLNLYLIINYFKGGKLRFKKIKPEAFEANRFYTVINKKSGEIVPMEVNFNFDDPNLIILPLAFGKRQGREFIWNDLLSLETGSLKLANGRVIEKTLYNRRTRQDEPALFVALTFERREVLDSSNIKPMNLIGVDRGENIPAVIALTDPEGCPLSRFKDSLGNPTHILRIGESYKEKQRTIQAKKEVEQRRAGGYSRKYASKAKNLADDMVRNTARDLLYYAVTQDAMLIFENLSRGFGRQGKRTFMAERQYTRMEDWLTAKLAYEGLPSKTYLSKTLAQYTSKTCSNCGFTITSADYDRVLEKLKKTATGWMTTINGKELKVEGQITYYNRYKRQNVVKDLSVELDRLSEESVNNDISSWTKGRSGEALSLLKKRFSHRPVQEKFVCLNCGFETHADEQAALNIARSWLFLRSQEYKKYQTNKTTGNTDKRAFVETWQSFYRKKLKEVWKPAV

SEQ ID NO: 34940 - protein, 978 aa, synthetic construct
  REGION 1..978: note = engineered CasX variant
QEIKRINKIRRRLVKDSNTKKAGKTGPMKTLLVRVMTPDLRERLENLRKKPENIPQPISNTSRANLNKLLTDYTEMKKAILHVYWEEFQKDPVGLMSRVAQPASKKIDQNKLKPEMDEKGNLTTAGFACSQCGQPLFVYKLEQVSEKGKAYTNYFGRCNVAEHEKLILLYQLKPEKDSDEAVTYSLGKFGQRALDFYSIHVTKESTHPVKPLAQIAGNRYASTPVGKALSDACMGTIASFLSKYQDIIIEHQKVVKGNQKRLESLRELAGKENLEYPSVTLPPQPHTKEGVDAYNEVIARVRMWVNLNLWQKLKLSRDDAKPLLRLKGFPSFPLVERQANEVDWWDMVCNVKKLINEKKEDGKVFWQNLAGYKRQEALRPYLSSEEDRKKGKKFARYQLGDLLLHLEKKHGEDWGKVYDEAWERIDKKVEGLSKHIKLEEERRSEDAQSKAALTDWLRAKASFVIEGLKEADKDEFCRCDLKLQKWYGDLRGKPFAIEAENSILDISGFSKQYNCAFIWQKDGVKKLNLYLIINYFKGGKLRFKKIKPEAFEANRFYTVINKKSGEIVPMEVNFNFDDPNLIILPLAFGKRQGREFIWNDLLSLETGSLKLANGRVIEKTLYNRRTRQDEPALFVALTFERREVLDSSNIKPMNLIGVDRGENIPAVIALTDPEGCPLSRFKDSLGNPTHILRIGESYKEKQRTIQAKKEVEQRRAGGYSRKYASKAKNLADDMVRNTARDLLYYAVTQDAMLIFENLSRGFGRQGKRTFMAERQYTRMEDWLTAKLAYEGLPSKTYLSKTLAQYTSKTCSNCGFTITSADYDRVLEKLKKTATGWMTTINGKELKVEGQITYYNRYKRQNVVKDLSVELDRLSEESVNNDISSWTKGRSGEALSLLKKRFSHRPVQEKFVCLNCGFETHADEQAALNIARSWLFLRSQEYKKYQTNKTTGNTDKRAFVETWQSFYRKKLKEVWKPAV

SEQ ID NO: 34941 - protein, 978 aa, synthetic construct
  REGION 1..978: note = engineered CasX variant
QEIKRINKIRRRLVKDSNTKKAGKTGPMKTLLVRVMTPDLRERLENLRKKPENIPQPISNTSRANLNKLLTDYTEMKKAILHVYWEEFQKDPVGLMSRVAQPASKKIDQNKLKPEMDEKGNLTTAGFACSQCGQPLFVYKLEQVSEKGKAYTNYFGRCNVAEHEKLILLYQLKPEKDSDEAVTYSLGKFGQRALDFYSIHVTKESTHPVKPLAQIAGNRYASAPVGKALSDACMGTIASFLSKYQDIIIEHQKVVKGNQKRLESLRELAGKENLEYPSVTLPPQPHTKEGVDAYNEVIARVRMWVNLNLWQKLKLSRDDAKPLLRLKGFPSFPLVERQANEVDWWDMVCNVKKLINEKKEDGKVFWQNLAGYKRQEALRPYLSSEEDRKKGKKFARYQLGDLLLHLEKKHGEDWGKVYDEAWERIDKKVEGLSKHIKLEEERRSEDAQSKAALTDWLRAKASFVIEGLKEADKDEFCRCDLKLQKWYGDLRGKPFAIEAENSILDISGFSKQYNCAFIWQKDGVKKLNLYLIINYFKGGKLRFKKIKPEAFEANRFYTVINKKSGEIVPMEVNFNFDDPNLIILPLAFGKRQGREFIWNDLLSLETGSLKLANGRVIEKTLYNRRTRQDEPALFVALTFERREVLDSSNIKPMNLIGVDRGENIPAVIALTDPEGCPLSRFKDSLGNPTHILRIGESYKEKQRTIQAKKEVEQRRAGGYSRKYASKAKNLADDMVRNTARDLLYYAVTQDAMLIFENLSRGFGRQGKRTFMAERQYTRMEDWLTAKLAYEGLPSKTYLSKTLAQYTSKTCSNCGFTITSADYDRVLEKLKKTATGWMTTINGKELKVEGQITYYNRYKRQNVVKDLSVELDRLSEESVNNDISSWTKGRSGEALSLLKKRFSHRPVQEKFVCLNCGFETHADEQAALNIARSWLFLRSQEYKKYQTNKTTGNTDKRAFVETWQSFYRKKLKEVWKPAV

SEQ ID NO: 34942 - protein, 978 aa, synthetic construct
  REGION 1..978: note = engineered CasX variant
QEIKRINKIRRRLVKDSNTKKAGKTGPMKTLLVRVMTPDLRERLENLRKKPENIPQPISNTSRANLNKLLTDYTEMKKAILHVYWEEFQKDPVGLMSRVAQPASKKIDQNKLKPEMDEKGNLTTAGFACSQCGQPLFVYKLEQVSEKGKAYTNYFGRCNVAEHEKLILLYQLKPEKDSDEAVTYSLGKFGQRALDFYSIHVTKESTHPVKPLAQIAGNRYASVPVGKALSDACMGTIASFLSKYQDIIIEHQKVVKGNQKRLESLRELAGKENLEYPSVTLPPQPHTKEGVDAYNEVIARVRMWVNLNLWQKLKLSRDDAKPLLRLKGFPSFPLVERQANEVDWWDMVCNVKKLINEKKEDGKVFWQNLAGYKRQEALRPYLSSEEDRKKGKKFARYQLGDLLLHLEKKHGEDWGKVYDEAWERIDKKVEGLSKHIKLEEERRSEDAQSKAALTDWLRAKASFVIEGLKEADKDEFCRCDLKLQKWYGDLRGKPFAIEAENSILDISGFSKQYNCAFIWQKDGVKKLNLYLIINYFKGGKLRFKKIKPEAFEANRFYTVINKKSGEIVPMEVNFNFDDPNLIILPLAFGKRQGREFIWNDLLSLETGSLKLANGRVIEKTLYNRRTRQDEPALFVALTFERREVLDSSNIKPMNLIGVDRGENIPAVIALTDPEGCPLSRFKDSLGNPTHILRIGESYKEKQRTIQAKKEVEQRRAGGYSRKYASKAKNLADDMVRNTARDLLYYAVTQDAMLIFENLSRGFGRQGKRTFMAERQYTRMEDWLTAKLAYEGLPSKTYLSKTLAQYTSKTCSNCGFTITSADYDRVLEKLKKTATGWMTTINGKELKVEGQITYYNRYKRQNVVKDLSVELDRLSEESVNNDISSWTKGRSGEALSLLKKRFSHRPVQEKFVCLNCGFETHADEQAALNIARSWLFLRSQEYKKYQTNKTTGNTDKRAFVETWQSFYRKKLKEVWKPAV

SEQ ID NO: 34943 - protein, 978 aa, synthetic construct
  REGION 1..978: note = engineered CasX variant
QEIKRINKIRRRLVKDSNTKKAGKTGPMKTLLVRVMTPDLRERLENLRKKPENIPQPISNTSRANLNKLLTDYTEMKKAILHVYWEEFQKDPVGLMSRVAQPASKKIDQNKLKPEMDEKGNLTTAGFACSQCGQPLFVYKLEQVSEKGKAYTNYFGRCNVAEHEKLIKLYQLKPEKDSDEAVTYSLGKFGQRALDFYSIHVTKESTHPVKPLAQIAGNRYASGPVGKALSDACMGTIASFLSKYQDIIIEHQKVVKGNQKRLESLRELAGKENLEYPSVTLPPQPHTKEGVDAYNEVIARVRMWVNLNLWQKLKLSRDDAKPLLRLKGFPSFPLVERQANEVDWWDMVCNVKKLINEKKEDGKVFWQNLAGYKRQEALRPYLSSEEDRKKGKKFARYQLGDLLLHLEKKHGEDWGKVYDEAWERIDKKVEGLSKHIKLEEERRSEDAQSKAALTDWLRAKASFVIEGLKEADKDEFCRCDLKLQKWYGDLRGKPFAIEAENSILDISGFSKQYNCAFIWQKDGVKKLNLYLIINYFKGGKLRFKKIKPEAFEANRFYTVINKKSGEIVPMEVNFNFDDPNLIILPLAFGKRQGREFIWNDLLSLETGSLKLANGRVIEKTLYNRRTRQDEPALFVALTFERREVLDSSNIKPMNLIGVDRGENIPAVIALTDPEGCPLSRFKDSLGNPTHILRIGESYKEKQRTIQAKKEVEQRRAGGYSRKYASKAKNLADDMVRNTARDLLYYAVTQDAMLIFENLSRGFGRQGKRTFMAERQYTRMEDWLTAKLAYEGLPSKTYLSKTLAQYTSKTCSNCGFTITSADYDRVLEKLKKTATGWMTTINGKELKVEGQITYYNRYKRQNVVKDLSVELDRLSEESVNNDISSWTKGRSGEALSLLKKRFSHRPVQEKFVCLNCGFETHADEQAALNIARSWLFLRSQEYKKYQTNKTTGNTDKRAFVETWQSFYRKKLKEVWKPAV

SEQ ID NO: 34944 - protein, 977 aa, synthetic construct
  REGION 1..977: note = engineered CasX variant
QEIKRINKIRRRLVKDSNTKKAGKTGPMKTLLVRVMTPDLRERLENLRKKPENIPQPISNTSRANLNKLLTDYTEMKKAILHVYWEEFQKDPVGLMSRVAQPASKKIDQNKLKPEMDEKGNLTTAGFACSQCGQPLFVYKLEQVSEKGKAYTNYFGRCNVAEHEKLILLYQLKPEKDSDEAVTYSLGKFGQRALDFYSIHVTKESTHPVKPLAQIAGNRYASPVGKALSDACMGTIASFLSKYQDIIIEHQKVVKGNQKRLESLRELAGKENLEYPSVTLPPQPHTKEGVDAYNEVIARVRMWVNLNLWQKLKLSRDDAKPLLRLKGFPSFPLVERQANEVDWWDMVCNVKKLINEKKEDGKVFWQNLAGYKRQEALRPYLSSEEDRKKGKKFARYQLGDLLLHLEKKHGEDWGKVYDEAWERIDKKVEGLSKHIKLEEERRSEDAQSKAALTDWLRAKASFVIEGLKEADKDEFCRCDLKLQKWYGDLRGKPFAIEAENSILDISGFSKQYNCAFIWQKDGVKKLNLYLIINYFKGGKLRFKKIKPEAFEANRFYTVINKKSGEIVPMEVNFNFDDPNLIILPLAFGKRQGREFIWNDLLSLETGSLKLANGRVIEKTLYNRRTRQDEPALFVALTFERREVLDSSNIKPMNLIGVDRGENIPAVIALTDPEGCPLSRFKDSLGNPTHILRIGESYKEKQRTIQAKKEVEQRRAGGYSRKYASKAKNLADDMVRNTARDLLYYAVTQDAMLIFENLSRGFGRQGKRTFMAERQYTRMEDWLTAKLAYEGLPSKTYLSKTLAQYTSKTCSNCGFTITSADYDRVLEKLKKTATGWMTTINGKELKVEGQITYYNRYKRQNVVKDLSVELDRLSEESVNNDISSWTKGRSGEALSLLKKRFSHRPVQEKFVCLNCGFETHADEQAALNIARSWLFLRSQEYKKYQTNKTTGNTDKRAFVETWQSFYRKKLKEVWKPAV

SEQ ID NO: 34945 - protein, 978 aa, synthetic construct
  REGION 1..978: note = engineered CasX variant
QEIKRINKIRRRLVKDSNTKKAGKTGPMKTLLVRVMTPDLRERLENLRKKPENIPQPISNTSRANLNKLLTDYTEMKKAILHVYWEEFQKDPVGLMSRVAQPASKKIDQNKLKPEMDEKGNLTTAGFACSQCGQPLFVYKLEQVSEKGKAYTNYFGRCNVAEHEKLILLYQLKPEKDSDEAVTYSLGKFGQRALDFYSIHVTKESTHPVKPLAQIAGNRYASYPVGKALSDACMGTIASFLSKYQDIIIEHQKVVKGNQKRLESLRELAGKENLEYPSVTLPPQPHTKEGVDAYNEVIARVRMWVNLNLWQKLKLSRDDAKPLLRLKGFPSFPLVERQANEVDWWDMVCNVKKLINEKKEDGKVFWQNLAGYKRQEALRPYLSSEEDRKKGKKFARYQLGDLLLHLEKKHGEDWGKVYDEAWERIDKKVEGLSKHIKLEEERRSEDAQSKAALTDWLRAKASFVIEGLKEADKDEFCRCELKLQKWYGDLRGKPFAIEAENSILDISGFSKQYNCAFIWQKDGVKKLNLYLIINYFKGGKLRFKKIKPEAFEANRFYTVINKKSGEIVPMEVNFNFDDPNLIILPLAFGKRFGREFIWNDLLSLETGSLKLANGRVIEKTLYNRRTRQDEPALFVALTFERREVLDSSNIKPMNLIGVDRGENIPAVIALTDPEGCPLSRFKDSLGNPTHILRIGESYKEKQRTIQAKKEVEQRRAGGYSRKYASKAKNLADDMVRNTARDLLYYAVTQDAMLIFENLSRGFGRQGKRTFMAERQYTRMEDWLTAKLAYEGLPSKTYLSKTLAQYTSKTCSNCGFTITSADYDRVLEKLKKTATGWMTTINGKELKVEGQITYYNRYKRQNVVKDLSVELDRLSEESVNNDISSWTKGRSGEALSLLKKRFSHRPVQEKFVCLNCGFETHADEQAALNIARSWLFLRSQEYKKYQTNKTTGNTDKRAFVETWQSFYRKKLKEVWKPAV

SEQ ID NO: 34946 - protein, 978 aa, synthetic construct
  REGION 1..978: note = engineered CasX variant
QEIKRINKIRRRLVKDSNTKKAGKTGPMKTLLVRVMTPDLRERLENLRKKPENIPQPISNTSRANLNKLLTDYTEMKKAILHVYWEEFQKDPVGLMSRVAQPASKKIDQNKLKPEMDEKGNLTTAGFACSQCGQPLFVYKLEQVSEKGKAYTNYFGRCNVAEHEKLILLYQLKPEKDSDEAVTYSLGKFGQRALDFYSIHVTKESTHPVKPLAQIAGNRYASHPVGKALSDACMGTIASFLSKYQDIIIEHQKVVKGNQKRLESLRELAGKENLEYPSVTLPPQPHTKEGVDAYNEVIARVRMWVNLNLWQKLKLSRDDAKPLLRLKGFPSFPLVERQANEVDWWDMVCNVKKLINEKKEDGKVFWQNLAGYKRQEALRPYLSSEEDRKKGKKFARYQLGDLLLHLEKKHGEDWGKVYDEAWERIDKKVEGLSKHIKLEEERRSEDAQSKAALTDWLRAKASFVIEGLKEADKDEFCRCELKLQKWYGDLRGKPFAIEAENSILDISGFSKQYNCAFIWQKDGVKKLNLYLIINYFKGGKLRFKKIKPEAFEANRFYTVINKKSGEIVPMEVNFNFDDPNLIILPLAFGKRFGREFIWNDLLSLETGSLKLANGRVIEKTLYNRRTRQDEPALFVALTFERREVLDSSNIKPMNLIGVDRGENIPAVIALTDPEGCPLSRFKDSLGNPTHILRIGESYKEKQRTIQAKKEVEQRRAGGYSRKYASKAKNLADDMVRNTARDLLYYAVTQDAMLIFENLSRGFGRQGKRTFMAERQYTRMEDWLTAKLAYEGLPSKTYLSKTLAQYTSKTCSNCGFTITSADYDRVLEKLKKTATGWMTTINGKELKVEGQITYYNRYKRQNVVKDLSVELDRLSEESVNNDISSWTKGRSGEALSLLKKRFSHRPVQEKFVCLNCGFETHADEQAALNIARSWLFLRSQEYKKYQTNKTTGNTDKRAFVETWQSFYRKKLKEVWKPAV

SEQ ID NO: 34947 - protein, 978 aa, synthetic construct
  REGION 1..978: note = engineered CasX variant
QEIKRINKIRRRLVKDSNTKKAGKTGPMKTLLVRVMTPDLRERLENLRKKPENIPQPISNTSRANLNKLLTDYTEMKKAILHVYWEEFQKDPVGLMSRVAQPASKKIDQNKLKPEMDEKGNLTTAGFACSQCGQPLFVYKLEQVSEKGKAYTNYFGRCNVAEHEKLILLYQLKPEKDSDEAVTYSLGKFGQRALDFYSIHVTKESTHPVKPLAQIAGNRYASSPVGKALSDACMGTIASFLSKYQDIIIEHQKVVKGNQKRLESLRELAGKENLEYPSVTLPPQPHTKEGVDAYNEVIARVRMWVNLNLWQKLKLSRDDAKPLLRLKGFPSFPLVERQANEVDWWDMVCNVKKLINEKKEDGKVFWQNLAGYKRQEALRPYLSSEEDRKKGKKFARYQLGDLLLHLEKKHGEDWGKVYDEAWERIDKKVEGLSKHIKLEEERRSEDAQSKAALTDWLRAKASFVIEGLKEADKDEFCRCELKLQKWYGDLRGKPFAIEAENSILDISGFSKQYNCAFIWQKDGVKKLNLYLIINYFKGGKLRFKKIKPEAFEANRFYTVINKKSGEIVPMEVNFNFDDPNLIILPLAFGKRFGREFIWNDLLSLETGSLKLANGRVIEKTLYNRRTRQDEPALFVALTFERREVLDSSNIKPMNLIGVDRGENIPAVIALTDPEGCPLSRFKDSLGNPTHILRIGESYKEKQRTIQAKKEVEQRRAGGYSRKYASKAKNLADDMVRNTARDLLYYAVTQDAMLIFENLSRGFGRQGKRTFMAERQYTRMEDWLTAKLAYEGLPSKTYLSKTLAQYTSKTCSNCGFTITSADYDRVLEKLKKTATGWMTTINGKELKVEGQITYYNRYKRQNVVKDLSVELDRLSEESVNNDISSWTKGRSGEALSLLKKRFSHRPVQEKFVCLNCGFETHADEQAALNIARSWLFLRSQEYKKYQTNKTTGNTDKRAFVETWQSFYRKKLKEVWKPAV

SEQ ID NO: 34948 - protein, 978 aa, synthetic construct
  REGION 1..978: note = engineered CasX variant
QEIKRINKIRRRLVKDSNTKKAGKTGPMKTLLVRVMTPDLRERLENLRKKPENIPQPISNTSRANLNKLLTDYTEMKKAILHVYWEEFQKDPVGLMSRVAQPASKKIDQNKLKPEMDEKGNLTTAGFACSQCGQPLFVYKLEQVSEKGKAYTNYFGRCNVAEHEKLILLYQLKPEKDSDEAVTYSLGKFGQRALDFYSIHVTKESTHPVKPLAQIAGNRYASTPVGKALSDACMGTIASFLSKYQDIIIEHQKVVKGNQKRLESLRELAGKENLEYPSVTLPPQPHTKEGVDAYNEVIARVRMWVNLNLWQKLKLSRDDAKPLLRLKGFPSFPLVERQANEVDWWDMVCNVKKLINEKKEDGKVFWQNLAGYKRQEALRPYLSSEEDRKKGKKFARYQLGDLLLHLEKKHGEDWGKVYDEAWERIDKKVEGLSKHIKLEEERRSEDAQSKAALTDWLRAKASFVIEGLKEADKDEFCRCELKLQKWYGDLRGKPFAIEAENSILDISGFSKQYNCAFIWQKDGVKKLNLYLIINYFKGGKLRFKKIKPEAFEANRFYTVINKKSGEIVPMEVNFNFDDPNLIILPLAFGKRFGREFIWNDLLSLETGSLKLANGRVIEKTLYNRRTRQDEPALFVALTFERREVLDSSNIKPMNLIGVDRGENIPAVIALTDPEGCPLSRFKDSLGNPTHILRIGESYKEKQRTIQAKKEVEQRRAGGYSRKYASKAKNLADDMVRNTARDLLYYAVTQDAMLIFENLSRGFGRQGKRTFMAERQYTRMEDWLTAKLAYEGLPSKTYLSKTLAQYTSKTCSNCGFTITSADYDRVLEKLKKTATGWMTTINGKELKVEGQITYYNRYKRQNVVKDLSVELDRLSEESVNNDISSWTKGRSGEALSLLKKRFSHRPVQEKFVCLNCGFETHADEQAALNIARSWLFLRSQEYKKYQTNKTTGNTDKRAFVETWQSFYRKKLKEVWKPAV

SEQ ID NO: 34949 - protein, 978 aa, synthetic construct
  REGION 1..978: note = engineered CasX variant
QEIKRINKIRRRLVKDSNTKKAGKTGPMKTLLVRVMTPDLRERLENLRKKPENIPQPISNTSRANLNKLLTDYTEMKKAILHVYWEEFQKDPVGLMSRVAQPASKKIDQNKLKPEMDEKGNLTTAGFACSQCGQPLFVYKLEQVSEKGKAYTNYFGRCNVAEHEKLILLYQLKPEKDSDEAVTYSLGKFGQRALDFYSIHVTKESTHPVKPLAQIAGNRYASAPVGKALSDACMGTIASFLSKYQDIIIEHQKVVKGNQKRLESLRELAGKENLEYPSVTLPPQPHTKEGVDAYNEVIARVRMWVNLNLWQKLKLSRDDAKPLLRLKGFPSFPLVERQANEVDWWDMVCNVKKLINEKKEDGKVFWQNLAGYKRQEALRPYLSSEEDRKKGKKFARYQLGDLLLHLEKKHGEDWGKVYDEAWERIDKKVEGLSKHIKLEEERRSEDAQSKAALTDWLRAKASFVIEGLKEADKDEFCRCELKLQKWYGDLRGKPFAIEAENSILDISGFSKQYNCAFIWQKDGVKKLNLYLIINYFKGGKLRFKKIKPEAFEANRFYTVINKKSGEIVPMEVNFNFDDPNLIILPLAFGKRFGREFIWNDLLSLETGSLKLANGRVIEKTLYNRRTRQDEPALFVALTFERREVLDSSNIKPMNLIGVDRGENIPAVIALTDPEGCPLSRFKDSLGNPTHILRIGESYKEKQRTIQAKKEVEQRRAGGYSRKYASKAKNLADDMVRNTARDLLYYAVTQDAMLIFENLSRGFGRQGKRTFMAERQYTRMEDWLTAKLAYEGLPSKTYLSKTLAQYTSKTCSNCGFTITSADYDRVLEKLKKTATGWMTTINGKELKVEGQITYYNRYKRQNVVKDLSVELDRLSEESVNNDISSWTKGRSGEALSLLKKRFSHRPVQEKFVCLNCGFETHADEQAALNIARSWLFLRSQEYKKYQTNKTTGNTDKRAFVETWQSFYRKKLKEVWKPAV

SEQ ID NO: 34950 - protein, 978 aa, synthetic construct
  REGION 1..978: note = engineered CasX variant
QEIKRINKIRRRLVKDSNTKKAGKTGPMKTLLVRVMTPDLRERLENLRKKPENIPQPISNTSRANLNKLLTDYTEMKKAILHVYWEEFQKDPVGLMSRVAQPASKKIDQNKLKPEMDEKGNLTTAGFACSQCGQPLFVYKLEQVSEKGKAYTNYFGRCNVAEHEKLILLYQLKPEKDSDEAVTYSLGKFGQRALDFYSIHVTKESTHPVKPLAQIAGNRYASVPVGKALSDACMGTIASFLSKYQDIIIEHQKVVKGNQKRLESLRELAGKENLEYPSVTLPPQPHTKEGVDAYNEVIARVRMWVNLNLWQKLKLSRDDAKPLLRLKGFPSFPLVERQANEVDWWDMVCNVKKLINEKKEDGKVFWQNLAGYKRQEALRPYLSSEEDRKKGKKFARYQLGDLLLHLEKKHGEDWGKVYDEAWERIDKKVEGLSKHIKLEEERRSEDAQSKAALTDWLRAKASFVIEGLKEADKDEFCRCELKLQKWYGDLRGKPFAIEAENSILDISGFSKQYNCAFIWQKDGVKKLNLYLIINYFKGGKLRFKKIKPEAFEANRFYTVINKKSGEIVPMEVNFNFDDPNLIILPLAFGKRFGREFIWNDLLSLETGSLKLANGRVIEKTLYNRRTRQDEPALFVALTFERREVLDSSNIKPMNLIGVDRGENIPAVIALTDPEGCPLSRFKDSLGNPTHILRIGESYKEKQRTIQAKKEVEQRRAGGYSRKYASKAKNLADDMVRNTARDLLYYAVTQDAMLIFENLSRGFGRQGKRTFMAERQYTRMEDWLTAKLAYEGLPSKTYLSKTLAQYTSKTCSNCGFTITSADYDRVLEKLKKTATGWMTTINGKELKVEGQITYYNRYKRQNVVKDLSVELDRLSEESVNNDISSWTKGRSGEALSLLKKRFSHRPVQEKFVCLNCGFETHADEQAALNIARSWLFLRSQEYKKYQTNKTTGNTDKRAFVETWQSFYRKKLKEVWKPAV

SEQ ID NO: 34951 - protein, 978 aa, synthetic construct
  REGION 1..978: note = engineered CasX variant
QEIKRINKIRRRLVKDSNTKKAGKTGPMKTLLVRVMTPDLRERLENLRKKPENIPQPISNTSRANLNKLLTDYTEMKKAILHVYWEEFQKDPVGLMSRVAQPASKKIDQNKLKPEMDEKGNLTTAGFACSQCGQPLFVYKLEQVSEKGKAYTNYFGRCNVAEHEKLIKLYQLKPEKDSDEAVTYSLGKFGQRALDFYSIHVTKESTHPVKPLAQIAGNRYASGPVGKALSDACMGTIASFLSKYQDIIIEHQKVVKGNQKRLESLRELAGKENLEYPSVTLPPQPHTKEGVDAYNEVIARVRMWVNLNLWQKLKLSRDDAKPLLRLKGFPSFPLVERQANEVDWWDMVCNVKKLINEKKEDGKVFWQNLAGYKRQEALRPYLSSEEDRKKGKKFARYQLGDLLLHLEKKHGEDWGKVYDEAWERIDKKVEGLSKHIKLEEERRSEDAQSKAALTDWLRAKASFVIEGLKEADKDEFCRCELKLQKWYGDLRGKPFAIEAENSILDISGFSKQYNCAFIWQKDGVKKLNLYLIINYFKGGKLRFKKIKPEAFEANRFYTVINKKSGEIVPMEVNFNFDDPNLIILPLAFGKRFGREFIWNDLLSLETGSLKLANGRVIEKTLYNRRTRQDEPALFVALTFERREVLDSSNIKPMNLIGVDRGENIPAVIALTDPEGCPLSRFKDSLGNPTHILRIGESYKEKQRTIQAKKEVEQRRAGGYSRKYASKAKNLADDMVRNTARDLLYYAVTQDAMLIFENLSRGFGRQGKRTFMAERQYTRMEDWLTAKLAYEGLPSKTYLSKTLAQYTSKTCSNCGFTITSADYDRVLEKLKKTATGWMTTINGKELKVEGQITYYNRYKRQNVVKDLSVELDRLSEESVNNDISSWTKGRSGEALSLLKKRFSHRPVQEKFVCLNCGFETHADEQAALNIARSWLFLRSQEYKKYQTNKTTGNTDKRAFVETWQSFYRKKLKEVWKPAV

SEQ ID NO: 34952 - protein, 977 aa, synthetic construct
  REGION 1..977: note = engineered CasX variant
QEIKRINKIRRRLVKDSNTKKAGKTGPMKTLLVRVMTPDLRERLENLRKKPENIPQPISNTSRANLNKLLTDYTEMKKAILHVYWEEFQKDPVGLMSRVAQPASKKIDQNKLKPEMDEKGNLTTAGFACSQCGQPLFVYKLEQVSEKGKAYTNYFGRCNVAEHEKLILLYQLKPEKDSDEAVTYSLGKFGQRALDFYSIHVTKESTHPVKPLAQIAGNRYASPVGKALSDACMGTIASFLSKYQDIIIEHQKVVKGNQKRLESLRELAGKENLEYPSVTLPPQPHTKEGVDAYNEVIARVRMWVNLNLWQKLKLSRDDAKPLLRLKGFPSFPLVERQANEVDWWDMVCNVKKLINEKKEDGKVFWQNLAGYKRQEALRPYLSSEEDRKKGKKFARYQLGDLLLHLEKKHGEDWGKVYDEAWERIDKKVEGLSKHIKLEEERRSEDAQSKAALTDWLRAKASFVIEGLKEADKDEFCRCELKLQKWYGDLRGKPFAIEAENSILDISGFSKQYNCAFIWQKDGVKKLNLYLIINYFKGGKLRFKKIKPEAFEANRFYTVINKKSGEIVPMEVNFNFDDPNLIILPLAFGKRFGREFIWNDLLSLETGSLKLANGRVIEKTLYNRRTRQDEPALFVALTFERREVLDSSNIKPMNLIGVDRGENIPAVIALTDPEGCPLSRFKDSLGNPTHILRIGESYKEKQRTIQAKKEVEQRRAGGYSRKYASKAKNLADDMVRNTARDLLYYAVTQDAMLIFENLSRGFGRQGKRTFMAERQYTRMEDWLTAKLAYEGLPSKTYLSKTLAQYTSKTCSNCGFTITSADYDRVLEKLKKTATGWMTTINGKELKVEGQITYYNRYKRQNVVKDLSVELDRLSEESVNNDISSWTKGRSGEALSLLKKRFSHRPVQEKFVCLNCGFETHADEQAALNIARSWLFLRSQEYKKYQTNKTTGNTDKRAFVETWQSFYRKKLKEVWKPAV

SEQ ID NO: 34953 - protein, 978 aa, synthetic construct
  REGION 1..978: note = engineered CasX variant
QEIKRINKIRRRLVKDSNTKKAGKTGPMKTLLVRVMTPDLRERLENLRKKPENIPQPISNTSRANLNKLLTDYTEMKKAILHVYWEEFQKDPVGLMSRVAQPASKKIDQNKLKPEMDEKGNLTTAGFACSQCGQPLFVYKLEQVSEKGKAYTNYFGRCNVAEHEKLILLYQLKPEKDSDEAVTYSLGKFGQRALDFYSIHVTKESTHPVKPLAQIAGNRYASYPVGKALSDACMGTIASFLSKYQDIIIEHQKVVKGNQKRLESLRELAGKENLEYPSVTLPPQPHTKEGVDAYNEVIARVRMWVNLNLWQKLKLSRDDAKPLLRLKGFPSFPLVERQANEVDWWDMVCNVKKLINEKKEDGKVFWQNLAGYKRQEALRPYLSSEEDRKKGKKFARYQLGDLLLHLEKKHGEDWGKVYDEAWERIDKKVEGLSKHIKLEEERRSEDAQSKAALTDWLRAKASFVIEGLKEADKDEFCRCELKLQKWYGDLRGKPFAIEAENSILDISGFSKQYNCAFIWQKDGVKKLNLYLIINYFKGGKLRFKKIKPEAFEANRFYTVINKKSGEIVPMEVNFNFDDPNLIILPLAFGKRVGREFIWNDLLSLETGSLKLANGRVIEKTLYNRRTRQDEPALFVALTFERREVLDSSNIKPMNLIGVDRGENIPAVIALTDPEGCPLSRFKDSLGNPTHILRIGESYKEKQRTIQAKKEVEQRRAGGYSRKYASKAKNLADDMVRNTARDLLYYAVTQDAMLIFENLSRGFGRQGKRTFMAERQYTRMEDWLTAKLAYEGLPSKTYLSKTLAQYTSKTCSNCGFTITSADYDRVLEKLKKTATGWMTTINGKELKVEGQITYYNRYKRQNVVKDLSVELDRLSEESVNNDISSWTKGRSGEALSLLKKRFSHRPVQEKFVCLNCGFETHADEQAALNIARSWLFLRSQEYKKYQTNKTTGNTDKRAFVETWQSFYRKKLKEVWKPAV

SEQ ID NO: 34954 - protein, 978 aa, synthetic construct
  REGION 1..978: note = engineered CasX variant
QEIKRINKIRRRLVKDSNTKKAGKTGPMKTLLVRVMTPDLRERLENLRKKPENIPQPISNTSRANLNKLLTDYTEMKKAILHVYWEEFQKDPVGLMSRVAQPASKKIDQNKLKPEMDEKGNLTTAGFACSQCGQPLFVYKLEQVSEKGKAYTNYFGRCNVAEHEKLILLYQLKPEKDSDEAVTYSLGKFGQRALDFYSIHVTKESTHPVKPLAQIAGNRYASHPVGKALSDACMGTIASFLSKYQDIIIEHQKVVKGNQKRLESLRELAGKENLEYPSVTLPPQPHTKEGVDAYNEVIARVRMWVNLNLWQKLKLSRDDAKPLLRLKGFPSFPLVERQANEVDWWDMVCNVKKLINEKKEDGKVFWQNLAGYKRQEALRPYLSSEEDRKKGKKFARYQLGDLLLHLEKKHGEDWGKVYDEAWERIDKKVEGLSKHIKLEEERRSEDAQSKAALTDWLRAKASFVIEGLKEADKDEFCRCELKLQKWYGDLRGKPFAIEAENSILDISGFSKQYNCAFIWQKDGVKKLNLYLIINYFKGGKLRFKKIKPEAFEANRFYTVINKKSGEIVPMEVNFNFDDPNLIILPLAFGKRVGREFIWNDLLSLETGSLKLANGRVIEKTLYNRRTRQDEPALFVALTFERREVLDSSNIKPMNLIGVDRGENIPAVIALTDPEGCPLSRFKDSLGNPTHILRIGESYKEKQRTIQAKKEVEQRRAGGYSRKYASKAKNLADDMVRNTARDLLYYAVTQDAMLIFENLSRGFGRQGKRTFMAERQYTRMEDWLTAKLAYEGLPSKTYLSKTLAQYTSKTCSNCGFTITSADYDRVLEKLKKTATGWMTTINGKELKVEGQITYYNRYKRQNVVKDLSVELDRLSEESVNNDISSWTKGRSGEALSLLKKRFSHRPVQEKFVCLNCGFETHADEQAALNIARSWLFLRSQEYKKYQTNKTTGNTDKRAFVETWQSFYRKKLKEVWKPAV

SEQ ID NO: 34955 - protein, 978 aa, synthetic construct
  REGION 1..978: note = engineered CasX variant
QEIKRINKIRRRLVKDSNTKKAGKTGPMKTLLVRVMTPDLRERLENLRKKPENIPQPISNTSRANLNKLLTDYTEMKKAILHVYWEEFQKDPVGLMSRVAQPASKKIDQNKLKPEMDEKGNLTTAGFACSQCGQPLFVYKLEQVSEKGKAYTNYFGRCNVAEHEKLILLYQLKPEKDSDEAVTYSLGKFGQRALDFYSIHVTKESTHPVKPLAQIAGNRYASSPVGKALSDACMGTIASFLSKYQDIIIEHQKVVKGNQKRLESLRELAGKENLEYPSVTLPPQPHTKEGVDAYNEVIARVRMWVNLNLWQKLKLSRDDAKPLLRLKGFPSFPLVERQANEVDWWDMVCNVKKLINEKKEDGKVFWQNLAGYKRQEALRPYLSSEEDRKKGKKFARYQLGDLLLHLEKKHGEDWGKVYDEAWERIDKKVEGLSKHIKLEEERRSEDAQSKAALTDWLRAKASFVIEGLKEADKDEFCRCELKLQKWYGDLRGKPFAIEAENSILDISGFSKQYNCAFIWQKDGVKKLNLYLIINYFKGGKLRFKKIKPEAFEANRFYTVINKKSGEIVPMEVNFNFDDPNLIILPLAFGKRVGREFIWNDLLSLETGSLKLANGRVIEKTLYNRRTRQDEPALFVALTFERREVLDSSNIKPMNLIGVDRGENIPAVIALTDPEGCPLSRFKDSLGNPTHILRIGESYKEKQRTIQAKKEVEQRRAGGYSRKYASKAKNLADDMVRNTARDLLYYAVTQDAMLIFENLSRGFGRQGKRTFMAERQYTRMEDWLTAKLAYEGLPSKTYLSKTLAQYTSKTCSNCGFTITSADYDRVLEKLKKTATGWMTTINGKELKVEGQITYYNRYKRQNVVKDLSVELDRLSEESVNNDISSWTKGRSGEALSLLKKRFSHRPVQEKFVCLNCGFETHADEQAALNIARSWLFLRSQEYKKYQTNKTTGNTDKRAFVETWQSFYRKKLKEVWKPAV

SEQ ID NO: 34956 - protein, 978 aa, synthetic construct
  REGION 1..978: note = engineered CasX variant
QEIKRINKIRRRLVKDSNTKKAGKTGPMKTLLVRVMTPDLRERLENLRKKPENIPQPISNTSRANLNKLLTDYTEMKKAILHVYWEEFQKDPVGLMSRVAQPASKKIDQNKLKPEMDEKGNLTTAGFACSQCGQPLFVYKLEQVSEKGKAYTNYFGRCNVAEHEKLILLYQLKPEKDSDEAVTYSLGKFGQRALDFYSIHVTKESTHPVKPLAQIAGNRYASTPVGKALSDACMGTIASFLSKYQDIIIEHQKVVKGNQKRLESLRELAGKENLEYPSVTLPPQPHTKEGVDAYNEVIARVRMWVNLNLWQKLKLSRDDAKPLLRLKGFPSFPLVERQANEVDWWDMVCNVKKLINEKKEDGKVFWQNLAGYKRQEALRPYLSSEEDRKKGKKFARYQLGDLLLHLEKKHGEDWGKVYDEAWERIDKKVEGLSKHIKLEEERRSEDAQSKAALTDWLRAKASFVIEGLKEADKDEFCRCELKLQKWYGDLRGKPFAIEAENSILDISGFSKQYNCAFIWQKDGVKKLNLYLIINYFKGGKLRFKKIKPEAFEANRFYTVINKKSGEIVPMEVNFNFDDPNLIILPLAFGKRVGREFIWNDLLSLETGSLKLANGRVIEKTLYNRRTRQDEPALFVALTFERREVLDSSNIKPMNLIGVDRGENIPAVIALTDPEGCPLSRFKDSLGNPTHILRIGESYKEKQRTIQAKKEVEQRRAGGYSRKYASKAKNLADDMVRNTARDLLYYAVTQDAMLIFENLSRGFGRQGKRTFMAERQYTRMEDWLTAKLAYEGLPSKTYLSKTLAQYTSKTCSNCGFTITSADYDRVLEKLKKTATGWMTTINGKELKVEGQITYYNRYKRQNVVKDLSVELDRLSEESVNNDISSWTKGRSGEALSLLKKRFSHRPVQEKFVCLNCGFETHADEQAALNIARSWLFLRSQEYKKYQTNKTTGNTDKRAFVETWQSFYRKKLKEVWKPAV

SEQ ID NO: 34957 - protein, 978 aa, synthetic construct
  REGION 1..978: note = engineered CasX variant
QEIKRINKIRRRLVKDSNTKKAGKTGPMKTLLVRVMTPDLRERLENLRKKPENIPQPISNTSRANLNKLLTDYTEMKKAILHVYWEEFQKDPVGLMSRVAQPASKKIDQNKLKPEMDEKGNLTTAGFACSQCGQPLFVYKLEQVSEKGKAYTNYFGRCNVAEHEKLILLYQLKPEKDSDEAVTYSLGKFGQRALDFYSIHVTKESTHPVKPLAQIAGNRYASAPVGKALSDACMGTIASFLSKYQDIIIEHQKVVKGNQKRLESLRELAGKENLEYPSVTLPPQPHTKEGVDAYNEVIARVRMWVNLNLWQKLKLSRDDAKPLLRLKGFPSFPLVERQANEVDWWDMVCNVKKLINEKKEDGKVFWQNLAGYKRQEALRPYLSSEEDRKKGKKFARYQLGDLLLHLEKKHGEDWGKVYDEAWERIDKKVEGLSKHIKLEEERRSEDAQSKAALTDWLRAKASFVIEGLKEADKDEFCRCELKLQKWYGDLRGKPFAIEAENSILDISGFSKQYNCAFIWQKDGVKKLNLYLIINYFKGGKLRFKKIKPEAFEANRFYTVINKKSGEIVPMEVNFNFDDPNLIILPLAFGKRVGREFIWNDLLSLETGSLKLANGRVIEKTLYNRRTRQDEPALFVALTFERREVLDSSNIKPMNLIGVDRGENIPAVIALTDPEGCPLSRFKDSLGNPTHILRIGESYKEKQRTIQAKKEVEQRRAGGYSRKYASKAKNLADDMVRNTARDLLYYAVTQDAMLIFENLSRGFGRQGKRTFMAERQYTRMEDWLTAKLAYEGLPSKTYLSKTLAQYTSKTCSNCGFTITSADYDRVLEKLKKTATGWMTTINGKELKVEGQITYYNRYKRQNVVKDLSVELDRLSEESVNNDISSWTKGRSGEALSLLKKRFSHRPVQEKFVCLNCGFETHADEQAALNIARSWLFLRSQEYKKYQTNKTTGNTDKRAFVETWQSFYRKKLKEVWKPAV

SEQ ID NO: 34958 - protein, 978 aa, synthetic construct
  REGION 1..978: note = engineered CasX variant
QEIKRINKIRRRLVKDSNTKKAGKTGPMKTLLVRVMTPDLRERLENLRKKPENIPQPISNTSRANLNKLLTDYTEMKKAILHVYWEEFQKDPVGLMSRVAQPASKKIDQNKLKPEMDEKGNLTTAGFACSQCGQPLFVYKLEQVSEKGKAYTNYFGRCNVAEHEKLILLYQLKPEKDSDEAVTYSLGKFGQRALDFYSIHVTKESTHPVKPLAQIAGNRYASVPVGKALSDACMGTIASFLSKYQDIIIEHQKVVKGNQKRLESLRELAGKENLEYPSVTLPPQPHTKEGVDAYNEVIARVRMWVNLNLWQKLKLSRDDAKPLLRLKGFPSFPLVERQANEVDWWDMVCNVKKLINEKKEDGKVFWQNLAGYKRQEALRPYLSSEEDRKKGKKFARYQLGDLLLHLEKKHGEDWGKVYDEAWERIDKKVEGLSKHIKLEEERRSEDAQSKAALTDWLRAKASFVIEGLKEADKDEFCRCELKLQKWYGDLRGKPFAIEAENSILDISGFSKQYNCAFIWQKDGVKKLNLYLIINYFKGGKLRFKKIKPEAFEANRFYTVINKKSGEIVPMEVNFNFDDPNLIILPLAFGKRVGREFIWNDLLSLETGSLKLANGRVIEKTLYNRRTRQDEPALFVALTFERREVLDSSNIKPMNLIGVDRGENIPAVIALTDPEGCPLSRFKDSLGNPTHILRIGESYKEKQRTIQAKKEVEQRRAGGYSRKYASKAKNLADDMVRNTARDLLYYAVTQDAMLIFENLSRGFGRQGKRTFMAERQYTRMEDWLTAKLAYEGLPSKTYLSKTLAQYTSKTCSNCGFTITSADYDRVLEKLKKTATGWMTTINGKELKVEGQITYYNRYKRQNVVKDLSVELDRLSEESVNNDISSWTKGRSGEALSLLKKRFSHRPVQEKFVCLNCGFETHADEQAALNIARSWLFLRSQEYKKYQTNKTTGNTDKRAFVETWQSFYRKKLKEVWKPAV

SEQ ID NO: 34959 - protein, 978 aa, synthetic construct
  REGION 1..978: note = engineered CasX variant
QEIKRINKIRRRLVKDSNTKKAGKTGPMKTLLVRVMTPDLRERLENLRKKPENIPQPISNTSRANLNKLLTDYTEMKKAILHVYWEEFQKDPVGLMSRVAQPASKKIDQNKLKPEMDEKGNLTTAGFACSQCGQPLFVYKLEQVSEKGKAYTNYFGRCNVAEHEKLIKLYQLKPEKDSDEAVTYSLGKFGQRALDFYSIHVTKESTHPVKPLAQIAGNRYASGPVGKALSDACMGTIASFLSKYQDIIIEHQKVVKGNQKRLESLRELAGKENLEYPSVTLPPQPHTKEGVDAYNEVIARVRMWVNLNLWQKLKLSRDDAKPLLRLKGFPSFPLVERQANEVDWWDMVCNVKKLINEKKEDGKVFWQNLAGYKRQEALRPYLSSEEDRKKGKKFARYQLGDLLLHLEKKHGEDWGKVYDEAWERIDKKVEGLSKHIKLEEERRSEDAQSKAALTDWLRAKASFVIEGLKEADKDEFCRCELKLQKWYGDLRGKPFAIEAENSILDISGFSKQYNCAFIWQKDGVKKLNLYLIINYFKGGKLRFKKIKPEAFEANRFYTVINKKSGEIVPMEVNFNFDDPNLIILPLAFGKRVGREFIWNDLLSLETGSLKLANGRVIEKTLYNRRTRQDEPALFVALTFERREVLDSSNIKPMNLIGVDRGENIPAVIALTDPEGCPLSRFKDSLGNPTHILRIGESYKEKQRTIQAKKEVEQRRAGGYSRKYASKAKNLADDMVRNTARDLLYYAVTQDAMLIFENLSRGFGRQGKRTFMAERQYTRMEDWLTAKLAYEGLPSKTYLSKTLAQYTSKTCSNCGFTITSADYDRVLEKLKKTATGWMTTINGKELKVEGQITYYNRYKRQNVVKDLSVELDRLSEESVNNDISSWTKGRSGEALSLLKKRFSHRPVQEKFVCLNCGFETHADEQAALNIARSWLFLRSQEYKKYQTNKTTGNTDKRAFVETWQSFYRKKLKEVWKPAV

SEQ ID NO: 34960 - protein, 977 aa, synthetic construct
  REGION 1..977: note = engineered CasX variant
QEIKRINKIRRRLVKDSNTKKAGKTGPMKTLLVRVMTPDLRERLENLRKKPENIPQPISNTSRANLNKLLTDYTEMKKAILHVYWEEFQKDPVGLMSRVAQPASKKIDQNKLKPEMDEKGNLTTAGFACSQCGQPLFVYKLEQVSEKGKAYTNYFGRCNVAEHEKLILLYQLKPEKDSDEAVTYSLGKFGQRALDFYSIHVTKESTHPVKPLAQIAGNRYASPVGKALSDACMGTIASFLSKYQDIIIEHQKVVKGNQKRLESLRELAGKENLEYPSVTLPPQPHTKEGVDAYNEVIARVRMWVNLNLWQKLKLSRDDAKPLLRLKGFPSFPLVERQANEVDWWDMVCNVKKLINEKKEDGKVFWQNLAGYKRQEALRPYLSSEEDRKKGKKFARYQLGDLLLHLEKKHGEDWGKVYDEAWERIDKKVEGLSKHIKLEEERRSEDAQSKAALTDWLRAKASFVIEGLKEADKDEFCRCELKLQKWYGDLRGKPFAIEAENSILDISGFSKQYNCAFIWQKDGVKKLNLYLIINYFKGGKLRFKKIKPEAFEANRFYTVINKKSGEIVPMEVNFNFDDPNLIILPLAFGKRVGREFIWNDLLSLETGSLKLANGRVIEKTLYNRRTRQDEPALFVALTFERREVLDSSNIKPMNLIGVDRGENIPAVIALTDPEGCPLSRFKDSLGNPTHILRIGESYKEKQRTIQAKKEVEQRRAGGYSRKYASKAKNLADDMVRNTARDLLYYAVTQDAMLIFENLSRGFGRQGKRTFMAERQYTRMEDWLTAKLAYEGLPSKTYLSKTLAQYTSKTCSNCGFTITSADYDRVLEKLKKTATGWMTTINGKELKVEGQITYYNRYKRQNVVKDLSVELDRLSEESVNNDISSWTKGRSGEALSLLKKRFSHRPVQEKFVCLNCGFETHADEQAALNIARSWLFLRSQEYKKYQTNKTTGNTDKRAFVETWQSFYRKKLKEVWKPAV

SEQ ID NO: 34961 - protein, 979 aa, synthetic construct
  REGION 1..979: note = engineered CasX variant
QEIKRINKIRRRLVKDSNTKKAGKTGPMKTLLVRVMTPDLRERLENLRKKPENIPQPISNTSRANLNKLLTDYTEMKKAILHVYWEEFQKDPVGLMSRVAQPASKKIDQNKLKPEMDEKGNLTTAGFACSQCGQPLFVYKLEQVSEKGKAYTNYFGRCNVAEHEKLILLYQLKPEKDSDEAVTYSLGKFGQRALDFYSIHVTKESTHPVKPLAQIAGNRYASYPVGKALSDACMGTIASFLSKYQDIIIEHQKVVKGNQKRLESLRELAGKENLEYPSVTLPPQPHTKEGVDAYNEVIARVRMWVNLNLWQKLKLSRDDAKPLLRLKGFPSFPLVERQANEVDWWDMVCNVKKLINEKKEDGKVFWQNLAGYKRQEALRPYLSSEEDRKKGKKFARYQLGDLLLHLEKKHGEDWGKVYDEAWERIDKKVEGLSKHIKLEEERRSEDAQSKAALTDWLRAKASFVIEGLKEADKDEFCRCELKLQKWYGDLRGKPFAIEAENSILDISGFSKQYNCAFIWQKDGVKKLNLYLIINYFKGGKLRFKKIKPEAFEANRFYTVINKKSGEIVPMEVNFNFDDPNLIILPLAFGKRQGREFIWNDLLSLETGSLKLANGRVIEKTLYNRRTRQDEPALFVALTFERREVLDSSNIKTPMNLIGVDRGENIPAVIALTDPEGCPLSRFKDSLGNPTHILRIGESYKEKQRTIQAKKEVEQRRAGGYSRKYASKAKNLADDMVRNTARDLLYYAVTQDAMLIFENLSRGFGRQGKRTFMAERQYTRMEDWLTAKLAYEGLPSKTYLSKTLAQYTSKTCSNCGFTITSADYDRVLEKLKKTATGWMTTINGKELKVEGQITYYNRYKRQNVVKDLSVELDRLSEESVNNDISSWTKGRSGEALSLLKKRFSHRPVQEKFVCLNCGFETHADEQAALNIARSWLFLRSQEYKKYQTNKTTGNTDKRAFVETWQSFYRKKLKEVWKPAV

SEQ ID NO: 34962 - protein, 979 aa, synthetic construct
  REGION 1..979: note = engineered CasX variant
QEIKRINKIRRRLVKDSNTKKAGKTGPMKTLLVRVMTPDLRERLENLRKKPENIPQPISNTSRANLNKLLTDYTEMKKAILHVYWEEFQKDPVGLMSRVAQPASKKIDQNKLKPEMDEKGNLTTAGFACSQCGQPLFVYKLEQVSEKGKAYTNYFGRCNVAEHEKLILLYQLKPEKDSDEAVTYSLGKFGQRALDFYSIHVTKESTHPVKPLAQIAGNRYASHPVGKALSDACMGTIASFLSKYQDIIIEHQKVVKGNQKRLESLRELAGKENLEYPSVTLPPQPHTKEGVDAYNEVIARVRMWVNLNLWQKLKLSRDDAKPLLRLKGFPSFPLVERQANEVDWWDMVCNVKKLINEKKEDGKVFWQNLAGYKRQEALRPYLSSEEDRKKGKKFARYQLGDLLLHLEKKHGEDWGKVYDEAWERIDKKVEGLSKHIKLEEERRSEDAQSKAALTDWLRAKASFVIEGLKEADKDEFCRCELKLQKWYGDLRGKPFAIEAENSILDISGFSKQYNCAFIWQKDGVKKLNLYLIINYFKGGKLRFKKIKPEAFEANRFYTVINKKSGEIVPMEVNFNFDDPNLIILPLAFGKRQGREFIWNDLLSLETGSLKLANGRVIEKTLYNRRTRQDEPALFVALTFERREVLDSSNIKTPMNLIGVDRGENIPAVIALTDPEGCPLSRFKDSLGNPTHILRIGESYKEKQRTIQAKKEVEQRRAGGYSRKYASKAKNLADDMVRNTARDLLYYAVTQDAMLIFENLSRGFGRQGKRTFMAERQYTRMEDWLTAKLAYEGLPSKTYLSKTLAQYTSKTCSNCGFTITSADYDRVLEKLKKTATGWMTTINGKELKVEGQITYYNRYKRQNVVKDLSVELDRLSEESVNNDISSWTKGRSGEALSLLKKRFSHRPVQEKFVCLNCGFETHADEQAALNIARSWLFLRSQEYKKYQTNKTTGNTDKRAFVETWQSFYRKKLKEVWKPAV

SEQ ID NO: 34963 - protein, 979 aa, synthetic construct
  REGION 1..979: note = engineered CasX variant
QEIKRINKIRRRLVKDSNTKKAGKTGPMKTLLVRVMTPDLRERLENLRKKPENIPQPISNTSRANLNKLLTDYTEMKKAILHVYWEEFQKDPVGLMSRVAQPASKKIDQNKLKPEMDEKGNLTTAGFACSQCGQPLFVYKLEQVSEKGKAYTNYFGRCNVAEHEKLILLYQLKPEKDSDEAVTYSLGKFGQRALDFYSIHVTKESTHPVKPLAQIAGNRYASSPVGKALSDACMGTIASFLSKYQDIIIEHQKVVKGNQKRLESLRELAGKENLEYPSVTLPPQPHTKEGVDAYNEVIARVRMWVNLNLWQKLKLSRDDAKPLLRLKGFPSFPLVERQANEVDWWDMVCNVKKLINEKKEDGKVFWQNLAGYKRQEALRPYLSSEEDRKKGKKFARYQLGDLLLHLEKKHGEDWGKVYDEAWERIDKKVEGLSKHIKLEEERRSEDAQSKAALTDWLRAKASFVIEGLKEADKDEFCRCELKLQKWYGDLRGKPFAIEAENSILDISGFSKQYNCAFIWQKDGVKKLNLYLIINYFKGGKLRFKKIKPEAFEANRFYTVINKKSGEIVPMEVNFNFDDPNLIILPLAFGKRQGREFIWNDLLSLETGSLKLANGRVIEKTLYNRRTRQDEPALFVALTFERREVLDSSNIKTPMNLIGVDRGENIPAVIALTDPEGCPLSRFKDSLGNPTHILRIGESYKEKQRTIQAKKEVEQRRAGGYSRKYASKAKNLADDMVRNTARDLLYYAVTQDAMLIFENLSRGFGRQGKRTFMAERQYTRMEDWLTAKLAYEGLPSKTYLSKTLAQYTSKTCSNCGFTITSADYDRVLEKLKKTATGWMTTINGKELKVEGQITYYNRYKRQNVVKDLSVELDRLSEESVNNDISSWTKGRSGEALSLLKKRFSHRPVQEKFVCLNCGFETHADEQAALNIARSWLFLRSQEYKKYQTNKTTGNTDKRAFVETWQSFYRKKLKEVWKPAV

SEQ ID NO: 34964 - protein, 979 aa, synthetic construct
  REGION 1..979: note = engineered CasX variant
QEIKRINKIRRRLVKDSNTKKAGKTGPMKTLLVRVMTPDLRERLENLRKKPENIPQPISNTSRANLNKLLTDYTEMKKAILHVYWEEFQKDPVGLMSRVAQPASKKIDQNKLKPEMDEKGNLTTAGFACSQCGQPLFVYKLEQVSEKGKAYTNYFGRCNVAEHEKLILLYQLKPEKDSDEAVTYSLGKFGQRALDFYSIHVTKESTHPVKPLAQIAGNRYASTPVGKALSDACMGTIASFLSKYQDIIIEHQKVVKGNQKRLESLRELAGKENLEYPSVTLPPQPHTKEGVDAYNEVIARVRMWVNLNLWQKLKLSRDDAKPLLRLKGFPSFPLVERQANEVDWWDMVCNVKKLINEKKEDGKVFWQNLAGYKRQEALRPYLSSEEDRKKGKKFARYQLGDLLLHLEKKHGEDWGKVYDEAWERIDKKVEGLSKHIKLEEERRSEDAQSKAALTDWLRAKASFVIEGLKEADKDEFCRCELKLQKWYGDLRGKPFAIEAENSILDISGFSKQYNCAFIWQKDGVKKLNLYLIINYFKGGKLRFKKIKPEAFEANRFYTVINKKSGEIVPMEVNFNFDDPNLIILPLAFGKRQGREFIWNDLLSLETGSLKLANGRVIEKTLYNRRTRQDEPALFVALTFERREVLDSSNIKTPMNLIGVDRGENIPAVIALTDPEGCPLSRFKDSLGNPTHILRIGESYKEKQRTIQAKKEVEQRRAGGYSRKYASKAKNLADDMVRNTARDLLYYAVTQDAMLIFENLSRGFGRQGKRTFMAERQYTRMEDWLTAKLAYEGLPSKTYLSKTLAQYTSKTCSNCGFTITSADYDRVLEKLKKTATGWMTTINGKELKVEGQITYYNRYKRQNVVKDLSVELDRLSEESVNNDISSWTKGRSGEALSLLKKRFSHRPVQEKFVCLNCGFETHADEQAALNIARSWLFLRSQEYKKYQTNKTTGNTDKRAFVETWQSFYRKKLKEVWKPAV

SEQ ID NO: 34965 - protein, 979 aa, synthetic construct
  REGION 1..979: note = engineered CasX variant
QEIKRINKIRRRLVKDSNTKKAGKTGPMKTLLVRVMTPDLRERLENLRKKPENIPQPISNTSRANLNKLLTDYTEMKKAILHVYWEEFQKDPVGLMSRVAQPASKKIDQNKLKPEMDEKGNLTTAGFACSQCGQPLFVYKLEQVSEKGKAYTNYFGRCNVAEHEKLILLYQLKPEKDSDEAVTYSLGKFGQRALDFYSIHVTKESTHPVKPLAQIAGNRYASAPVGKALSDACMGTIASFLSKYQDIIIEHQKVVKGNQKRLESLRELAGKENLEYPSVTLPPQPHTKEGVDAYNEVIARVRMWVNLNLWQKLKLSRDDAKPLLRLKGFPSFPLVERQANEVDWWDMVCNVKKLINEKKEDGKVFWQNLAGYKRQEALRPYLSSEEDRKKGKKFARYQLGDLLLHLEKKHGEDWGKVYDEAWERIDKKVEGLSKHIKLEEERRSEDAQSKAALTDWLRAKASFVIEGLKEADKDEFCRCELKLQKWYGDLRGKPFAIEAENSILDISGFSKQYNCAFIWQKDGVKKLNLYLIINYFKGGKLRFKKIKPEAFEANRFYTVINKKSGEIVPMEVNFNFDDPNLIILPLAFGKRQGREFIWNDLLSLETGSLKLANGRVIEKTLYNRRTRQDEPALFVALTFERREVLDSSNIKTPMNLIGVDRGENIPAVIALTDPEGCPLSRFKDSLGNPTHILRIGESYKEKQRTIQAKKEVEQRRAGGYSRKYASKAKNLADDMVRNTARDLLYYAVTQDAMLIFENLSRGFGRQGKRTFMAERQYTRMEDWLTAKLAYEGLPSKTYLSKTLAQYTSKTCSNCGFTITSADYDRVLEKLKKTATGWMTTINGKELKVEGQITYYNRYKRQNVVKDLSVELDRLSEESVNNDISSWTKGRSGEALSLLKKRFSHRPVQEKFVCLNCGFETHADEQAALNIARSWLFLRSQEYKKYQTNKTTGNTDKRAFVETWQSFYRKKLKEVWKPAV

SEQ ID NO: 34966 - protein, 979 aa, synthetic construct
  REGION 1..979: note = engineered CasX variant
QEIKRINKIRRRLVKDSNTKKAGKTGPMKTLLVRVMTPDLRERLENLRKKPENIPQPISNTSRANLNKLLTDYTEMKKAILHVYWEEFQKDPVGLMSRVAQPASKKIDQNKLKPEMDEKGNLTTAGFACSQCGQPLFVYKLEQVSEKGKAYTNYFGRCNVAEHEKLILLYQLKPEKDSDEAVTYSLGKFGQRALDFYSIHVTKESTHPVKPLAQIAGNRYASVPVGKALSDACMGTIASFLSKYQDIIIEHQKVVKGNQKRLESLRELAGKENLEYPSVTLPPQPHTKEGVDAYNEVIARVRMWVNLNLWQKLKLSRDDAKPLLRLKGFPSFPLVERQANEVDWWDMVCNVKKLINEKKEDGKVFWQNLAGYKRQEALRPYLSSEEDRKKGKKFARYQLGDLLLHLEKKHGEDWGKVYDEAWERIDKKVEGLSKHIKLEEERRSEDAQSKAALTDWLRAKASFVIEGLKEADKDEFCRCELKLQKWYGDLRGKPFAIEAENSILDISGFSKQYNCAFIWQKDGVKKLNLYLIINYFKGGKLRFKKIKPEAFEANRFYTVINKKSGEIVPMEVNFNFDDPNLIILPLAFGKRQGREFIWNDLLSLETGSLKLANGRVIEKTLYNRRTRQDEPALFVALTFERREVLDSSNIKTPMNLIGVDRGENIPAVIALTDPEGCPLSRFKDSLGNPTHILRIGESYKEKQRTIQAKKEVEQRRAGGYSRKYASKAKNLADDMVRNTARDLLYYAVTQDAMLIFENLSRGFGRQGKRTFMAERQYTRMEDWLTAKLAYEGLPSKTYLSKTLAQYTSKTCSNCGFTITSADYDRVLEKLKKTATGWMTTINGKELKVEGQITYYNRYKRQNVVKDLSVELDRLSEESVNNDISSWTKGRSGEALSLLKKRFSHRPVQEKFVCLNCGFETHADEQAALNIARSWLFLRSQEYKKYQTNKTTGNTDKRAFVETWQSFYRKKLKEVWKPAV

SEQ ID NO: 34967 - protein, 979 aa, synthetic construct
  REGION 1..979: note = engineered CasX variant
QEIKRINKIRRRLVKDSNTKKAGKTGPMKTLLVRVMTPDLRERLENLRKKPENIPQPISNTSRANLNKLLTDYTEMKKAILHVYWEEFQKDPVGLMSRVAQPASKKIDQNKLKPEMDEKGNLTTAGFACSQCGQPLFVYKLEQVSEKGKAYTNYFGRCNVAEHEKLIKLYQLKPEKDSDEAVTYSLGKFGQRALDFYSIHVTKESTHPVKPLAQIAGNRYASGPVGKALSDACMGTIASFLSKYQDIIIEHQKVVKGNQKRLESLRELAGKENLEYPSVTLPPQPHTKEGVDAYNEVIARVRMWVNLNLWQKLKLSRDDAKPLLRLKGFPSFPLVERQANEVDWWDMVCNVKKLINEKKEDGKVFWQNLAGYKRQEALRPYLSSEEDRKKGKKFARYQLGDLLLHLEKKHGEDWGKVYDEAWERIDKKVEGLSKHIKLEEERRSEDAQSKAALTDWLRAKASFVIEGLKEADKDEFCRCELKLQKWYGDLRGKPFAIEAENSILDISGFSKQYNCAFIWQKDGVKKLNLYLIINYFKGGKLRFKKIKPEAFEANRFYTVINKKSGEIVPMEVNFNFDDPNLIILPLAFGKRQGREFIWNDLLSLETGSLKLANGRVIEKTLYNRRTRQDEPALFVALTFERREVLDSSNIKTPMNLIGVDRGENIPAVIALTDPEGCPLSRFKDSLGNPTHILRIGESYKEKQRTIQAKKEVEQRRAGGYSRKYASKAKNLADDMVRNTARDLLYYAVTQDAMLIFENLSRGFGRQGKRTFMAERQYTRMEDWLTAKLAYEGLPSKTYLSKTLAQYTSKTCSNCGFTITSADYDRVLEKLKKTATGWMTTINGKELKVEGQITYYNRYKRQNVVKDLSVELDRLSEESVNNDISSWTKGRSGEALSLLKKRFSHRPVQEKFVCLNCGFETHADEQAALNIARSWLFLRSQEYKKYQTNKTTGNTDKRAFVETWQSFYRKKLKEVWKPAV

SEQ ID NO: 34968 - protein, 978 aa, synthetic construct
  REGION 1..978: note = engineered CasX variant
QEIKRINKIRRRLVKDSNTKKAGKTGPMKTLLVRVMTPDLRERLENLRKKPENIPQPISNTSRANLNKLLTDYTEMKKAILHVYWEEFQKDPVGLMSRVAQPASKKIDQNKLKPEMDEKGNLTTAGFACSQCGQPLFVYKLEQVSEKGKAYTNYFGRCNVAEHEKLILLYQLKPEKDSDEAVTYSLGKFGQRALDFYSIHVTKESTHPVKPLAQIAGNRYASPVGKALSDACMGTIASFLSKYQDIIIEHQKVVKGNQKRLESLRELAGKENLEYPSVTLPPQPHTKEGVDAYNEVIARVRMWVNLNLWQKLKLSRDDAKPLLRLKGFPSFPLVERQANEVDWWDMVCNVKKLINEKKEDGKVFWQNLAGYKRQEALRPYLSSEEDRKKGKKFARYQLGDLLLHLEKKHGEDWGKVYDEAWERIDKKVEGLSKHIKLEEERRSEDAQSKAALTDWLRAKASFVIEGLKEADKDEFCRCELKLQKWYGDLRGKPFAIEAENSILDISGFSKQYNCAFIWQKDGVKKLNLYLIINYFKGGKLRFKKIKPEAFEANRFYTVINKKSGEIVPMEVNFNFDDPNLIILPLAFGKRQGREFIWNDLLSLETGSLKLANGRVIEKTLYNRRTRQDEPALFVALTFERREVLDSSNIKTPMNLIGVDRGENIPAVIALTDPEGCPLSRFKDSLGNPTHILRIGESYKEKQRTIQAKKEVEQRRAGGYSRKYASKAKNLADDMVRNTARDLLYYAVTQDAMLIFENLSRGFGRQGKRTFMAERQYTRMEDWLTAKLAYEGLPSKTYLSKTLAQYTSKTCSNCGFTITSADYDRVLEKLKKTATGWMTTINGKELKVEGQITYYNRYKRQNVVKDLSVELDRLSEESVNNDISSWTKGRSGEALSLLKKRFSHRPVQEKFVCLNCGFETHADEQAALNIARSWLFLRSQEYKKYQTNKTTGNTDKRAFVETWQSFYRKKLKEVWKPAV

SEQ ID NO: 34969 - protein, 979 aa, synthetic construct
  REGION 1..979: note = engineered CasX variant
QEIKRINKIRRRLVKDSNTKKAGKTGPMKTLLVRVMTPDLRERLENLRKKPENIPQPISNTSRANLNKLLTDYTEMKKAILHVYWEEFQKDPVGLMSRVAQPASKKIDQNKLKPEMDEKGNLTTAGFACSQCGQPLFVYKLEQVSEKGKAYTNYFGRCNVAEHEKLILLYQLKPEKDSDEAVTYSLGKFGQRALDFYSIHVTKESTHPVKPLAQIAGNRYASYPVGKALSDACMGTIASFLSKYQDIIIEHQKVVKGNQKRLESLRELAGKENLEYPSVTLPPQPHTKEGVDAYNEVIARVRMWVNLNLWQKLKLSRDDAKPLLRLKGFPSFPLVERQANEVDWWDMVCNVKKLINEKKEDGKVFWQNLAGYKRQEALRPYLSSEEDRKKGKKFARYQLGDLLLHLEKKHGEDWGKVYDEAWERIDKKVEGLSKHIKLEEERRSEDAQSKAALTDWLRAKASFVIEGLKEADKDEFCRCELKLQKWYGDLRGKPFAIEAENSILDISGFSKQYNCAFIWQKDGVKKLNLYLIINYFKGGKLRFKKIKPEAFEANRFYTVINKKSGEIVPMEVNFNFDDPNLIILPLAFGKRQGREFIWNDLLSLETGSLKLANGRVIEKTLYNRRTRQDEPALFVALTFERREVLDSSNIKPMSNLIGVDRGENIPAVIALTDPEGCPLSRFKDSLGNPTHILRIGESYKEKQRTIQAKKEVEQRRAGGYSRKYASKAKNLADDMVRNTARDLLYYAVTQDAMLIFENLSRGFGRQGKRTFMAERQYTRMEDWLTAKLAYEGLPSKTYLSKTLAQYTSKTCSNCGFTITSADYDRVLEKLKKTATGWMTTINGKELKVEGQITYYNRYKRQNVVKDLSVELDRLSEESVNNDISSWTKGRSGEALSLLKKRFSHRPVQEKFVCLNCGFETHADEQAALNIARSWLFLRSQEYKKYQTNKTTGNTDKRAFVETWQSFYRKKLKEVWKPAV

SEQ ID NO: 34970 - protein, 979 aa, synthetic construct
  REGION 1..979: note = engineered CasX variant
QEIKRINKIRRRLVKDSNTKKAGKTGPMKTLLVRVMTPDLRERLENLRKKPENIPQPISNTSRANLNKLLTDYTEMKKAILHVYWEEFQKDPVGLMSRVAQPASKKIDQNKLKPEMDEKGNLTTAGFACSQCGQPLFVYKLEQVSEKGKAYTNYFGRCNVAEHEKLILLYQLKPEKDSDEAVTYSLGKFGQRALDFYSIHVTKESTHPVKPLAQIAGNRYASHPVGKALSDACMGTIASFLSKYQDIIIEHQKVVKGNQKRLESLRELAGKENLEYPSVTLPPQPHTKEGVDAYNEVIARVRMWVNLNLWQKLKLSRDDAKPLLRLKGFPSFPLVERQANEVDWWDMVCNVKKLINEKKEDGKVFWQNLAGYKRQEALRPYLSSEEDRKKGKKFARYQLGDLLLHLEKKHGEDWGKVYDEAWERIDKKVEGLSKHIKLEEERRSEDAQSKAALTDWLRAKASFVIEGLKEADKDEFCRCELKLQKWYGDLRGKPFAIEAENSILDISGFSKQYNCAFIWQKDGVKKLNLYLIINYFKGGKLRFKKIKPEAFEANRFYTVINKKSGEIVPMEVNFNFDDPNLIILPLAFGKRQGREFIWNDLLSLETGSLKLANGRVIEKTLYNRRTRQDEPALFVALTFERREVLDSSNIKPMSNLIGVDRGENIPAVIALTDPEGCPLSRFKDSLGNPTHILRIGESYKEKQRTIQAKKEVEQRRAGGYSRKYASKAKNLADDMVRNTARDLLYYAVTQDAMLIFENLSRGFGRQGKRTFMAERQYTRMEDWLTAKLAYEGLPSKTYLSKTLAQYTSKTCSNCGFTITSADYDRVLEKLKKTATGWMTTINGKELKVEGQITYYNRYKRQNVVKDLSVELDRLSEESVNNDISSWTKGRSGEALSLLKKRFSHRPVQEKFVCLNCGFETHADEQAALNIARSWLFLRSQEYKKYQTNKTTGNTDKRAFVETWQSFYRKKLKEVWKPAV

SEQ ID NO: 34971 - protein, 979 aa, synthetic construct
  REGION 1..979: note = engineered CasX variant
QEIKRINKIRRRLVKDSNTKKAGKTGPMKTLLVRVMTPDLRERLENLRKKPENIPQPISNTSRANLNKLLTDYTEMKKAILHVYWEEFQKDPVGLMSRVAQPASKKIDQNKLKPEMDEKGNLTTAGFACSQCGQPLFVYKLEQVSEKGKAYTNYFGRCNVAEHEKLILLYQLKPEKDSDEAVTYSLGKFGQRALDFYSIHVTKESTHPVKPLAQIAGNRYASSPVGKALSDACMGTIASFLSKYQDIIIEHQKVVKGNQKRLESLRELAGKENLEYPSVTLPPQPHTKEGVDAYNEVIARVRMWVNLNLWQKLKLSRDDAKPLLRLKGFPSFPLVERQANEVDWWDMVCNVKKLINEKKEDGKVFWQNLAGYKRQEALRPYLSSEEDRKKGKKFARYQLGDLLLHLEKKHGEDWGKVYDEAWERIDKKVEGLSKHIKLEEERRSEDAQSKAALTDWLRAKASFVIEGLKEADKDEFCRCELKLQKWYGDLRGKPFAIEAENSILDISGFSKQYNCAFIWQKDGVKKLNLYLIINYFKGGKLRFKKIKPEAFEANRFYTVINKKSGEIVPMEVNFNFDDPNLIILPLAFGKRQGREFIWNDLLSLETGSLKLANGRVIEKTLYNRRTRQDEPALFVALTFERREVLDSSNIKPMSNLIGVDRGENIPAVIALTDPEGCPLSRFKDSLGNPTHILRIGESYKEKQRTIQAKKEVEQRRAGGYSRKYASKAKNLADDMVRNTARDLLYYAVTQDAMLIFENLSRGFGRQGKRTFMAERQYTRMEDWLTAKLAYEGLPSKTYLSKTLAQYTSKTCSNCGFTITSADYDRVLEKLKKTATGWMTTINGKELKVEGQITYYNRYKRQNVVKDLSVELDRLSEESVNNDISSWTKGRSGEALSLLKKRFSHRPVQEKFVCLNCGFETHADEQAALNIARSWLFLRSQEYKKYQTNKTTGNTDKRAFVETWQSFYRKKLKEVWKPAV

SEQ ID NO: 34972 - protein, 979 aa, synthetic construct
  REGION 1..979: note = engineered CasX variant
QEIKRINKIRRRLVKDSNTKKAGKTGPMKTLLVRVMTPDLRERLENLRKKPENIPQPISNTSRANLNKLLTDYTEMKKAILHVYWEEFQKDPVGLMSRVAQPASKKIDQNKLKPEMDEKGNLTTAGFACSQCGQPLFVYKLEQVSEKGKAYTNYFGRCNVAEHEKLILLYQLKPEKDSDEAVTYSLGKFGQRALDFYSIHVTKESTHPVKPLAQIAGNRYASTPVGKALSDACMGTIASFLSKYQDIIIEHQKVVKGNQKRLESLRELAGKENLEYPSVTLPPQPHTKEGVDAYNEVIARVRMWVNLNLWQKLKLSRDDAKPLLRLKGFPSFPLVERQANEVDWWDMVCNVKKLINEKKEDGKVFWQNLAGYKRQEALRPYLSSEEDRKKGKKFARYQLGDLLLHLEKKHGEDWGKVYDEAWERIDKKVEGLSKHIKLEEERRSEDAQSKAALTDWLRAKASFVIEGLKEADKDEFCRCELKLQKWYGDLRGKPFAIEAENSILDISGFSKQYNCAFIWQKDGVKKLNLYLIINYFKGGKLRFKKIKPEAFEANRFYTVINKKSGEIVPMEVNFNFDDPNLIILPLAFGKRQGREFIWNDLLSLETGSLKLANGRVIEKTLYNRRTRQDEPALFVALTFERREVLDSSNIKPMSNLIGVDRGENIPAVIALTDPEGCPLSRFKDSLGNPTHILRIGESYKEKQRTIQAKKEVEQRRAGGYSRKYASKAKNLADDMVRNTARDLLYYAVTQDAMLIFENLSRGFGRQGKRTFMAERQYTRMEDWLTAKLAYEGLPSKTYLSKTLAQYTSKTCSNCGFTITSADYDRVLEKLKKTATGWMTTINGKELKVEGQITYYNRYKRQNVVKDLSVELDRLSEESVNNDISSWTKGRSGEALSLLKKRFSHRPVQEKFVCLNCGFETHADEQAALNIARSWLFLRSQEYKKYQTNKTTGNTDKRAFVETWQSFYRKKLKEVWKPAV

SEQ ID NO: 34973 - protein, 979 aa, synthetic construct
  REGION 1..979: note = engineered CasX variant
QEIKRINKIRRRLVKDSNTKKAGKTGPMKTLLVRVMTPDLRERLENLRKKPENIPQPISNTSRANLNKLLTDYTEMKKAILHVYWEEFQKDPVGLMSRVAQPASKKIDQNKLKPEMDEKGNLTTAGFACSQCGQPLFVYKLEQVSEKGKAYTNYFGRCNVAEHEKLILLYQLKPEKDSDEAVTYSLGKFGQRALDFYSIHVTKESTHPVKPLAQIAGNRYASAPVGKALSDACMGTIASFLSKYQDIIIEHQKVVKGNQKRLESLRELAGKENLEYPSVTLPPQPHTKEGVDAYNEVIARVRMWVNLNLWQKLKLSRDDAKPLLRLKGFPSFPLVERQANEVDWWDMVCNVKKLINEKKEDGKVFWQNLAGYKRQEALRPYLSSEEDRKKGKKFARYQLGDLLLHLEKKHGEDWGKVYDEAWERIDKKVEGLSKHIKLEEERRSEDAQSKAALTDWLRAKASFVIEGLKEADKDEFCRCELKLQKWYGDLRGKPFAIEAENSILDISGFSKQYNCAFIWQKDGVKKLNLYLIINYFKGGKLRFKKIKPEAFEANRFYTVINKKSGEIVPMEVNFNFDDPNLIILPLAFGKRQGREFIWNDLLSLETGSLKLANGRVIEKTLYNRRTRQDEPALFVALTFERREVLDSSNIKPMSNLIGVDRGENIPAVIALTDPEGCPLSRFKDSLGNPTHILRIGESYKEKQRTIQAKKEVEQRRAGGYSRKYASKAKNLADDMVRNTARDLLYYAVTQDAMLIFENLSRGFGRQGKRTFMAERQYTRMEDWLTAKLAYEGLPSKTYLSKTLAQYTSKTCSNCGFTITSADYDRVLEKLKKTATGWMTTINGKELKVEGQITYYNRYKRQNVVKDLSVELDRLSEESVNNDISSWTKGRSGEALSLLKKRFSHRPVQEKFVCLNCGFETHADEQAALNIARSWLFLRSQEYKKYQTNKTTGNTDKRAFVETWQSFYRKKLKEVWKPAV

SEQ ID NO: 34974 - protein, 979 aa, synthetic construct
  REGION 1..979: note = engineered CasX variant
QEIKRINKIRRRLVKDSNTKKAGKTGPMKTLLVRVMTPDLRERLENLRKKPENIPQPISNTSRANLNKLLTDYTEMKKAILHVYWEEFQKDPVGLMSRVAQPASKKIDQNKLKPEMDEKGNLTTAGFACSQCGQPLFVYKLEQVSEKGKAYTNYFGRCNVAEHEKLILLYQLKPEKDSDEAVTYSLGKFGQRALDFYSIHVTKESTHPVKPLAQIAGNRYASVPVGKALSDACMGTIASFLSKYQDIIIEHQKVVKGNQKRLESLRELAGKENLEYPSVTLPPQPHTKEGVDAYNEVIARVRMWVNLNLWQKLKLSRDDAKPLLRLKGFPSFPLVERQANEVDWWDMVCNVKKLINEKKEDGKVFWQNLAGYKRQEALRPYLSSEEDRKKGKKFARYQLGDLLLHLEKKHGEDWGKVYDEAWERIDKKVEGLSKHIKLEEERRSEDAQSKAALTDWLRAKASFVIEGLKEADKDEFCRCELKLQKWYGDLRGKPFAIEAENSILDISGFSKQYNCAFIWQKDGVKKLNLYLIINYFKGGKLRFKKIKPEAFEANRFYTVINKKSGEIVPMEVNFNFDDPNLIILPLAFGKRQGREFIWNDLLSLETGSLKLANGRVIEKTLYNRRTRQDEPALFVALTFERREVLDSSNIKPMSNLIGVDRGENIPAVIALTDPEGCPLSRFKDSLGNPTHILRIGESYKEKQRTIQAKKEVEQRRAGGYSRKYASKAKNLADDMVRNTARDLLYYAVTQDAMLIFENLSRGFGRQGKRTFMAERQYTRMEDWLTAKLAYEGLPSKTYLSKTLAQYTSKTCSNCGFTITSADYDRVLEKLKKTATGWMTTINGKELKVEGQITYYNRYKRQNVVKDLSVELDRLSEESVNNDISSWTKGRSGEALSLLKKRFSHRPVQEKFVCLNCGFETHADEQAALNIARSWLFLRSQEYKKYQTNKTTGNTDKRAFVETWQSFYRKKLKEVWKPAV

SEQ ID NO: 34975 - protein, 979 aa, synthetic construct
  REGION 1..979: note = engineered CasX variant
QEIKRINKIRRRLVKDSNTKKAGKTGPMKTLLVRVMTPDLRERLENLRKKPENIPQPISNTSRANLNKLLTDYTEMKKAILHVYWEEFQKDPVGLMSRVAQPASKKIDQNKLKPEMDEKGNLTTAGFACSQCGQPLFVYKLEQVSEKGKAYTNYFGRCNVAEHEKLIKLYQLKPEKDSDEAVTYSLGKFGQRALDFYSIHVTKESTHPVKPLAQIAGNRYASGPVGKALSDACMGTIASFLSKYQDIIIEHQKVVKGNQKRLESLRELAGKENLEYPSVTLPPQPHTKEGVDAYNEVIARVRMWVNLNLWQKLKLSRDDAKPLLRLKGFPSFPLVERQANEVDWWDMVCNVKKLINEKKEDGKVFWQNLAGYKRQEALRPYLSSEEDRKKGKKFARYQLGDLLLHLEKKHGEDWGKVYDEAWERIDKKVEGLSKHIKLEEERRSEDAQSKAALTDWLRAKASFVIEGLKEADKDEFCRCELKLQKWYGDLRGKPFAIEAENSILDISGFSKQYNCAFIWQKDGVKKLNLYLIINYFKGGKLRFKKIKPEAFEANRFYTVINKKSGEIVPMEVNFNFDDPNLIILPLAFGKRQGREFIWNDLLSLETGSLKLANGRVIEKTLYNRRTRQDEPALFVALTFERREVLDSSNIKPMSNLIGVDRGENIPAVIALTDPEGCPLSRFKDSLGNPTHILRIGESYKEKQRTIQAKKEVEQRRAGGYSRKYASKAKNLADDMVRNTARDLLYYAVTQDAMLIFENLSRGFGRQGKRTFMAERQYTRMEDWLTAKLAYEGLPSKTYLSKTLAQYTSKTCSNCGFTITSADYDRVLEKLKKTATGWMTTINGKELKVEGQITYYNRYKRQNVVKDLSVELDRLSEESVNNDISSWTKGRSGEALSLLKKRFSHRPVQEKFVCLNCGFETHADEQAALNIARSWLFLRSQEYKKYQTNKTTGNTDKRAFVETWQSFYRKKLKEVWKPAV

SEQ ID NO: 34976 - protein, 978 aa, synthetic construct
  REGION 1..978: note = engineered CasX variant
QEIKRINKIRRRLVKDSNTKKAGKTGPMKTLLVRVMTPDLRERLENLRKKPENIPQPISNTSRANLNKLLTDYTEMKKAILHVYWEEFQKDPVGLMSRVAQPASKKIDQNKLKPEMDEKGNLTTAGFACSQCGQPLFVYKLEQVSEKGKAYTNYFGRCNVAEHEKLILLYQLKPEKDSDEAVTYSLGKFGQRALDFYSIHVTKESTHPVKPLAQIAGNRYASPVGKALSDACMGTIASFLSKYQDIIIEHQKVVKGNQKRLESLRELAGKENLEYPSVTLPPQPHTKEGVDAYNEVIARVRMWVNLNLWQKLKLSRDDAKPLLRLKGFPSFPLVERQANEVDWWDMVCNVKKLINEKKEDGKVFWQNLAGYKRQEALRPYLSSEEDRKKGKKFARYQLGDLLLHLEKKHGEDWGKVYDEAWERIDKKVEGLSKHIKLEEERRSEDAQSKAALTDWLRAKASFVIEGLKEADKDEFCRCELKLQKWYGDLRGKPFAIEAENSILDISGFSKQYNCAFIWQKDGVKKLNLYLIINYFKGGKLRFKKIKPEAFEANRFYTVINKKSGEIVPMEVNFNFDDPNLIILPLAFGKRQGREFIWNDLLSLETGSLKLANGRVIEKTLYNRRTRQDEPALFVALTFERREVLDSSNIKPMSNLIGVDRGENIPAVIALTDPEGCPLSRFKDSLGNPTHILRIGESYKEKQRTIQAKKEVEQRRAGGYSRKYASKAKNLADDMVRNTARDLLYYAVTQDAMLIFENLSRGFGRQGKRTFMAERQYTRMEDWLTAKLAYEGLPSKTYLSKTLAQYTSKTCSNCGFTITSADYDRVLEKLKKTATGWMTTINGKELKVEGQITYYNRYKRQNVVKDLSVELDRLSEESVNNDISSWTKGRSGEALSLLKKRFSHRPVQEKFVCLNCGFETHADEQAALNIARSWLFLRSQEYKKYQTNKTTGNTDKRAFVETWQSFYRKKLKEVWKPAV

SEQ ID NO: 34977 - protein, 978 aa, synthetic construct
  REGION 1..978: note = engineered CasX variant
QEIKRINKIRRRLVKDSNTKKAGKTGPMKTLLVRVMTPDLRERLENLRKKPENIPQPISNTSRANLNKLLTDYTEMKKAILHVYWEEFQKDPVGLMSRVAQPASKKIDQNKLKPEMDEKGNLTTAGFACSQCGQPLFVYKLEQVSEKGKAYTNYFGRCNVAEHEKLILLYQLKPEKDSDEAVTYSLGKFGQRALDFYSIHVTKESTHPVKPLAQIAGNRYASYPVGKALSDACMGTIASFLSKYQDIIIEHQKVVKGNQKRLESLRELAGKENLEYPSVTLPPQPHTKEGVDAYNEVIARVRMWVNLNLWQKLKLSRDDAKPLLRLKGFPSFPLVERQANEVDWWDMVCNVKKLINEKKEDGKVFWQNLAGYKRQEALRPYLSSEEDRKKGKKFARYQLGDLLLHLEKKHGEDWGKVYDEAWERIDKKVEGLSKHIKLEEERRSEDAQSKAALTDWLRAKASFVIEGLKEADKDEFCRCELKLQKWYGDLRGKPFAIEAENSILDISGFSKQYNCAFIWQKDGVKKLNLYLIINYFKGGKLRFKKIKPEAFEANRFYTVINKKSGEIVPMEVNFNFDDPNLIILPLAFGKRQGREFIWNDLLSLETGSLKLANGRVIEKTLYNRRTRQDEPALFVALTFERREVLDSSNIKPMNLIGVDRGENIPAVIALTDPEGCPLSRFKDSLGNPTHILRIRESYKEKQRTIQAKKEVEQRRAGGYSRKYASKAKNLADDMVRNTARDLLYYAVTQDAMLIFENLSRGFGRQGKRTFMAERQYTRMEDWLTAKLAYEGLPSKTYLSKTLAQYTSKTCSNCGFTITSADYDRVLEKLKKTATGWMTTINGKELKVEGQITYYNRYKRQNVVKDLSVELDRLSEESVNNDISSWTKGRSGEALSLLKKRFSHRPVQEKFVCLNCGFETHADEQAALNIARSWLFLRSQEYKKYQTNKTTGNTDKRAFVETWQSFYRKKLKEVWKPAV

SEQ ID NO: 34978 - protein, 978 aa, synthetic construct
  REGION 1..978: note = engineered CasX variant
QEIKRINKIRRRLVKDSNTKKAGKTGPMKTLLVRVMTPDLRERLENLRKKPENIPQPISNTSRANLNKLLTDYTEMKKAILHVYWEEFQKDPVGLMSRVAQPASKKIDQNKLKPEMDEKGNLTTAGFACSQCGQPLFVYKLEQVSEKGKAYTNYFGRCNVAEHEKLILLYQLKPEKDSDEAVTYSLGKFGQRALDFYSIHVTKESTHPVKPLAQIAGNRYASHPVGKALSDACMGTIASFLSKYQDIIIEHQKVVKGNQKRLESLRELAGKENLEYPSVTLPPQPHTKEGVDAYNEVIARVRMWVNLNLWQKLKLSRDDAKPLLRLKGFPSFPLVERQANEVDWWDMVCNVKKLINEKKEDGKVFWQNLAGYKRQEALRPYLSSEEDRKKGKKFARYQLGDLLLHLEKKHGEDWGKVYDEAWERIDKKVEGLSKHIKLEEERRSEDAQSKAALTDWLRAKASFVIEGLKEADKDEFCRCELKLQKWYGDLRGKPFAIEAENSILDISGFSKQYNCAFIWQKDGVKKLNLYLIINYFKGGKLRFKKIKPEAFEANRFYTVINKKSGEIVPMEVNFNFDDPNLIILPLAFGKRQGREFIWNDLLSLETGSLKLANGRVIEKTLYNRRTRQDEPALFVALTFERREVLDSSNIKPMNLIGVDRGENIPAVIALTDPEGCPLSRFKDSLGNPTHILRIRESYKEKQRTIQAKKEVEQRRAGGYSRKYASKAKNLADDMVRNTARDLLYYAVTQDAMLIFENLSRGFGRQGKRTFMAERQYTRMEDWLTAKLAYEGLPSKTYLSKTLAQYTSKTCSNCGFTITSADYDRVLEKLKKTATGWMTTINGKELKVEGQITYYNRYKRQNVVKDLSVELDRLSEESVNNDISSWTKGRSGEALSLLKKRFSHRPVQEKFVCLNCGFETHADEQAALNIARSWLFLRSQEYKKYQTNKTTGNTDKRAFVETWQSFYRKKLKEVWKPAV

SEQ ID NO: 34979 - protein, 978 aa, synthetic construct
  REGION 1..978: note = engineered CasX variant
QEIKRINKIRRRLVKDSNTKKAGKTGPMKTLLVRVMTPDLRERLENLRKKPENIPQPISNTSRANLNKLLTDYTEMKKAILHVYWEEFQKDPVGLMSRVAQPASKKIDQNKLKPEMDEKGNLTTAGFACSQCGQPLFVYKLEQVSEKGKAYTNYFGRCNVAEHEKLILLYQLKPEKDSDEAVTYSLGKFGQRALDFYSIHVTKESTHPVKPLAQIAGNRYASSPVGKALSDACMGTIASFLSKYQDIIIEHQKVVKGNQKRLESLRELAGKENLEYPSVTLPPQPHTKEGVDAYNEVIARVRMWVNLNLWQKLKLSRDDAKPLLRLKGFPSFPLVERQANEVDWWDMVCNVKKLINEKKEDGKVFWQNLAGYKRQEALRPYLSSEEDRKKGKKFARYQLGDLLLHLEKKHGEDWGKVYDEAWERIDKKVEGLSKHIKLEEERRSEDAQSKAALTDWLRAKASFVIEGLKEADKDEFCRCELKLQKWYGDLRGKPFAIEAENSILDISGFSKQYNCAFIWQKDGVKKLNLYLIINYFKGGKLRFKKIKPEAFEANRFYTVINKKSGEIVPMEVNFNFDDPNLIILPLAFGKRQGREFIWNDLLSLETGSLKLANGRVIEKTLYNRRTRQDEPALFVALTFERREVLDSSNIKPMNLIGVDRGENIPAVIALTDPEGCPLSRFKDSLGNPTHILRIRESYKEKQRTIQAKKEVEQRRAGGYSRKYASKAKNLADDMVRNTARDLLYYAVTQDAMLIFENLSRGFGRQGKRTFMAERQYTRMEDWLTAKLAYEGLPSKTYLSKTLAQYTSKTCSNCGFTITSADYDRVLEKLKKTATGWMTTINGKELKVEGQITYYNRYKRQNVVKDLSVELDRLSEESVNNDISSWTKGRSGEALSLLKKRFSHRPVQEKFVCLNCGFETHADEQAALNIARSWLFLRSQEYKKYQTNKTTGNTDKRAFVETWQSFYRKKLKEVWKPAV

SEQ ID NO: 34980 - protein, 978 aa, synthetic construct
  REGION 1..978: note = engineered CasX variant
QEIKRINKIRRRLVKDSNTKKAGKTGPMKTLLVRVMTPDLRERLENLRKKPENIPQPISNTSRANLNKLLTDYTEMKKAILHVYWEEFQKDPVGLMSRVAQPASKKIDQNKLKPEMDEKGNLTTAGFACSQCGQPLFVYKLEQVSEKGKAYTNYFGRCNVAEHEKLILLYQLKPEKDSDEAVTYSLGKFGQRALDFYSIHVTKESTHPVKPLAQIAGNRYASTPVGKALSDACMGTIASFLSKYQDIIIEHQKVVKGNQKRLESLRELAGKENLEYPSVTLPPQPHTKEGVDAYNEVIARVRMWVNLNLWQKLKLSRDDAKPLLRLKGFPSFPLVERQANEVDWWDMVCNVKKLINEKKEDGKVFWQNLAGYKRQEALRPYLSSEEDRKKGKKFARYQLGDLLLHLEKKHGEDWGKVYDEAWERIDKKVEGLSKHIKLEEERRSEDAQSKAALTDWLRAKASFVIEGLKEADKDEFCRCELKLQKWYGDLRGKPFAIEAENSILDISGFSKQYNCAFIWQKDGVKKLNLYLIINYFKGGKLRFKKIKPEAFEANRFYTVINKKSGEIVPMEVNFNFDDPNLIILPLAFGKRQGREFIWNDLLSLETGSLKLANGRVIEKTLYNRRTRQDEPALFVALTFERREVLDSSNIKPMNLIGVDRGENIPAVIALTDPEGCPLSRFKDSLGNPTHILRIRESYKEKQRTIQAKKEVEQRRAGGYSRKYASKAKNLADDMVRNTARDLLYYAVTQDAMLIFENLSRGFGRQGKRTFMAERQYTRMEDWLTAKLAYEGLPSKTYLSKTLAQYTSKTCSNCGFTITSADYDRVLEKLKKTATGWMTTINGKELKVEGQITYYNRYKRQNVVKDLSVELDRLSEESVNNDISSWTKGRSGEALSLLKKRFSHRPVQEKFVCLNCGFETHADEQAALNIARSWLFLRSQEYKKYQTNKTTGNTDKRAFVETWQSFYRKKLKEVWKPAV

SEQ ID NO: 34981 - protein, 978 aa, synthetic construct
  REGION 1..978: note = engineered CasX variant
QEIKRINKIRRRLVKDSNTKKAGKTGPMKTLLVRVMTPDLRERLENLRKKPENIPQPISNTSRANLNKLLTDYTEMKKAILHVYWEEFQKDPVGLMSRVAQPASKKIDQNKLKPEMDEKGNLTTAGFACSQCGQPLFVYKLEQVSEKGKAYTNYFGRCNVAEHEKLILLYQLKPEKDSDEAVTYSLGKFGQRALDFYSIHVTKESTHPVKPLAQIAGNRYASAPVGKALSDACMGTIASFLSKYQDIIIEHQKVVKGNQKRLESLRELAGKENLEYPSVTLPPQPHTKEGVDAYNEVIARVRMWVNLNLWQKLKLSRDDAKPLLRLKGFPSFPLVERQANEVDWWDMVCNVKKLINEKKEDGKVFWQNLAGYKRQEALRPYLSSEEDRKKGKKFARYQLGDLLLHLEKKHGEDWGKVYDEAWERIDKKVEGLSKHIKLEEERRSEDAQSKAALTDWLRAKASFVIEGLKEADKDEFCRCELKLQKWYGDLRGKPFAIEAENSILDISGFSKQYNCAFIWQKDGVKKLNLYLIINYFKGGKLRFKKIKPEAFEANRFYTVINKKSGEIVPMEVNFNFDDPNLIILPLAFGKRQGREFIWNDLLSLETGSLKLANGRVIEKTLYNRRTRQDEPALFVALTFERREVLDSSNIKPMNLIGVDRGENIPAVIALTDPEGCPLSRFKDSLGNPTHILRIRESYKEKQRTIQAKKEVEQRRAGGYSRKYASKAKNLADDMVRNTARDLLYYAVTQDAMLIFENLSRGFGRQGKRTFMAERQYTRMEDWLTAKLAYEGLPSKTYLSKTLAQYTSKTCSNCGFTITSADYDRVLEKLKKTATGWMTTINGKELKVEGQITYYNRYKRQNVVKDLSVELDRLSEESVNNDISSWTKGRSGEALSLLKKRFSHRPVQEKFVCLNCGFETHADEQAALNIARSWLFLRSQEYKKYQTNKTTGNTDKRAFVETWQSFYRKKLKEVWKPAV

SEQ ID NO: 34982 - protein, 978 aa, synthetic construct
  REGION 1..978: note = engineered CasX variant
QEIKRINKIRRRLVKDSNTKKAGKTGPMKTLLVRVMTPDLRERLENLRKKPENIPQPISNTSRANLNKLLTDYTEMKKAILHVYWEEFQKDPVGLMSRVAQPASKKIDQNKLKPEMDEKGNLTTAGFACSQCGQPLFVYKLEQVSEKGKAYTNYFGRCNVAEHEKLILLYQLKPEKDSDEAVTYSLGKFGQRALDFYSIHVTKESTHPVKPLAQIAGNRYASVPVGKALSDACMGTIASFLSKYQDIIIEHQKVVKGNQKRLESLRELAGKENLEYPSVTLPPQPHTKEGVDAYNEVIARVRMWVNLNLWQKLKLSRDDAKPLLRLKGFPSFPLVERQANEVDWWDMVCNVKKLINEKKEDGKVFWQNLAGYKRQEALRPYLSSEEDRKKGKKFARYQLGDLLLHLEKKHGEDWGKVYDEAWERIDKKVEGLSKHIKLEEERRSEDAQSKAALTDWLRAKASFVIEGLKEADKDEFCRCELKLQKWYGDLRGKPFAIEAENSILDISGFSKQYNCAFIWQKDGVKKLNLYLIINYFKGGKLRFKKIKPEAFEANRFYTVINKKSGEIVPMEVNFNFDDPNLIILPLAFGKRQGREFIWNDLLSLETGSLKLANGRVIEKTLYNRRTRQDEPALFVALTFERREVLDSSNIKPMNLIGVDRGENIPAVIALTDPEGCPLSRFKDSLGNPTHILRIRESYKEKQRTIQAKKEVEQRRAGGYSRKYASKAKNLADDMVRNTARDLLYYAVTQDAMLIFENLSRGFGRQGKRTFMAERQYTRMEDWLTAKLAYEGLPSKTYLSKTLAQYTSKTCSNCGFTITSADYDRVLEKLKKTATGWMTTINGKELKVEGQITYYNRYKRQNVVKDLSVELDRLSEESVNNDISSWTKGRSGEALSLLKKRFSHRPVQEKFVCLNCGFETHADEQAALNIARSWLFLRSQEYKKYQTNKTTGNTDKRAFVETWQSFYRKKLKEVWKPAV

SEQ ID NO: 34983 - protein, 978 aa, synthetic construct
  REGION 1..978: note = engineered CasX variant
QEIKRINKIRRRLVKDSNTKKAGKTGPMKTLLVRVMTPDLRERLENLRKKPENIPQPISNTSRANLNKLLTDYTEMKKAILHVYWEEFQKDPVGLMSRVAQPASKKIDQNKLKPEMDEKGNLTTAGFACSQCGQPLFVYKLEQVSEKGKAYTNYFGRCNVAEHEKLIKLYQLKPEKDSDEAVTYSLGKFGQRALDFYSIHVTKESTHPVKPLAQIAGNRYASGPVGKALSDACMGTIASFLSKYQDIIIEHQKVVKGNQKRLESLRELAGKENLEYPSVTLPPQPHTKEGVDAYNEVIARVRMWVNLNLWQKLKLSRDDAKPLLRLKGFPSFPLVERQANEVDWWDMVCNVKKLINEKKEDGKVFWQNLAGYKRQEALRPYLSSEEDRKKGKKFARYQLGDLLLHLEKKHGEDWGKVYDEAWERIDKKVEGLSKHIKLEEERRSEDAQSKAALTDWLRAKASFVIEGLKEADKDEFCRCELKLQKWYGDLRGKPFAIEAENSILDISGFSKQYNCAFIWQKDGVKKLNLYLIINYFKGGKLRFKKIKPEAFEANRFYTVINKKSGEIVPMEVNFNFDDPNLIILPLAFGKRQGREFIWNDLLSLETGSLKLANGRVIEKTLYNRRTRQDEPALFVALTFERREVLDSSNIKPMNLIGVDRGENIPAVIALTDPEGCPLSRFKDSLGNPTHILRIRESYKEKQRTIQAKKEVEQRRAGGYSRKYASKAKNLADDMVRNTARDLLYYAVTQDAMLIFENLSRGFGRQGKRTFMAERQYTRMEDWLTAKLAYEGLPSKTYLSKTLAQYTSKTCSNCGFTITSADYDRVLEKLKKTATGWMTTINGKELKVEGQITYYNRYKRQNVVKDLSVELDRLSEESVNNDISSWTKGRSGEALSLLKKRFSHRPVQEKFVCLNCGFETHADEQAALNIARSWLFLRSQEYKKYQTNKTTGNTDKRAFVETWQSFYRKKLKEVWKPAV

SEQ ID NO: 34984 - protein, 977 aa, synthetic construct
  REGION 1..977: note = engineered CasX variant
QEIKRINKIRRRLVKDSNTKKAGKTGPMKTLLVRVMTPDLRERLENLRKKPENIPQPISNTSRANLNKLLTDYTEMKKAILHVYWEEFQKDPVGLMSRVAQPASKKIDQNKLKPEMDEKGNLTTAGFACSQCGQPLFVYKLEQVSEKGKAYTNYFGRCNVAEHEKLILLYQLKPEKDSDEAVTYSLGKFGQRALDFYSIHVTKESTHPVKPLAQIAGNRYASPVGKALSDACMGTIASFLSKYQDIIIEHQKVVKGNQKRLESLRELAGKENLEYPSVTLPPQPHTKEGVDAYNEVIARVRMWVNLNLWQKLKLSRDDAKPLLRLKGFPSFPLVERQANEVDWWDMVCNVKKLINEKKEDGKVFWQNLAGYKRQEALRPYLSSEEDRKKGKKFARYQLGDLLLHLEKKHGEDWGKVYDEAWERIDKKVEGLSKHIKLEEERRSEDAQSKAALTDWLRAKASFVIEGLKEADKDEFCRCELKLQKWYGDLRGKPFAIEAENSILDISGFSKQYNCAFIWQKDGVKKLNLYLIINYFKGGKLRFKKIKPEAFEANRFYTVINKKSGEIVPMEVNFNFDDPNLIILPLAFGKRQGREFIWNDLLSLETGSLKLANGRVIEKTLYNRRTRQDEPALFVALTFERREVLDSSNIKPMNLIGVDRGENIPAVIALTDPEGCPLSRFKDSLGNPTHILRIRESYKEKQRTIQAKKEVEQRRAGGYSRKYASKAKNLADDMVRNTARDLLYYAVTQDAMLIFENLSRGFGRQGKRTFMAERQYTRMEDWLTAKLAYEGLPSKTYLSKTLAQYTSKTCSNCGFTITSADYDRVLEKLKKTATGWMTTINGKELKVEGQITYYNRYKRQNVVKDLSVELDRLSEESVNNDISSWTKGRSGEALSLLKKRFSHRPVQEKFVCLNCGFETHADEQAALNIARSWLFLRSQEYKKYQTNKTTGNTDKRAFVETWQSFYRKKLKEVWKPAV

SEQ ID NO: 34985 - protein, 978 aa, synthetic construct
  REGION 1..978: note = engineered CasX variant
QEIKRINKIRRRLVKDSNTKKAGKTGPMKTLLVRVMTPDLRERLENLRKKPENIPQPISNTSRANLNKLLTDYTEMKKAILHVYWEEFQKDPVGLMSRVAQPASKKIDQNKLKPEMDEKGNLTTAGFACSQCGQPLFVYKLEQVSEKGKAYTNYFGRCNVAEHEKLILLYQLKPEKDSDEAVTYSLGKFGQRALDFYSIHVTKESTHPVKPLAQIAGNRYASYPVGKALSDACMGTIASFLSKYQDIIIEHQKVVKGNQKRLESLRELAGKENLEYPSVTLPPQPHTKEGVDAYNEVIARVRMWVNLNLWQKLKLSRDDAKPLLRLKGFPSFPLVERQANEVDWWDMVCNVKKLINEKKEDGKVFWQNLAGYKRQEALRPYLSSEEDRKKGKKFARYQLGDLLLHLEKKHGEDWGKVYDEAWERIDKKVEGLSKHIKLEEERRSEDAQSKAALTDWLRAKASFVIEGLKEADKDEFCRCELKLQKWYGDLRGKPFAIEAENSILDISGFSKQYNCAFIWQKDGVKKLNLYLIINYFKGGKLRFKKIKPEAFEANRFYTVINKKSGEIVPMEVNFNFDDPNLIILPLAFGKRQGREFIWNDLLSLETGSLKLANGRVIEKTLYNRRTRQDEPALFVALTFERREVLDSSNIKPMNLIGVDRGENIPAVIALTDPEGCPLSRFKDSLGNPTHILRIGESYKEKQRTIQAKKEVEQRRAGGYSRKYASKAKNLADDMVRNTARDLLYYAVTQDAMLIFENLSRGFGRQGKRTFSAERQYTRMEDWLTAKLAYEGLPSKTYLSKTLAQYTSKTCSNCGFTITSADYDRVLEKLKKTATGWMTTINGKELKVEGQITYYNRYKRQNVVKDLSVELDRLSEESVNNDISSWTKGRSGEALSLLKKRFSHRPVQEKFVCLNCGFETHADEQAALNIARSWLFLRSQEYKKYQTNKTTGNTDKRAFVETWQSFYRKKLKEVWKPAV

SEQ ID NO: 34986 - protein, 978 aa, synthetic construct
  REGION 1..978: note = engineered CasX variant
QEIKRINKIRRRLVKDSNTKKAGKTGPMKTLLVRVMTPDLRERLENLRKKPENIPQPISNTSRANLNKLLTDYTEMKKAILHVYWEEFQKDPVGLMSRVAQPASKKIDQNKLKPEMDEKGNLTTAGFACSQCGQPLFVYKLEQVSEKGKAYTNYFGRCNVAEHEKLILLYQLKPEKDSDEAVTYSLGKFGQRALDFYSIHVTKESTHPVKPLAQIAGNRYASHPVGKALSDACMGTIASFLSKYQDIIIEHQKVVKGNQKRLESLRELAGKENLEYPSVTLPPQPHTKEGVDAYNEVIARVRMWVNLNLWQKLKLSRDDAKPLLRLKGFPSFPLVERQANEVDWWDMVCNVKKLINEKKEDGKVFWQNLAGYKRQEALRPYLSSEEDRKKGKKFARYQLGDLLLHLEKKHGEDWGKVYDEAWERIDKKVEGLSKHIKLEEERRSEDAQSKAALTDWLRAKASFVIEGLKEADKDEFCRCELKLQKWYGDLRGKPFAIEAENSILDISGFSKQYNCAFIWQKDGVKKLNLYLIINYFKGGKLRFKKIKPEAFEANRFYTVINKKSGEIVPMEVNFNFDDPNLIILPLAFGKRQGREFIWNDLLSLETGSLKLANGRVIEKTLYNRRTRQDEPALFVALTFERREVLDSSNIKPMNLIGVDRGENIPAVIALTDPEGCPLSRFKDSLGNPTHILRIGESYKEKQRTIQAKKEVEQRRAGGYSRKYASKAKNLADDMVRNTARDLLYYAVTQDAMLIFENLSRGFGRQGKRTFSAERQYTRMEDWLTAKLAYEGLPSKTYLSKTLAQYTSKTCSNCGFTITSADYDRVLEKLKKTATGWMTTINGKELKVEGQITYYNRYKRQNVVKDLSVELDRLSEESVNNDISSWTKGRSGEALSLLKKRFSHRPVQEKFVCLNCGFETHADEQAALNIARSWLFLRSQEYKKYQTNKTTGNTDKRAFVETWQSFYRKKLKEVWKPAV

SEQ ID NO: 34987 - protein, 978 aa, synthetic construct
  REGION 1..978: note = engineered CasX variant
QEIKRINKIRRRLVKDSNTKKAGKTGPMKTLLVRVMTPDLRERLENLRKKPENIPQPISNTSRANLNKLLTDYTEMKKAILHVYWEEFQKDPVGLMSRVAQPASKKIDQNKLKPEMDEKGNLTTAGFACSQCGQPLFVYKLEQVSEKGKAYTNYFGRCNVAEHEKLILLYQLKPEKDSDEAVTYSLGKFGQRALDFYSIHVTKESTHPVKPLAQIAGNRYASSPVGKALSDACMGTIASFLSKYQDIIIEHQKVVKGNQKRLESLRELAGKENLEYPSVTLPPQPHTKEGVDAYNEVIARVRMWVNLNLWQKLKLSRDDAKPLLRLKGFPSFPLVERQANEVDWWDMVCNVKKLINEKKEDGKVFWQNLAGYKRQEALRPYLSSEEDRKKGKKFARYQLGDLLLHLEKKHGEDWGKVYDEAWERIDKKVEGLSKHIKLEEERRSEDAQSKAALTDWLRAKASFVIEGLKEADKDEFCRCELKLQKWYGDLRGKPFAIEAENSILDISGFSKQYNCAFIWQKDGVKKLNLYLIINYFKGGKLRFKKIKPEAFEANRFYTVINKKSGEIVPMEVNFNFDDPNLIILPLAFGKRQGREFIWNDLLSLETGSLKLANGRVIEKTLYNRRTRQDEPALFVALTFERREVLDSSNIKPMNLIGVDRGENIPAVIALTDPEGCPLSRFKDSLGNPTHILRIGESYKEKQRTIQAKKEVEQRRAGGYSRKYASKAKNLADDMVRNTARDLLYYAVTQDAMLIFENLSRGFGRQGKRTFSAERQYTRMEDWLTAKLAYEGLPSKTYLSKTLAQYTSKTCSNCGFTITSADYDRVLEKLKKTATGWMTTINGKELKVEGQITYYNRYKRQNVVKDLSVELDRLSEESVNNDISSWTKGRSGEALSLLKKRFSHRPVQEKFVCLNCGFETHADEQAALNIARSWLFLRSQEYKKYQTNKTTGNTDKRAFVETWQSFYRKKLKEVWKPAV

SEQ ID NO: 34988 - protein, 978 aa, synthetic construct
  REGION 1..978: note = engineered CasX variant
QEIKRINKIRRRLVKDSNTKKAGKTGPMKTLLVRVMTPDLRERLENLRKKPENIPQPISNTSRANLNKLLTDYTEMKKAILHVYWEEFQKDPVGLMSRVAQPASKKIDQNKLKPEMDEKGNLTTAGFACSQCGQPLFVYKLEQVSEKGKAYTNYFGRCNVAEHEKLILLYQLKPEKDSDEAVTYSLGKFGQRALDFYSIHVTKESTHPVKPLAQIAGNRYASTPVGKALSDACMGTIASFLSKYQDIIIEHQKVVKGNQKRLESLRELAGKENLEYPSVTLPPQPHTKEGVDAYNEVIARVRMWVNLNLWQKLKLSRDDAKPLLRLKGFPSFPLVERQANEVDWWDMVCNVKKLINEKKEDGKVFWQNLAGYKRQEALRPYLSSEEDRKKGKKFARYQLGDLLLHLEKKHGEDWGKVYDEAWERIDKKVEGLSKHIKLEEERRSEDAQSKAALTDWLRAKASFVIEGLKEADKDEFCRCELKLQKWYGDLRGKPFAIEAENSILDISGFSKQYNCAFIWQKDGVKKLNLYLIINYFKGGKLRFKKIKPEAFEANRFYTVINKKSGEIVPMEVNFNFDDPNLIILPLAFGKRQGREFIWNDLLSLETGSLKLANGRVIEKTLYNRRTRQDEPALFVALTFERREVLDSSNIKPMNLIGVDRGENIPAVIALTDPEGCPLSRFKDSLGNPTHILRIGESYKEKQRTIQAKKEVEQRRAGGYSRKYASKAKNLADDMVRNTARDLLYYAVTQDAMLIFENLSRGFGRQGKRTFSAERQYTRMEDWLTAKLAYEGLPSKTYLSKTLAQYTSKTCSNCGFTITSADYDRVLEKLKKTATGWMTTINGKELKVEGQITYYNRYKRQNVVKDLSVELDRLSEESVNNDISSWTKGRSGEALSLLKKRFSHRPVQEKFVCLNCGFETHADEQAALNIARSWLFLRSQEYKKYQTNKTTGNTDKRAFVETWQSFYRKKLKEVWKPAV

SEQ ID NO: 34989 - protein, 978 aa, synthetic construct
  REGION 1..978: note = engineered CasX variant
QEIKRINKIRRRLVKDSNTKKAGKTGPMKTLLVRVMTPDLRERLENLRKKPENIPQPISNTSRANLNKLLTDYTEMKKAILHVYWEEFQKDPVGLMSRVAQPASKKIDQNKLKPEMDEKGNLTTAGFACSQCGQPLFVYKLEQVSEKGKAYTNYFGRCNVAEHEKLILLYQLKPEKDSDEAVTYSLGKFGQRALDFYSIHVTKESTHPVKPLAQIAGNRYASAPVGKALSDACMGTIASFLSKYQDIIIEHQKVVKGNQKRLESLRELAGKENLEYPSVTLPPQPHTKEGVDAYNEVIARVRMWVNLNLWQKLKLSRDDAKPLLRLKGFPSFPLVERQANEVDWWDMVCNVKKLINEKKEDGKVFWQNLAGYKRQEALRPYLSSEEDRKKGKKFARYQLGDLLLHLEKKHGEDWGKVYDEAWERIDKKVEGLSKHIKLEEERRSEDAQSKAALTDWLRAKASFVIEGLKEADKDEFCRCELKLQKWYGDLRGKPFAIEAENSILDISGFSKQYNCAFIWQKDGVKKLNLYLIINYFKGGKLRFKKIKPEAFEANRFYTVINKKSGEIVPMEVNFNFDDPNLIILPLAFGKRQGREFIWNDLLSLETGSLKLANGRVIEKTLYNRRTRQDEPALFVALTFERREVLDSSNIKPMNLIGVDRGENIPAVIALTDPEGCPLSRFKDSLGNPTHILRIGESYKEKQRTIQAKKEVEQRRAGGYSRKYASKAKNLADDMVRNTARDLLYYAVTQDAMLIFENLSRGFGRQGKRTFSAERQYTRMEDWLTAKLAYEGLPSKTYLSKTLAQYTSKTCSNCGFTITSADYDRVLEKLKKTATGWMTTINGKELKVEGQITYYNRYKRQNVVKDLSVELDRLSEESVNNDISSWTKGRSGEALSLLKKRFSHRPVQEKFVCLNCGFETHADEQAALNIARSWLFLRSQEYKKYQTNKTTGNTDKRAFVETWQSFYRKKLKEVWKPAV

SEQ ID NO: 34990 - protein, 978 aa, synthetic construct
  REGION 1..978: note = engineered CasX variant
QEIKRINKIRRRLVKDSNTKKAGKTGPMKTLLVRVMTPDLRERLENLRKKPENIPQPISNTSRANLNKLLTDYTEMKKAILHVYWEEFQKDPVGLMSRVAQPASKKIDQNKLKPEMDEKGNLTTAGFACSQCGQPLFVYKLEQVSEKGKAYTNYFGRCNVAEHEKLILLYQLKPEKDSDEAVTYSLGKFGQRALDFYSIHVTKESTHPVKPLAQIAGNRYASVPVGKALSDACMGTIASFLSKYQDIIIEHQKVVKGNQKRLESLRELAGKENLEYPSVTLPPQPHTKEGVDAYNEVIARVRMWVNLNLWQKLKLSRDDAKPLLRLKGFPSFPLVERQANEVDWWDMVCNVKKLINEKKEDGKVFWQNLAGYKRQEALRPYLSSEEDRKKGKKFARYQLGDLLLHLEKKHGEDWGKVYDEAWERIDKKVEGLSKHIKLEEERRSEDAQSKAALTDWLRAKASFVIEGLKEADKDEFCRCELKLQKWYGDLRGKPFAIEAENSILDISGFSKQYNCAFIWQKDGVKKLNLYLIINYFKGGKLRFKKIKPEAFEANRFYTVINKKSGEIVPMEVNFNFDDPNLIILPLAFGKRQGREFIWNDLLSLETGSLKLANGRVIEKTLYNRRTRQDEPALFVALTFERREVLDSSNIKPMNLIGVDRGENIPAVIALTDPEGCPLSRFKDSLGNPTHILRIGESYKEKQRTIQAKKEVEQRRAGGYSRKYASKAKNLADDMVRNTARDLLYYAVTQDAMLIFENLSRGFGRQGKRTFSAERQYTRMEDWLTAKLAYEGLPSKTYLSKTLAQYTSKTCSNCGFTITSADYDRVLEKLKKTATGWMTTINGKELKVEGQITYYNRYKRQNVVKDLSVELDRLSEESVNNDISSWTKGRSGEALSLLKKRFSHRPVQEKFVCLNCGFETHADEQAALNIARSWLFLRSQEYKKYQTNKTTGNTDKRAFVETWQSFYRKKLKEVWKPAV

SEQ ID NO: 34991 - protein, 978 aa, synthetic construct
  REGION 1..978: note = engineered CasX variant
QEIKRINKIRRRLVKDSNTKKAGKTGPMKTLLVRVMTPDLRERLENLRKKPENIPQPISNTSRANLNKLLTDYTEMKKAILHVYWEEFQKDPVGLMSRVAQPASKKIDQNKLKPEMDEKGNLTTAGFACSQCGQPLFVYKLEQVSEKGKAYTNYFGRCNVAEHEKLIKLYQLKPEKDSDEAVTYSLGKFGQRALDFYSIHVTKESTHPVKPLAQIAGNRYASGPVGKALSDACMGTIASFLSKYQDIIIEHQKVVKGNQKRLESLRELAGKENLEYPSVTLPPQPHTKEGVDAYNEVIARVRMWVNLNLWQKLKLSRDDAKPLLRLKGFPSFPLVERQANEVDWWDMVCNVKKLINEKKEDGKVFWQNLAGYKRQEALRPYLSSEEDRKKGKKFARYQLGDLLLHLEKKHGEDWGKVYDEAWERIDKKVEGLSKHIKLEEERRSEDAQSKAALTDWLRAKASFVIEGLKEADKDEFCRCELKLQKWYGDLRGKPFAIEAENSILDISGFSKQYNCAFIWQKDGVKKLNLYLIINYFKGGKLRFKKIKPEAFEANRFYTVINKKSGEIVPMEVNFNFDDPNLIILPLAFGKRQGREFIWNDLLSLETGSLKLANGRVIEKTLYNRRTRQDEPALFVALTFERREVLDSSNIKPMNLIGVDRGENIPAVIALTDPEGCPLSRFKDSLGNPTHILRIGESYKEKQRTIQAKKEVEQRRAGGYSRKYASKAKNLADDMVRNTARDLLYYAVTQDAMLIFENLSRGFGRQGKRTFSAERQYTRMEDWLTAKLAYEGLPSKTYLSKTLAQYTSKTCSNCGFTITSADYDRVLEKLKKTATGWMTTINGKELKVEGQITYYNRYKRQNVVKDLSVELDRLSEESVNNDISSWTKGRSGEALSLLKKRFSHRPVQEKFVCLNCGFETHADEQAALNIARSWLFLRSQEYKKYQTNKTTGNTDKRAFVETWQSFYRKKLKEVWKPAV

SEQ ID NO: 34992 - protein, 977 aa, synthetic construct
  REGION 1..977: note = engineered CasX variant
QEIKRINKIRRRLVKDSNTKKAGKTGPMKTLLVRVMTPDLRERLENLRKKPENIPQPISNTSRANLNKLLTDYTEMKKAILHVYWEEFQKDPVGLMSRVAQPASKKIDQNKLKPEMDEKGNLTTAGFACSQCGQPLFVYKLEQVSEKGKAYTNYFGRCNVAEHEKLILLYQLKPEKDSDEAVTYSLGKFGQRALDFYSIHVTKESTHPVKPLAQIAGNRYASPVGKALSDACMGTIASFLSKYQDIIIEHQKVVKGNQKRLESLRELAGKENLEYPSVTLPPQPHTKEGVDAYNEVIARVRMWVNLNLWQKLKLSRDDAKPLLRLKGFPSFPLVERQANEVDWWDMVCNVKKLINEKKEDGKVFWQNLAGYKRQEALRPYLSSEEDRKKGKKFARYQLGDLLLHLEKKHGEDWGKVYDEAWERIDKKVEGLSKHIKLEEERRSEDAQSKAALTDWLRAKASFVIEGLKEADKDEFCRCELKLQKWYGDLRGKPFAIEAENSILDISGFSKQYNCAFIWQKDGVKKLNLYLIINYFKGGKLRFKKIKPEAFEANRFYTVINKKSGEIVPMEVNFNFDDPNLIILPLAFGKRQGREFIWNDLLSLETGSLKLANGRVIEKTLYNRRTRQDEPALFVALTFERREVLDSSNIKPMNLIGVDRGENIPAVIALTDPEGCPLSRFKDSLGNPTHILRIGESYKEKQRTIQAKKEVEQRRAGGYSRKYASKAKNLADDMVRNTARDLLYYAVTQDAMLIFENLSRGFGRQGKRTFSAERQYTRMEDWLTAKLAYEGLPSKTYLSKTLAQYTSKTCSNCGFTITSADYDRVLEKLKKTATGWMTTINGKELKVEGQITYYNRYKRQNVVKDLSVELDRLSEESVNNDISSWTKGRSGEALSLLKKRFSHRPVQEKFVCLNCGFETHADEQAALNIARSWLFLRSQEYKKYQTNKTTGNTDKRAFVETWQSFYRKKLKEVWKPAV

SEQ ID NO: 34993 - protein, 978 aa, synthetic construct
  REGION 1..978: note = engineered CasX variant
QEIKRINKIRRRLVKDSNTKKAGKTGPMKTLLVRVMTPDLRERLENLRKKPENIPQPISNTSRANLNKLLTDYTEMKKAILHVYWEEFQKDPVGLMSRVAQPASKKIDQNKLKPEMDEKGNLTTAGFACSQCGQPLFVYKLEQVSEKGKAYTNYFGRCNVAEHEKLILLYQLKPEKDSDEAVTYSLGKFGQRALDFYSIHVTKESTHPVKPLAQIAGNRYASYPVGKALSDACMGTIASFLSKYQDIIIEHQKVVKGNQKRLESLRELAGKENLEYPSVTLPPQPHTKEGVDAYNEVIARVRMWVNLNLWQKLKLSRDDAKPLLRLKGFPSFPLVERQANEVDWWDMVCNVKKLINEKKEDGKVFWQNLAGYKRQEALRPYLSSEEDRKKGKKFARYQLGDLLLHLEKKHGEDWGKVYDEAWERIDKKVEGLSKHIKLEEERRSEDAQSKAALTDWLRAKASFVIEGLKEADKDEFCRCELKLQKWYGDLRGKPFAIEAENSILDISGFSKQYNCAFIWQKDGVKKLNLYLIINYFKGGKLRFKKIKPEAFEANRFYTVINKKSGEIVPMEVNFNFDDPNLIILPLAFGKRQGREFIWNDLLSLETGSLKLANGRVIEKTLYNRRTRQDEPALFVALTFERREVLDSSNIKPMNLIGVDRGENIPAVIALTDPEGCPLSRFKDSLGNPTHILRIGESYKEKQRTIQAKKEVEQRRAGGYSRKYASKAKNLADDMVRNTARDLLYYAVTQDAMLIFENLSRGFGRQGKRTFMAERQYTRMEDWLTAKLAYEGLPSKTYLSKTLAQYTSKTCSNCGFTITSADYDRVLEKLKKTATGWMTTINGKELKVEGQITYYNRYKRQNVVKDLSVELDRLSEESVNNDISSWDKGRSGEALSLLKKRFSHRPVQEKFVCLNCGFETHADEQAALNIARSWLFLRSQEYKKYQTNKTTGNTDKRAFVETWQSFYRKKLKEVWKPAV

SEQ ID NO: 34994 - protein, 978 aa, synthetic construct
  REGION 1..978: note = engineered CasX variant
QEIKRINKIRRRLVKDSNTKKAGKTGPMKTLLVRVMTPDLRERLENLRKKPENIPQPISNTSRANLNKLLTDYTEMKKAILHVYWEEFQKDPVGLMSRVAQPASKKIDQNKLKPEMDEKGNLTTAGFACSQCGQPLFVYKLEQVSEKGKAYTNYFGRCNVAEHEKLILLYQLKPEKDSDEAVTYSLGKFGQRALDFYSIHVTKESTHPVKPLAQIAGNRYASHPVGKALSDACMGTIASFLSKYQDIIIEHQKVVKGNQKRLESLRELAGKENLEYPSVTLPPQPHTKEGVDAYNEVIARVRMWVNLNLWQKLKLSRDDAKPLLRLKGFPSFPLVERQANEVDWWDMVCNVKKLINEKKEDGKVFWQNLAGYKRQEALRPYLSSEEDRKKGKKFARYQLGDLLLHLEKKHGEDWGKVYDEAWERIDKKVEGLSKHIKLEEERRSEDAQSKAALTDWLRAKASFVIEGLKEADKDEFCRCELKLQKWYGDLRGKPFAIEAENSILDISGFSKQYNCAFIWQKDGVKKLNLYLIINYFKGGKLRFKKIKPEAFEANRFYTVINKKSGEIVPMEVNFNFDDPNLIILPLAFGKRQGREFIWNDLLSLETGSLKLANGRVIEKTLYNRRTRQDEPALFVALTFERREVLDSSNIKPMNLIGVDRGENIPAVIALTDPEGCPLSRFKDSLGNPTHILRIGESYKEKQRTIQAKKEVEQRRAGGYSRKYASKAKNLADDMVRNTARDLLYYAVTQDAMLIFENLSRGFGRQGKRTFMAERQYTRMEDWLTAKLAYEGLPSKTYLSKTLAQYTSKTCSNCGFTITSADYDRVLEKLKKTATGWMTTINGKELKVEGQITYYNRYKRQNVVKDLSVELDRLSEESVNNDISSWDKGRSGEALSLLKKRFSHRPVQEKFVCLNCGFETHADEQAALNIARSWLFLRSQEYKKYQTNKTTGNTDKRAFVETWQSFYRKKLKEVWKPAV

SEQ ID NO: 34995 - protein, 978 aa, synthetic construct
  REGION 1..978: note = engineered CasX variant
QEIKRINKIRRRLVKDSNTKKAGKTGPMKTLLVRVMTPDLRERLENLRKKPENIPQPISNTSRANLNKLLTDYTEMKKAILHVYWEEFQKDPVGLMSRVAQPASKKIDQNKLKPEMDEKGNLTTAGFACSQCGQPLFVYKLEQVSEKGKAYTNYFGRCNVAEHEKLILLYQLKPEKDSDEAVTYSLGKFGQRALDFYSIHVTKESTHPVKPLAQIAGNRYASSPVGKALSDACMGTIASFLSKYQDIIIEHQKVVKGNQKRLESLRELAGKENLEYPSVTLPPQPHTKEGVDAYNEVIARVRMWVNLNLWQKLKLSRDDAKPLLRLKGFPSFPLVERQANEVDWWDMVCNVKKLINEKKEDGKVFWQNLAGYKRQEALRPYLSSEEDRKKGKKFARYQLGDLLLHLEKKHGEDWGKVYDEAWERIDKKVEGLSKHIKLEEERRSEDAQSKAALTDWLRAKASFVIEGLKEADKDEFCRCELKLQKWYGDLRGKPFAIEAENSILDISGFSKQYNCAFIWQKDGVKKLNLYLIINYFKGGKLRFKKIKPEAFEANRFYTVINKKSGEIVPMEVNFNFDDPNLIILPLAFGKRQGREFIWNDLLSLETGSLKLANGRVIEKTLYNRRTRQDEPALFVALTFERREVLDSSNIKPMNLIGVDRGENIPAVIALTDPEGCPLSRFKDSLGNPTHILRIGESYKEKQRTIQAKKEVEQRRAGGYSRKYASKAKNLADDMVRNTARDLLYYAVTQDAMLIFENLSRGFGRQGKRTFMAERQYTRMEDWLTAKLAYEGLPSKTYLSKTLAQYTSKTCSNCGFTITSADYDRVLEKLKKTATGWMTTINGKELKVEGQITYYNRYKRQNVVKDLSVELDRLSEESVNNDISSWDKGRSGEALSLLKKRFSHRPVQEKFVCLNCGFETHADEQAALNIARSWLFLRSQEYKKYQTNKTTGNTDKRAFVETWQSFYRKKLKEVWKPAV

SEQ ID NO: 34996 - protein, 978 aa, synthetic construct
  REGION 1..978: note = engineered CasX variant
QEIKRINKIRRRLVKDSNTKKAGKTGPMKTLLVRVMTPDLRERLENLRKKPENIPQPISNTSRANLNKLLTDYTEMKKAILHVYWEEFQKDPVGLMSRVAQPASKKIDQNKLKPEMDEKGNLTTAGFACSQCGQPLFVYKLEQVSEKGKAYTNYFGRCNVAEHEKLILLYQLKPEKDSDEAVTYSLGKFGQRALDFYSIHVTKESTHPVKPLAQIAGNRYASTPVGKALSDACMGTIASFLSKYQDIIIEHQKVVKGNQKRLESLRELAGKENLEYPSVTLPPQPHTKEGVDAYNEVIARVRMWVNLNLWQKLKLSRDDAKPLLRLKGFPSFPLVERQANEVDWWDMVCNVKKLINEKKEDGKVFWQNLAGYKRQEALRPYLSSEEDRKKGKKFARYQLGDLLLHLEKKHGEDWGKVYDEAWERIDKKVEGLSKHIKLEEERRSEDAQSKAALTDWLRAKASFVIEGLKEADKDEFCRCELKLQKWYGDLRGKPFAIEAENSILDISGFSKQYNCAFIWQKDGVKKLNLYLIINYFKGGKLRFKKIKPEAFEANRFYTVINKKSGEIVPMEVNFNFDDPNLIILPLAFGKRQGREFIWNDLLSLETGSLKLANGRVIEKTLYNRRTRQDEPALFVALTFERREVLDSSNIKPMNLIGVDRGENIPAVIALTDPEGCPLSRFKDSLGNPTHILRIGESYKEKQRTIQAKKEVEQRRAGGYSRKYASKAKNLADDMVRNTARDLLYYAVTQDAMLIFENLSRGFGRQGKRTFMAERQYTRMEDWLTAKLAYEGLPSKTYLSKTLAQYTSKTCSNCGFTITSADYDRVLEKLKKTATGWMTTINGKELKVEGQITYYNRYKRQNVVKDLSVELDRLSEESVNNDISSWDKGRSGEALSLLKKRFSHRPVQEKFVCLNCGFETHADEQAALNIARSWLFLRSQEYKKYQTNKTTGNTDKRAFVETWQSFYRKKLKEVWKPAV

SEQ ID NO: 34997 - protein, 978 aa, synthetic construct
  REGION 1..978: note = engineered CasX variant
QEIKRINKIRRRLVKDSNTKKAGKTGPMKTLLVRVMTPDLRERLENLRKKPENIPQPISNTSRANLNKLLTDYTEMKKAILHVYWEEFQKDPVGLMSRVAQPASKKIDQNKLKPEMDEKGNLTTAGFACSQCGQPLFVYKLEQVSEKGKAYTNYFGRCNVAEHEKLILLYQLKPEKDSDEAVTYSLGKFGQRALDFYSIHVTKESTHPVKPLAQIAGNRYASAPVGKALSDACMGTIASFLSKYQDIIIEHQKVVKGNQKRLESLRELAGKENLEYPSVTLPPQPHTKEGVDAYNEVIARVRMWVNLNLWQKLKLSRDDAKPLLRLKGFPSFPLVERQANEVDWWDMVCNVKKLINEKKEDGKVFWQNLAGYKRQEALRPYLSSEEDRKKGKKFARYQLGDLLLHLEKKHGEDWGKVYDEAWERIDKKVEGLSKHIKLEEERRSEDAQSKAALTDWLRAKASFVIEGLKEADKDEFCRCELKLQKWYGDLRGKPFAIEAENSILDISGFSKQYNCAFIWQKDGVKKLNLYLIINYFKGGKLRFKKIKPEAFEANRFYTVINKKSGEIVPMEVNFNFDDPNLIILPLAFGKRQGREFIWNDLLSLETGSLKLANGRVIEKTLYNRRTRQDEPALFVALTFERREVLDSSNIKPMNLIGVDRGENIPAVIALTDPEGCPLSRFKDSLGNPTHILRIGESYKEKQRTIQAKKEVEQRRAGGYSRKYASKAKNLADDMVRNTARDLLYYAVTQDAMLIFENLSRGFGRQGKRTFMAERQYTRMEDWLTAKLAYEGLPSKTYLSKTLAQYTSKTCSNCGFTITSADYDRVLEKLKKTATGWMTTINGKELKVEGQITYYNRYKRQNVVKDLSVELDRLSEESVNNDISSWDKGRSGEALSLLKKRFSHRPVQEKFVCLNCGFETHADEQAALNIARSWLFLRSQEYKKYQTNKTTGNTDKRAFVETWQSFYRKKLKEVWKPAV

SEQ ID NO: 34998 - protein, 978 aa, synthetic construct
  REGION 1..978: note = engineered CasX variant
QEIKRINKIRRRLVKDSNTKKAGKTGPMKTLLVRVMTPDLRERLENLRKKPENIPQPISNTSRANLNKLLTDYTEMKKAILHVYWEEFQKDPVGLMSRVAQPASKKIDQNKLKPEMDEKGNLTTAGFACSQCGQPLFVYKLEQVSEKGKAYTNYFGRCNVAEHEKLILLYQLKPEKDSDEAVTYSLGKFGQRALDFYSIHVTKESTHPVKPLAQIAGNRYASVPVGKALSDACMGTIASFLSKYQDIIIEHQKVVKGNQKRLESLRELAGKENLEYPSVTLPPQPHTKEGVDAYNEVIARVRMWVNLNLWQKLKLSRDDAKPLLRLKGFPSFPLVERQANEVDWWDMVCNVKKLINEKKEDGKVFWQNLAGYKRQEALRPYLSSEEDRKKGKKFARYQLGDLLLHLEKKHGEDWGKVYDEAWERIDKKVEGLSKHIKLEEERRSEDAQSKAALTDWLRAKASFVIEGLKEADKDEFCRCELKLQKWYGDLRGKPFAIEAENSILDISGFSKQYNCAFIWQKDGVKKLNLYLIINYFKGGKLRFKKIKPEAFEANRFYTVINKKSGEIVPMEVNFNFDDPNLIILPLAFGKRQGREFIWNDLLSLETGSLKLANGRVIEKTLYNRRTRQDEPALFVALTFERREVLDSSNIKPMNLIGVDRGENIPAVIALTDPEGCPLSRFKDSLGNPTHILRIGESYKEKQRTIQAKKEVEQRRAGGYSRKYASKAKNLADDMVRNTARDLLYYAVTQDAMLIFENLSRGFGRQGKRTFMAERQYTRMEDWLTAKLAYEGLPSKTYLSKTLAQYTSKTCSNCGFTITSADYDRVLEKLKKTATGWMTTINGKELKVEGQITYYNRYKRQNVVKDLSVELDRLSEESVNNDISSWDKGRSGEALSLLKKRFSHRPVQEKFVCLNCGFETHADEQAALNIARSWLFLRSQEYKKYQTNKTTGNTDKRAFVETWQSFYRKKLKEVWKPAV

SEQ ID NO: 34999 - protein, 978 aa, synthetic construct
  REGION 1..978: note = engineered CasX variant
QEIKRINKIRRRLVKDSNTKKAGKTGPMKTLLVRVMTPDLRERLENLRKKPENIPQPISNTSRANLNKLLTDYTEMKKAILHVYWEEFQKDPVGLMSRVAQPASKKIDQNKLKPEMDEKGNLTTAGFACSQCGQPLFVYKLEQVSEKGKAYTNYFGRCNVAEHEKLIKLYQLKPEKDSDEAVTYSLGKFGQRALDFYSIHVTKESTHPVKPLAQIAGNRYASGPVGKALSDACMGTIASFLSKYQDIIIEHQKVVKGNQKRLESLRELAGKENLEYPSVTLPPQPHTKEGVDAYNEVIARVRMWVNLNLWQKLKLSRDDAKPLLRLKGFPSFPLVERQANEVDWWDMVCNVKKLINEKKEDGKVFWQNLAGYKRQEALRPYLSSEEDRKKGKKFARYQLGDLLLHLEKKHGEDWGKVYDEAWERIDKKVEGLSKHIKLEEERRSEDAQSKAALTDWLRAKASFVIEGLKEADKDEFCRCELKLQKWYGDLRGKPFAIEAENSILDISGFSKQYNCAFIWQKDGVKKLNLYLIINYFKGGKLRFKKIKPEAFEANRFYTVINKKSGEIVPMEVNFNFDDPNLIILPLAFGKRQGREFIWNDLLSLETGSLKLANGRVIEKTLYNRRTRQDEPALFVALTFERREVLDSSNIKPMNLIGVDRGENIPAVIALTDPEGCPLSRFKDSLGNPTHILRIGESYKEKQRTIQAKKEVEQRRAGGYSRKYASKAKNLADDMVRNTARDLLYYAVTQDAMLIFENLSRGFGRQGKRTFMAERQYTRMEDWLTAKLAYEGLPSKTYLSKTLAQYTSKTCSNCGFTITSADYDRVLEKLKKTATGWMTTINGKELKVEGQITYYNRYKRQNVVKDLSVELDRLSEESVNNDISSWDKGRSGEALSLLKKRFSHRPVQEKFVCLNCGFETHADEQAALNIARSWLFLRSQEYKKYQTNKTTGNTDKRAFVETWQSFYRKKLKEVWKPAV

SEQ ID NO: 35000 - protein, 977 aa, synthetic construct
  REGION 1..977: note = engineered CasX variant
QEIKRINKIRRRLVKDSNTKKAGKTGPMKTLLVRVMTPDLRERLENLRKKPENIPQPISNTSRANLNKLLTDYTEMKKAILHVYWEEFQKDPVGLMSRVAQPASKKIDQNKLKPEMDEKGNLTTAGFACSQCGQPLFVYKLEQVSEKGKAYTNYFGRCNVAEHEKLILLYQLKPEKDSDEAVTYSLGKFGQRALDFYSIHVTKESTHPVKPLAQIAGNRYASPVGKALSDACMGTIASFLSKYQDIIIEHQKVVKGNQKRLESLRELAGKENLEYPSVTLPPQPHTKEGVDAYNEVIARVRMWVNLNLWQKLKLSRDDAKPLLRLKGFPSFPLVERQANEVDWWDMVCNVKKLINEKKEDGKVFWQNLAGYKRQEALRPYLSSEEDRKKGKKFARYQLGDLLLHLEKKHGEDWGKVYDEAWERIDKKVEGLSKHIKLEEERRSEDAQSKAALTDWLRAKASFVIEGLKEADKDEFCRCELKLQKWYGDLRGKPFAIEAENSILDISGFSKQYNCAFIWQKDGVKKLNLYLIINYFKGGKLRFKKIKPEAFEANRFYTVINKKSGEIVPMEVNFNFDDPNLIILPLAFGKRQGREFIWNDLLSLETGSLKLANGRVIEKTLYNRRTRQDEPALFVALTFERREVLDSSNIKPMNLIGVDRGENIPAVIALTDPEGCPLSRFKDSLGNPTHILRIGESYKEKQRTIQAKKEVEQRRAGGYSRKYASKAKNLADDMVRNTARDLLYYAVTQDAMLIFENLSRGFGRQGKRTFMAERQYTRMEDWLTAKLAYEGLPSKTYLSKTLAQYTSKTCSNCGFTITSADYDRVLEKLKKTATGWMTTINGKELKVEGQITYYNRYKRQNVVKDLSVELDRLSEESVNNDISSWDKGRSGEALSLLKKRFSHRPVQEKFVCLNCGFETHADEQAALNIARSWLFLRSQEYKKYQTNKTTGNTDKRAFVETWQSFYRKKLKEVWKPAV

SEQ ID NO: 35001 - protein, 978 aa, synthetic construct
  REGION 1..978: note = engineered CasX variant
QEIKRINKIRRRLVKDSNTKKAGKTGPMKTLLVRVMTPDLRERLENLRKKPENIPQPISNTSRANLNKLLTDYTEMKKAILHVYWEEFQVDPVGLMSRVAQPASKKIDQNKLKPEMDEKGNLTTAGFACSQCGQPLFVYKLEQVSEKGKAYTNYFGRCNVAEHEKLILLYQLKPEKDSDEAVTYSLGKFGQRALDFYSIHVTKESTHPVKPLAQIAGNRYASYPVGKALSDACMGTIASFLSKYQDIIIEHQKVVKGNQKRLESLRELAGKENLEYPSVTLPPQPHTKEGVDAYNEVIARVRMWVNLNLWQKLKLSRDDAKPLLRLKGFPSFPLVERQANEVDWWDMVCNVKKLINEKKEDGKVFWQNLAGYKRQEALRPYLSSEEDRKKGKKFARYQLGDLLLHLEKKHGEDWGKVYDEAWERIDKKVEGLSKHIKLEEERRSEDAQSKAALTDWLRAKASFVIEGLKEADKDEFCRCELKLQKWYGDLRGKPFAIEAENSILDISGFSKQYNCAFIWQKDGVKKLNLYLIINYFKGGKLRFKKIKPEAFEANRFYTVINKKSGEIVPMEVNFNFDDPNLIILPLAFGKRQGREFIWNDLLSLETGSLKLANGRVIEKTLYNRRTRQDEPALFVALTFERREVLDSSNIKPMNLIGVDRGENIPAVIALTDPEGCPLSRFKDSLGNPTHILRIGESYKEKQRTIQAKKEVEQRRAGGYSRKYASKAKNLADDMVRNTARDLLYYAVTQDAMLIFENLSRGFGRQGKRTFMAERQYTRMEDWLTAKLAYEGLPSKTYLSKTLAQYTSKTCSNCGFTITSADYDRVLEKLKKTATGWMTTINGKELKVEGQITYYNRYKRQNVVKDLSVELDRLSEESVNNDISSWTKGRSGEALSLLKKRFSHRPVQEKFVCLNCGFETHADEQAALNIARSWLFLRSQEYKKYQTNKTTGNTDKRAFVETWQSFYRKKLKEVWKPAV

SEQ ID NO: 35002 - protein, 978 aa, synthetic construct
  REGION 1..978: note = engineered CasX variant
QEIKRINKIRRRLVKDSNTKKAGKTGPMKTLLVRVMTPDLRERLENLRKKPENIPQPISNTSRANLNKLLTDYTEMKKAILHVYWEEFQVDPVGLMSRVAQPASKKIDQNKLKPEMDEKGNLTTAGFACSQCGQPLFVYKLEQVSEKGKAYTNYFGRCNVAEHEKLILLYQLKPEKDSDEAVTYSLGKFGQRALDFYSIHVTKESTHPVKPLAQIAGNRYASHPVGKALSDACMGTIASFLSKYQDIIIEHQKVVKGNQKRLESLRELAGKENLEYPSVTLPPQPHTKEGVDAYNEVIARVRMWVNLNLWQKLKLSRDDAKPLLRLKGFPSFPLVERQANEVDWWDMVCNVKKLINEKKEDGKVFWQNLAGYKRQEALRPYLSSEEDRKKGKKFARYQLGDLLLHLEKKHGEDWGKVYDEAWERIDKKVEGLSKHIKLEEERRSEDAQSKAALTDWLRAKASFVIEGLKEADKDEFCRCELKLQKWYGDLRGKPFAIEAENSILDISGFSKQYNCAFIWQKDGVKKLNLYLIINYFKGGKLRFKKIKPEAFEANRFYTVINKKSGEIVPMEVNFNFDDPNLIILPLAFGKRQGREFIWNDLLSLETGSLKLANGRVIEKTLYNRRTRQDEPALFVALTFERREVLDSSNIKPMNLIGVDRGENIPAVIALTDPEGCPLSRFKDSLGNPTHILRIGESYKEKQRTIQAKKEVEQRRAGGYSRKYASKAKNLADDMVRNTARDLLYYAVTQDAMLIFENLSRGFGRQGKRTFMAERQYTRMEDWLTAKLAYEGLPSKTYLSKTLAQYTSKTCSNCGFTITSADYDRVLEKLKKTATGWMTTINGKELKVEGQITYYNRYKRQNVVKDLSVELDRLSEESVNNDISSWTKGRSGEALSLLKKRFSHRPVQEKFVCLNCGFETHADEQAALNIARSWLFLRSQEYKKYQTNKTTGNTDKRAFVETWQSFYRKKLKEVWKPAV

SEQ ID NO: 35003 - protein, 978 aa, synthetic construct
  REGION 1..978: note = engineered CasX variant
QEIKRINKIRRRLVKDSNTKKAGKTGPMKTLLVRVMTPDLRERLENLRKKPENIPQPISNTSRANLNKLLTDYTEMKKAILHVYWEEFQVDPVGLMSRVAQPASKKIDQNKLKPEMDEKGNLTTAGFACSQCGQPLFVYKLEQVSEKGKAYTNYFGRCNVAEHEKLILLYQLKPEKDSDEAVTYSLGKFGQRALDFYSIHVTKESTHPVKPLAQIAGNRYASSPVGKALSDACMGTIASFLSKYQDIIIEHQKVVKGNQKRLESLRELAGKENLEYPSVTLPPQPHTKEGVDAYNEVIARVRMWVNLNLWQKLKLSRDDAKPLLRLKGFPSFPLVERQANEVDWWDMVCNVKKLINEKKEDGKVFWQNLAGYKRQEALRPYLSSEEDRKKGKKFARYQLGDLLLHLEKKHGEDWGKVYDEAWERIDKKVEGLSKHIKLEEERRSEDAQSKAALTDWLRAKASFVIEGLKEADKDEFCRCELKLQKWYGDLRGKPFAIEAENSILDISGFSKQYNCAFIWQKDGVKKLNLYLIINYFKGGKLRFKKIKPEAFEANRFYTVINKKSGEIVPMEVNFNFDDPNLIILPLAFGKRQGREFIWNDLLSLETGSLKLANGRVIEKTLYNRRTRQDEPALFVALTFERREVLDSSNIKPMNLIGVDRGENIPAVIALTDPEGCPLSRFKDSLGNPTHILRIGESYKEKQRTIQAKKEVEQRRAGGYSRKYASKAKNLADDMVRNTARDLLYYAVTQDAMLIFENLSRGFGRQGKRTFMAERQYTRMEDWLTAKLAYEGLPSKTYLSKTLAQYTSKTCSNCGFTITSADYDRVLEKLKKTATGWMTTINGKELKVEGQITYYNRYKRQNVVKDLSVELDRLSEESVNNDISSWTKGRSGEALSLLKKRFSHRPVQEKFVCLNCGFETHADEQAALNIARSWLFLRSQEYKKYQTNKTTGNTDKRAFVETWQSFYRKKLKEVWKPAV

SEQ ID NO: 35004 - protein, 978 aa, synthetic construct
  REGION 1..978: note = engineered CasX variant
QEIKRINKIRRRLVKDSNTKKAGKTGPMKTLLVRVMTPDLRERLENLRKKPENIPQPISNTSRANLNKLLTDYTEMKKAILHVYWEEFQVDPVGLMSRVAQPASKKIDQNKLKPEMDEKGNLTTAGFACSQCGQPLFVYKLEQVSEKGKAYTNYFGRCNVAEHEKLILLYQLKPEKDSDEAVTYSLGKFGQRALDFYSIHVTKESTHPVKPLAQIAGNRYASTPVGKALSDACMGTIASFLSKYQDIIIEHQKVVKGNQKRLESLRELAGKENLEYPSVTLPPQPHTKEGVDAYNEVIARVRMWVNLNLWQKLKLSRDDAKPLLRLKGFPSFPLVERQANEVDWWDMVCNVKKLINEKKEDGKVFWQNLAGYKRQEALRPYLSSEEDRKKGKKFARYQLGDLLLHLEKKHGEDWGKVYDEAWERIDKKVEGLSKHIKLEEERRSEDAQSKAALTDWLRAKASFVIEGLKEADKDEFCRCELKLQKWYGDLRGKPFAIEAENSILDISGFSKQYNCAFIWQKDGVKKLNLYLIINYFKGGKLRFKKIKPEAFEANRFYTVINKKSGEIVPMEVNFNFDDPNLIILPLAFGKRQGREFIWNDLLSLETGSLKLANGRVIEKTLYNRRTRQDEPALFVALTFERREVLDSSNIKPMNLIGVDRGENIPAVIALTDPEGCPLSRFKDSLGNPTHILRIGESYKEKQRTIQAKKEVEQRRAGGYSRKYASKAKNLADDMVRNTARDLLYYAVTQDAMLIFENLSRGFGRQGKRTFMAERQYTRMEDWLTAKLAYEGLPSKTYLSKTLAQYTSKTCSNCGFTITSADYDRVLEKLKKTATGWMTTINGKELKVEGQITYYNRYKRQNVVKDLSVELDRLSEESVNNDISSWTKGRSGEALSLLKKRFSHRPVQEKFVCLNCGFETHADEQAALNIARSWLFLRSQEYKKYQTNKTTGNTDKRAFVETWQSFYRKKLKEVWKPAV

SEQ ID NO: 35005 - protein, 978 aa, synthetic construct
  REGION 1..978: note = engineered CasX variant
QEIKRINKIRRRLVKDSNTKKAGKTGPMKTLLVRVMTPDLRERLENLRKKPENIPQPISNTSRANLNKLLTDYTEMKKAILHVYWEEFQVDPVGLMSRVAQPASKKIDQNKLKPEMDEKGNLTTAGFACSQCGQPLFVYKLEQVSEKGKAYTNYFGRCNVAEHEKLILLYQLKPEKDSDEAVTYSLGKFGQRALDFYSIHVTKESTHPVKPLAQIAGNRYASAPVGKALSDACMGTIASFLSKYQDIIIEHQKVVKGNQKRLESLRELAGKENLEYPSVTLPPQPHTKEGVDAYNEVIARVRMWVNLNLWQKLKLSRDDAKPLLRLKGFPSFPLVERQANEVDWWDMVCNVKKLINEKKEDGKVFWQNLAGYKRQEALRPYLSSEEDRKKGKKFARYQLGDLLLHLEKKHGEDWGKVYDEAWERIDKKVEGLSKHIKLEEERRSEDAQSKAALTDWLRAKASFVIEGLKEADKDEFCRCELKLQKWYGDLRGKPFAIEAENSILDISGFSKQYNCAFIWQKDGVKKLNLYLIINYFKGGKLRFKKIKPEAFEANRFYTVINKKSGEIVPMEVNFNFDDPNLIILPLAFGKRQGREFIWNDLLSLETGSLKLANGRVIEKTLYNRRTRQDEPALFVALTFERREVLDSSNIKPMNLIGVDRGENIPAVIALTDPEGCPLSRFKDSLGNPTHILRIGESYKEKQRTIQAKKEVEQRRAGGYSRKYASKAKNLADDMVRNTARDLLYYAVTQDAMLIFENLSRGFGRQGKRTFMAERQYTRMEDWLTAKLAYEGLPSKTYLSKTLAQYTSKTCSNCGFTITSADYDRVLEKLKKTATGWMTTINGKELKVEGQITYYNRYKRQNVVKDLSVELDRLSEESVNNDISSWTKGRSGEALSLLKKRFSHRPVQEKFVCLNCGFETHADEQAALNIARSWLFLRSQEYKKYQTNKTTGNTDKRAFVETWQSFYRKKLKEVWKPAV

SEQ ID NO: 35006 - protein, 978 aa, synthetic construct
  REGION 1..978: note = engineered CasX variant
QEIKRINKIRRRLVKDSNTKKAGKTGPMKTLLVRVMTPDLRERLENLRKKPENIPQPISNTSRANLNKLLTDYTEMKKAILHVYWEEFQVDPVGLMSRVAQPASKKIDQNKLKPEMDEKGNLTTAGFACSQCGQPLFVYKLEQVSEKGKAYTNYFGRCNVAEHEKLILLYQLKPEKDSDEAVTYSLGKFGQRALDFYSIHVTKESTHPVKPLAQIAGNRYASVPVGKALSDACMGTIASFLSKYQDIIIEHQKVVKGNQKRLESLRELAGKENLEYPSVTLPPQPHTKEGVDAYNEVIARVRMWVNLNLWQKLKLSRDDAKPLLRLKGFPSFPLVERQANEVDWWDMVCNVKKLINEKKEDGKVFWQNLAGYKRQEALRPYLSSEEDRKKGKKFARYQLGDLLLHLEKKHGEDWGKVYDEAWERIDKKVEGLSKHIKLEEERRSEDAQSKAALTDWLRAKASFVIEGLKEADKDEFCRCELKLQKWYGDLRGKPFAIEAENSILDISGFSKQYNCAFIWQKDGVKKLNLYLIINYFKGGKLRFKKIKPEAFEANRFYTVINKKSGEIVPMEVNFNFDDPNLIILPLAFGKRQGREFIWNDLLSLETGSLKLANGRVIEKTLYNRRTRQDEPALFVALTFERREVLDSSNIKPMNLIGVDRGENIPAVIALTDPEGCPLSRFKDSLGNPTHILRIGESYKEKQRTIQAKKEVEQRRAGGYSRKYASKAKNLADDMVRNTARDLLYYAVTQDAMLIFENLSRGFGRQGKRTFMAERQYTRMEDWLTAKLAYEGLPSKTYLSKTLAQYTSKTCSNCGFTITSADYDRVLEKLKKTATGWMTTINGKELKVEGQITYYNRYKRQNVVKDLSVELDRLSEESVNNDISSWTKGRSGEALSLLKKRFSHRPVQEKFVCLNCGFETHADEQAALNIARSWLFLRSQEYKKYQTNKTTGNTDKRAFVETWQSFYRKKLKEVWKPAV

SEQ ID NO: 35007 - protein, 978 aa, synthetic construct
  REGION 1..978: note = engineered CasX variant
QEIKRINKIRRRLVKDSNTKKAGKTGPMKTLLVRVMTPDLRERLENLRKKPENIPQPISNTSRANLNKLLTDYTEMKKAILHVYWEEFQVDPVGLMSRVAQPASKKIDQNKLKPEMDEKGNLTTAGFACSQCGQPLFVYKLEQVSEKGKAYTNYFGRCNVAEHEKLIKLYQLKPEKDSDEAVTYSLGKFGQRALDFYSIHVTKESTHPVKPLAQIAGNRYASGPVGKALSDACMGTIASFLSKYQDIIIEHQKVVKGNQKRLESLRELAGKENLEYPSVTLPPQPHTKEGVDAYNEVIARVRMWVNLNLWQKLKLSRDDAKPLLRLKGFPSFPLVERQANEVDWWDMVCNVKKLINEKKEDGKVFWQNLAGYKRQEALRPYLSSEEDRKKGKKFARYQLGDLLLHLEKKHGEDWGKVYDEAWERIDKKVEGLSKHIKLEEERRSEDAQSKAALTDWLRAKASFVIEGLKEADKDEFCRCELKLQKWYGDLRGKPFAIEAENSILDISGFSKQYNCAFIWQKDGVKKLNLYLIINYFKGGKLRFKKIKPEAFEANRFYTVINKKSGEIVPMEVNFNFDDPNLIILPLAFGKRQGREFIWNDLLSLETGSLKLANGRVIEKTLYNRRTRQDEPALFVALTFERREVLDSSNIKPMNLIGVDRGENIPAVIALTDPEGCPLSRFKDSLGNPTHILRIGESYKEKQRTIQAKKEVEQRRAGGYSRKYASKAKNLADDMVRNTARDLLYYAVTQDAMLIFENLSRGFGRQGKRTFMAERQYTRMEDWLTAKLAYEGLPSKTYLSKTLAQYTSKTCSNCGFTITSADYDRVLEKLKKTATGWMTTINGKELKVEGQITYYNRYKRQNVVKDLSVELDRLSEESVNNDISSWTKGRSGEALSLLKKRFSHRPVQEKFVCLNCGFETHADEQAALNIARSWLFLRSQEYKKYQTNKTTGNTDKRAFVETWQSFYRKKLKEVWKPAV

SEQ ID NO: 35008 - protein, 977 aa, synthetic construct
  REGION 1..977: note = engineered CasX variant
QEIKRINKIRRRLVKDSNTKKAGKTGPMKTLLVRVMTPDLRERLENLRKKPENIPQPISNTSRANLNKLLTDYTEMKKAILHVYWEEFQVDPVGLMSRVAQPASKKIDQNKLKPEMDEKGNLTTAGFACSQCGQPLFVYKLEQVSEKGKAYTNYFGRCNVAEHEKLILLYQLKPEKDSDEAVTYSLGKFGQRALDFYSIHVTKESTHPVKPLAQIAGNRYASPVGKALSDACMGTIASFLSKYQDIIIEHQKVVKGNQKRLESLRELAGKENLEYPSVTLPPQPHTKEGVDAYNEVIARVRMWVNLNLWQKLKLSRDDAKPLLRLKGFPSFPLVERQANEVDWWDMVCNVKKLINEKKEDGKVFWQNLAGYKRQEALRPYLSSEEDRKKGKKFARYQLGDLLLHLEKKHGEDWGKVYDEAWERIDKKVEGLSKHIKLEEERRSEDAQSKAALTDWLRAKASFVIEGLKEADKDEFCRCELKLQKWYGDLRGKPFAIEAENSILDISGFSKQYNCAFIWQKDGVKKLNLYLIINYFKGGKLRFKKIKPEAFEANRFYTVINKKSGEIVPMEVNFNFDDPNLIILPLAFGKRQGREFIWNDLLSLETGSLKLANGRVIEKTLYNRRTRQDEPALFVALTFERREVLDSSNIKPMNLIGVDRGENIPAVIALTDPEGCPLSRFKDSLGNPTHILRIGESYKEKQRTIQAKKEVEQRRAGGYSRKYASKAKNLADDMVRNTARDLLYYAVTQDAMLIFENLSRGFGRQGKRTFMAERQYTRMEDWLTAKLAYEGLPSKTYLSKTLAQYTSKTCSNCGFTITSADYDRVLEKLKKTATGWMTTINGKELKVEGQITYYNRYKRQNVVKDLSVELDRLSEESVNNDISSWTKGRSGEALSLLKKRFSHRPVQEKFVCLNCGFETHADEQAALNIARSWLFLRSQEYKKYQTNKTTGNTDKRAFVETWQSFYRKKLKEVWKPAV

SEQ ID NO: 35009 - protein, 978 aa, synthetic construct
  REGION 1..978: note = engineered CasX variant
QEIKRLNKIRRRLVKDSNTKKAGKTGPMKTLLVRVMTPDLRERLENLRKKPENIPQPISNTSRANLNKLLTDYTEMKKAILHVYWEEFQKDPVGLMSRVAQPASKKIDQNKLKPEMDEKGNLTTAGFACSQCGQPLFVYKLEQVSEKGKAYTNYFGRCNVAEHEKLILLYQLKPEKDSDEAVTYSLGKFGQRALDFYSIHVTKESTHPVKPLAQIAGNRYASYPVGKALSDACMGTIASFLSKYQDIIIEHQKVVKGNQKRLESLRELAGKENLEYPSVTLPPQPHTKEGVDAYNEVIARVRMWVNLNLWQKLKLSRDDAKPLLRLKGFPSFPLVERQANEVDWWDMVCNVKKLINEKKEDGKVFWQNLAGYKRQEALRPYLSSEEDRKKGKKFARYQLGDLLLHLEKKHGEDWGKVYDEAWERIDKKVEGLSKHIKLEEERRSEDAQSKAALTDWLRAKASFVIEGLKEADKDEFCRCELKLQKWYGDLRGKPFAIEAENSILDISGFSKQYNCAFIWQKDGVKKLNLYLIINYFKGGKLRFKKIKPEAFEANRFYTVINKKSGEIVPMEVNFNFDDPNLIILPLAFGKRQGREFIWNDLLSLETGSLKLANGRVIEKTLYNRRTRQDEPALFVALTFERREVLDSSNIKPMNLIGVDRGENIPAVIALTDPEGCPLSRFKDSLGNPTHILRIGESYKEKQRTIQAKKEVEQRRAGGYSRKYASKAKNLADDMVRNTARDLLYYAVTQDAMLIFENLSRGFGRQGKRTFMAERQYTRMEDWLTAKLAYEGLPSKTYLSKTLAQYTSKTCSNCGFTITSADYDRVLEKLKKTATGWMTTINGKELKVEGQITYYNRYKRQNVVKDLSVELDRLSEESVNNDISSWTKGRSGEALSLLKKRFSHRPVQEKFVCLNCGFETHADEQAALNIARSWLFLRSQEYKKYQTNKTTGNTDKRAFVETWQSFYRKKLKEVWKPAV

SEQ ID NO: 35010 - protein, 978 aa, synthetic construct
  REGION 1..978: note = engineered CasX variant
QEIKRLNKIRRRLVKDSNTKKAGKTGPMKTLLVRVMTPDLRERLENLRKKPENIPQPISNTSRANLNKLLTDYTEMKKAILHVYWEEFQKDPVGLMSRVAQPASKKIDQNKLKPEMDEKGNLTTAGFACSQCGQPLFVYKLEQVSEKGKAYTNYFGRCNVAEHEKLILLYQLKPEKDSDEAVTYSLGKFGQRALDFYSIHVTKESTHPVKPLAQIAGNRYASHPVGKALSDACMGTIASFLSKYQDIIIEHQKVVKGNQKRLESLRELAGKENLEYPSVTLPPQPHTKEGVDAYNEVIARVRMWVNLNLWQKLKLSRDDAKPLLRLKGFPSFPLVERQANEVDWWDMVCNVKKLINEKKEDGKVFWQNLAGYKRQEALRPYLSSEEDRKKGKKFARYQLGDLLLHLEKKHGEDWGKVYDEAWERIDKKVEGLSKHIKLEEERRSEDAQSKAALTDWLRAKASFVIEGLKEADKDEFCRCELKLQKWYGDLRGKPFAIEAENSILDISGFSKQYNCAFIWQKDGVKKLNLYLIINYFKGGKLRFKKIKPEAFEANRFYTVINKKSGEIVPMEVNFNFDDPNLIILPLAFGKRQGREFIWNDLLSLETGSLKLANGRVIEKTLYNRRTRQDEPALFVALTFERREVLDSSNIKPMNLIGVDRGENIPAVIALTDPEGCPLSRFKDSLGNPTHILRIGESYKEKQRTIQAKKEVEQRRAGGYSRKYASKAKNLADDMVRNTARDLLYYAVTQDAMLIFENLSRGFGRQGKRTFMAERQYTRMEDWLTAKLAYEGLPSKTYLSKTLAQYTSKTCSNCGFTITSADYDRVLEKLKKTATGWMTTINGKELKVEGQITYYNRYKRQNVVKDLSVELDRLSEESVNNDISSWTKGRSGEALSLLKKRFSHRPVQEKFVCLNCGFETHADEQAALNIARSWLFLRSQEYKKYQTNKTTGNTDKRAFVETWQSFYRKKLKEVWKPAV

SEQ ID NO: 35011 - protein, 978 aa, synthetic construct
  REGION 1..978: note = engineered CasX variant
QEIKRLNKIRRRLVKDSNTKKAGKTGPMKTLLVRVMTPDLRERLENLRKKPENIPQPISNTSRANLNKLLTDYTEMKKAILHVYWEEFQKDPVGLMSRVAQPASKKIDQNKLKPEMDEKGNLTTAGFACSQCGQPLFVYKLEQVSEKGKAYTNYFGRCNVAEHEKLILLYQLKPEKDSDEAVTYSLGKFGQRALDFYSIHVTKESTHPVKPLAQIAGNRYASSPVGKALSDACMGTIASFLSKYQDIIIEHQKVVKGNQKRLESLRELAGKENLEYPSVTLPPQPHTKEGVDAYNEVIARVRMWVNLNLWQKLKLSRDDAKPLLRLKGFPSFPLVERQANEVDWWDMVCNVKKLINEKKEDGKVFWQNLAGYKRQEALRPYLSSEEDRKKGKKFARYQLGDLLLHLEKKHGEDWGKVYDEAWERIDKKVEGLSKHIKLEEERRSEDAQSKAALTDWLRAKASFVIEGLKEADKDEFCRCELKLQKWYGDLRGKPFAIEAENSILDISGFSKQYNCAFIWQKDGVKKLNLYLIINYFKGGKLRFKKIKPEAFEANRFYTVINKKSGEIVPMEVNFNFDDPNLIILPLAFGKRQGREFIWNDLLSLETGSLKLANGRVIEKTLYNRRTRQDEPALFVALTFERREVLDSSNIKPMNLIGVDRGENIPAVIALTDPEGCPLSRFKDSLGNPTHILRIGESYKEKQRTIQAKKEVEQRRAGGYSRKYASKAKNLADDMVRNTARDLLYYAVTQDAMLIFENLSRGFGRQGKRTFMAERQYTRMEDWLTAKLAYEGLPSKTYLSKTLAQYTSKTCSNCGFTITSADYDRVLEKLKKTATGWMTTINGKELKVEGQITYYNRYKRQNVVKDLSVELDRLSEESVNNDISSWTKGRSGEALSLLKKRFSHRPVQEKFVCLNCGFETHADEQAALNIARSWLFLRSQEYKKYQTNKTTGNTDKRAFVETWQSFYRKKLKEVWKPAV

SEQ ID NO: 35012 - protein, 978 aa, synthetic construct
  REGION 1..978: note = engineered CasX variant
QEIKRLNKIRRRLVKDSNTKKAGKTGPMKTLLVRVMTPDLRERLENLRKKPENIPQPISNTSRANLNKLLTDYTEMKKAILHVYWEEFQKDPVGLMSRVAQPASKKIDQNKLKPEMDEKGNLTTAGFACSQCGQPLFVYKLEQVSEKGKAYTNYFGRCNVAEHEKLILLYQLKPEKDSDEAVTYSLGKFGQRALDFYSIHVTKESTHPVKPLAQIAGNRYASTPVGKALSDACMGTIASFLSKYQDIIIEHQKVVKGNQKRLESLRELAGKENLEYPSVTLPPQPHTKEGVDAYNEVIARVRMWVNLNLWQKLKLSRDDAKPLLRLKGFPSFPLVERQANEVDWWDMVCNVKKLINEKKEDGKVFWQNLAGYKRQEALRPYLSSEEDRKKGKKFARYQLGDLLLHLEKKHGEDWGKVYDEAWERIDKKVEGLSKHIKLEEERRSEDAQSKAALTDWLRAKASFVIEGLKEADKDEFCRCELKLQKWYGDLRGKPFAIEAENSILDISGFSKQYNCAFIWQKDGVKKLNLYLIINYFKGGKLRFKKIKPEAFEANRFYTVINKKSGEIVPMEVNFNFDDPNLIILPLAFGKRQGREFIWNDLLSLETGSLKLANGRVIEKTLYNRRTRQDEPALFVALTFERREVLDSSNIKPMNLIGVDRGENIPAVIALTDPEGCPLSRFKDSLGNPTHILRIGESYKEKQRTIQAKKEVEQRRAGGYSRKYASKAKNLADDMVRNTARDLLYYAVTQDAMLIFENLSRGFGRQGKRTFMAERQYTRMEDWLTAKLAYEGLPSKTYLSKTLAQYTSKTCSNCGFTITSADYDRVLEKLKKTATGWMTTINGKELKVEGQITYYNRYKRQNVVKDLSVELDRLSEESVNNDISSWTKGRSGEALSLLKKRFSHRPVQEKFVCLNCGFETHADEQAALNIARSWLFLRSQEYKKYQTNKTTGNTDKRAFVETWQSFYRKKLKEVWKPAV

SEQ ID NO: 35013 - protein, 978 aa, synthetic construct
  REGION 1..978: note = engineered CasX variant
QEIKRLNKIRRRLVKDSNTKKAGKTGPMKTLLVRVMTPDLRERLENLRKKPENIPQPISNTSRANLNKLLTDYTEMKKAILHVYWEEFQKDPVGLMSRVAQPASKKIDQNKLKPEMDEKGNLTTAGFACSQCGQPLFVYKLEQVSEKGKAYTNYFGRCNVAEHEKLILLYQLKPEKDSDEAVTYSLGKFGQRALDFYSIHVTKESTHPVKPLAQIAGNRYASAPVGKALSDACMGTIASFLSKYQDIIIEHQKVVKGNQKRLESLRELAGKENLEYPSVTLPPQPHTKEGVDAYNEVIARVRMWVNLNLWQKLKLSRDDAKPLLRLKGFPSFPLVERQANEVDWWDMVCNVKKLINEKKEDGKVFWQNLAGYKRQEALRPYLSSEEDRKKGKKFARYQLGDLLLHLEKKHGEDWGKVYDEAWERIDKKVEGLSKHIKLEEERRSEDAQSKAALTDWLRAKASFVIEGLKEADKDEFCRCELKLQKWYGDLRGKPFAIEAENSILDISGFSKQYNCAFIWQKDGVKKLNLYLIINYFKGGKLRFKKIKPEAFEANRFYTVINKKSGEIVPMEVNFNFDDPNLIILPLAFGKRQGREFIWNDLLSLETGSLKLANGRVIEKTLYNRRTRQDEPALFVALTFERREVLDSSNIKPMNLIGVDRGENIPAVIALTDPEGCPLSRFKDSLGNPTHILRIGESYKEKQRTIQAKKEVEQRRAGGYSRKYASKAKNLADDMVRNTARDLLYYAVTQDAMLIFENLSRGFGRQGKRTFMAERQYTRMEDWLTAKLAYEGLPSKTYLSKTLAQYTSKTCSNCGFTITSADYDRVLEKLKKTATGWMTTINGKELKVEGQITYYNRYKRQNVVKDLSVELDRLSEESVNNDISSWTKGRSGEALSLLKKRFSHRPVQEKFVCLNCGFETHADEQAALNIARSWLFLRSQEYKKYQTNKTTGNTDKRAFVETWQSFYRKKLKEVWKPAV

SEQ ID NO: 35014 - protein, 978 aa, synthetic construct
  REGION 1..978: note = engineered CasX variant
QEIKRLNKIRRRLVKDSNTKKAGKTGPMKTLLVRVMTPDLRERLENLRKKPENIPQPISNTSRANLNKLLTDYTEMKKAILHVYWEEFQKDPVGLMSRVAQPASKKIDQNKLKPEMDEKGNLTTAGFACSQCGQPLFVYKLEQVSEKGKAYTNYFGRCNVAEHEKLILLYQLKPEKDSDEAVTYSLGKFGQRALDFYSIHVTKESTHPVKPLAQIAGNRYASVPVGKALSDACMGTIASFLSKYQDIIIEHQKVVKGNQKRLESLRELAGKENLEYPSVTLPPQPHTKEGVDAYNEVIARVRMWVNLNLWQKLKLSRDDAKPLLRLKGFPSFPLVERQANEVDWWDMVCNVKKLINEKKEDGKVFWQNLAGYKRQEALRPYLSSEEDRKKGKKFARYQLGDLLLHLEKKHGEDWGKVYDEAWERIDKKVEGLSKHIKLEEERRSEDAQSKAALTDWLRAKASFVIEGLKEADKDEFCRCELKLQKWYGDLRGKPFAIEAENSILDISGFSKQYNCAFIWQKDGVKKLNLYLIINYFKGGKLRFKKIKPEAFEANRFYTVINKKSGEIVPMEVNFNFDDPNLIILPLAFGKRQGREFIWNDLLSLETGSLKLANGRVIEKTLYNRRTRQDEPALFVALTFERREVLDSSNIKPMNLIGVDRGENIPAVIALTDPEGCPLSRFKDSLGNPTHILRIGESYKEKQRTIQAKKEVEQRRAGGYSRKYASKAKNLADDMVRNTARDLLYYAVTQDAMLIFENLSRGFGRQGKRTFMAERQYTRMEDWLTAKLAYEGLPSKTYLSKTLAQYTSKTCSNCGFTITSADYDRVLEKLKKTATGWMTTINGKELKVEGQITYYNRYKRQNVVKDLSVELDRLSEESVNNDISSWTKGRSGEALSLLKKRFSHRPVQEKFVCLNCGFETHADEQAALNIARSWLFLRSQEYKKYQTNKTTGNTDKRAFVETWQSFYRKKLKEVWKPAV

SEQ ID NO: 35015 - protein, 978 aa, synthetic construct
  REGION 1..978: note = engineered CasX variant
QEIKRLNKIRRRLVKDSNTKKAGKTGPMKTLLVRVMTPDLRERLENLRKKPENIPQPISNTSRANLNKLLTDYTEMKKAILHVYWEEFQKDPVGLMSRVAQPASKKIDQNKLKPEMDEKGNLTTAGFACSQCGQPLFVYKLEQVSEKGKAYTNYFGRCNVAEHEKLIKLYQLKPEKDSDEAVTYSLGKFGQRALDFYSIHVTKESTHPVKPLAQIAGNRYASGPVGKALSDACMGTIASFLSKYQDIIIEHQKVVKGNQKRLESLRELAGKENLEYPSVTLPPQPHTKEGVDAYNEVIARVRMWVNLNLWQKLKLSRDDAKPLLRLKGFPSFPLVERQANEVDWWDMVCNVKKLINEKKEDGKVFWQNLAGYKRQEALRPYLSSEEDRKKGKKFARYQLGDLLLHLEKKHGEDWGKVYDEAWERIDKKVEGLSKHIKLEEERRSEDAQSKAALTDWLRAKASFVIEGLKEADKDEFCRCELKLQKWYGDLRGKPFAIEAENSILDISGFSKQYNCAFIWQKDGVKKLNLYLIINYFKGGKLRFKKIKPEAFEANRFYTVINKKSGEIVPMEVNFNFDDPNLIILPLAFGKRQGREFIWNDLLSLETGSLKLANGRVIEKTLYNRRTRQDEPALFVALTFERREVLDSSNIKPMNLIGVDRGENIPAVIALTDPEGCPLSRFKDSLGNPTHILRIGESYKEKQRTIQAKKEVEQRRAGGYSRKYASKAKNLADDMVRNTARDLLYYAVTQDAMLIFENLSRGFGRQGKRTFMAERQYTRMEDWLTAKLAYEGLPSKTYLSKTLAQYTSKTCSNCGFTITSADYDRVLEKLKKTATGWMTTINGKELKVEGQITYYNRYKRQNVVKDLSVELDRLSEESVNNDISSWTKGRSGEALSLLKKRFSHRPVQEKFVCLNCGFETHADEQAALNIARSWLFLRSQEYKKYQTNKTTGNTDKRAFVETWQSFYRKKLKEVWKPAV

SEQ ID NO: 35016 - protein, 977 aa, synthetic construct
  REGION 1..977: note = engineered CasX variant
QEIKRLNKIRRRLVKDSNTKKAGKTGPMKTLLVRVMTPDLRERLENLRKKPENIPQPISNTSRANLNKLLTDYTEMKKAILHVYWEEFQKDPVGLMSRVAQPASKKIDQNKLKPEMDEKGNLTTAGFACSQCGQPLFVYKLEQVSEKGKAYTNYFGRCNVAEHEKLILLYQLKPEKDSDEAVTYSLGKFGQRALDFYSIHVTKESTHPVKPLAQIAGNRYASPVGKALSDACMGTIASFLSKYQDIIIEHQKVVKGNQKRLESLRELAGKENLEYPSVTLPPQPHTKEGVDAYNEVIARVRMWVNLNLWQKLKLSRDDAKPLLRLKGFPSFPLVERQANEVDWWDMVCNVKKLINEKKEDGKVFWQNLAGYKRQEALRPYLSSEEDRKKGKKFARYQLGDLLLHLEKKHGEDWGKVYDEAWERIDKKVEGLSKHIKLEEERRSEDAQSKAALTDWLRAKASFVIEGLKEADKDEFCRCELKLQKWYGDLRGKPFAIEAENSILDISGFSKQYNCAFIWQKDGVKKLNLYLIINYFKGGKLRFKKIKPEAFEANRFYTVINKKSGEIVPMEVNFNFDDPNLIILPLAFGKRQGREFIWNDLLSLETGSLKLANGRVIEKTLYNRRTRQDEPALFVALTFERREVLDSSNIKPMNLIGVDRGENIPAVIALTDPEGCPLSRFKDSLGNPTHILRIGESYKEKQRTIQAKKEVEQRRAGGYSRKYASKAKNLADDMVRNTARDLLYYAVTQDAMLIFENLSRGFGRQGKRTFMAERQYTRMEDWLTAKLAYEGLPSKTYLSKTLAQYTSKTCSNCGFTITSADYDRVLEKLKKTATGWMTTINGKELKVEGQITYYNRYKRQNVVKDLSVELDRLSEESVNNDISSWTKGRSGEALSLLKKRFSHRPVQEKFVCLNCGFETHADEQAALNIARSWLFLRSQEYKKYQTNKTTGNTDKRAFVETWQSFYRKKLKEVWKPAV

SEQ ID NO: 35017 - protein, 978 aa, synthetic construct
  REGION 1..978: note = engineered CasX variant
QEIKRINKIRRRLVKDSNTKKAGKTGPMKTLLVRVMTPDLRERLENLRKKPENIPQPISNTSRANLNKLLTDYTEMKKAILHVYWEEFQKDPVGLMSRVAQPASKKIDQNKLKPEMDEKGNLTTAGFACSQCGQPLFVYKLEQVSEKGKAYTNYVGRCNVAEHEKLILLYQLKPEKDSDEAVTYSLGKFGQRALDFYSIHVTKESTHPVKPLAQIAGNRYASYPVGKALSDACMGTIASFLSKYQDIIIEHQKVVKGNQKRLESLRELAGKENLEYPSVTLPPQPHTKEGVDAYNEVIARVRMWVNLNLWQKLKLSRDDAKPLLRLKGFPSFPLVERQANEVDWWDMVCNVKKLINEKKEDGKVFWQNLAGYKRQEALRPYLSSEEDRKKGKKFARYQLGDLLLHLEKKHGEDWGKVYDEAWERIDKKVEGLSKHIKLEEERRSEDAQSKAALTDWLRAKASFVIEGLKEADKDEFCRCELKLQKWYGDLRGKPFAIEAENSILDISGFSKQYNCAFIWQKDGVKKLNLYLIINYFKGGKLRFKKIKPEAFEANRFYTVINKKSGEIVPMEVNFNFDDPNLIILPLAFGKRQGREFIWNDLLSLETGSLKLANGRVIEKTLYNRRTRQDEPALFVALTFERREVLDSSNIKPMNLIGVDRGENIPAVIALTDPEGCPLSRFKDSLGNPTHILRIGESYKEKQRTIQAKKEVEQRRAGGYSRKYASKAKNLADDMVRNTARDLLYYAVTQDAMLIFENLSRGFGRQGKRTFMAERQYTRMEDWLTAKLAYEGLPSKTYLSKTLAQYTSKTCSNCGFTITSADYDRVLEKLKKTATGWMTTINGKELKVEGQITYYNRYKRQNVVKDLSVELDRLSEESVNNDISSWTKGRSGEALSLLKKRFSHRPVQEKFVCLNCGFETHADEQAALNIARSWLFLRSQEYKKYQTNKTTGNTDKRAFVETWQSFYRKKLKEVWKPAV

SEQ ID NO: 35018 - protein, 978 aa, synthetic construct
  REGION 1..978: note = engineered CasX variant
QEIKRINKIRRRLVKDSNTKKAGKTGPMKTLLVRVMTPDLRERLENLRKKPENIPQPISNTSRANLNKLLTDYTEMKKAILHVYWEEFQKDPVGLMSRVAQPASKKIDQNKLKPEMDEKGNLTTAGFACSQCGQPLFVYKLEQVSEKGKAYTNYVGRCNVAEHEKLILLYQLKPEKDSDEAVTYSLGKFGQRALDFYSIHVTKESTHPVKPLAQIAGNRYASHPVGKALSDACMGTIASFLSKYQDIIIEHQKVVKGNQKRLESLRELAGKENLEYPSVTLPPQPHTKEGVDAYNEVIARVRMWVNLNLWQKLKLSRDDAKPLLRLKGFPSFPLVERQANEVDWWDMVCNVKKLINEKKEDGKVFWQNLAGYKRQEALRPYLSSEEDRKKGKKFARYQLGDLLLHLEKKHGEDWGKVYDEAWERIDKKVEGLSKHIKLEEERRSEDAQSKAALTDWLRAKASFVIEGLKEADKDEFCRCELKLQKWYGDLRGKPFAIEAENSILDISGFSKQYNCAFIWQKDGVKKLNLYLIINYFKGGKLRFKKIKPEAFEANRFYTVINKKSGEIVPMEVNFNFDDPNLIILPLAFGKRQGREFIWNDLLSLETGSLKLANGRVIEKTLYNRRTRQDEPALFVALTFERREVLDSSNIKPMNLIGVDRGENIPAVIALTDPEGCPLSRFKDSLGNPTHILRIGESYKEKQRTIQAKKEVEQRRAGGYSRKYASKAKNLADDMVRNTARDLLYYAVTQDAMLIFENLSRGFGRQGKRTFMAERQYTRMEDWLTAKLAYEGLPSKTYLSKTLAQYTSKTCSNCGFTITSADYDRVLEKLKKTATGWMTTINGKELKVEGQITYYNRYKRQNVVKDLSVELDRLSEESVNNDISSWTKGRSGEALSLLKKRFSHRPVQEKFVCLNCGFETHADEQAALNIARSWLFLRSQEYKKYQTNKTTGNTDKRAFVETWQSFYRKKLKEVWKPAV

SEQ ID NO: 35019 - protein, 978 aa, synthetic construct
  REGION 1..978: note = engineered CasX variant
QEIKRINKIRRRLVKDSNTKKAGKTGPMKTLLVRVMTPDLRERLENLRKKPENIPQPISNTSRANLNKLLTDYTEMKKAILHVYWEEFQKDPVGLMSRVAQPASKKIDQNKLKPEMDEKGNLTTAGFACSQCGQPLFVYKLEQVSEKGKAYTNYVGRCNVAEHEKLILLYQLKPEKDSDEAVTYSLGKFGQRALDFYSIHVTKESTHPVKPLAQIAGNRYASSPVGKALSDACMGTIASFLSKYQDIIIEHQKVVKGNQKRLESLRELAGKENLEYPSVTLPPQPHTKEGVDAYNEVIARVRMWVNLNLWQKLKLSRDDAKPLLRLKGFPSFPLVERQANEVDWWDMVCNVKKLINEKKEDGKVFWQNLAGYKRQEALRPYLSSEEDRKKGKKFARYQLGDLLLHLEKKHGEDWGKVYDEAWERIDKKVEGLSKHIKLEEERRSEDAQSKAALTDWLRAKASFVIEGLKEADKDEFCRCELKLQKWYGDLRGKPFAIEAENSILDISGFSKQYNCAFIWQKDGVKKLNLYLIINYFKGGKLRFKKIKPEAFEANRFYTVINKKSGEIVPMEVNFNFDDPNLIILPLAFGKRQGREFIWNDLLSLETGSLKLANGRVIEKTLYNRRTRQDEPALFVALTFERREVLDSSNIKPMNLIGVDRGENIPAVIALTDPEGCPLSRFKDSLGNPTHILRIGESYKEKQRTIQAKKEVEQRRAGGYSRKYASKAKNLADDMVRNTARDLLYYAVTQDAMLIFENLSRGFGRQGKRTFMAERQYTRMEDWLTAKLAYEGLPSKTYLSKTLAQYTSKTCSNCGFTITSADYDRVLEKLKKTATGWMTTINGKELKVEGQITYYNRYKRQNVVKDLSVELDRLSEESVNNDISSWTKGRSGEALSLLKKRFSHRPVQEKFVCLNCGFETHADEQAALNIARSWLFLRSQEYKKYQTNKTTGNTDKRAFVETWQSFYRKKLKEVWKPAV

SEQ ID NO: 35020 - protein, 978 aa, synthetic construct
  REGION 1..978: note = engineered CasX variant
QEIKRINKIRRRLVKDSNTKKAGKTGPMKTLLVRVMTPDLRERLENLRKKPENIPQPISNTSRANLNKLLTDYTEMKKAILHVYWEEFQKDPVGLMSRVAQPASKKIDQNKLKPEMDEKGNLTTAGFACSQCGQPLFVYKLEQVSEKGKAYTNYVGRCNVAEHEKLILLYQLKPEKDSDEAVTYSLGKFGQRALDFYSIHVTKESTHPVKPLAQIAGNRYASTPVGKALSDACMGTIASFLSKYQDIIIEHQKVVKGNQKRLESLRELAGKENLEYPSVTLPPQPHTKEGVDAYNEVIARVRMWVNLNLWQKLKLSRDDAKPLLRLKGFPSFPLVERQANEVDWWDMVCNVKKLINEKKEDGKVFWQNLAGYKRQEALRPYLSSEEDRKKGKKFARYQLGDLLLHLEKKHGEDWGKVYDEAWERIDKKVEGLSKHIKLEEERRSEDAQSKAALTDWLRAKASFVIEGLKEADKDEFCRCELKLQKWYGDLRGKPFAIEAENSILDISGFSKQYNCAFIWQKDGVKKLNLYLIINYFKGGKLRFKKIKPEAFEANRFYTVINKKSGEIVPMEVNFNFDDPNLIILPLAFGKRQGREFIWNDLLSLETGSLKLANGRVIEKTLYNRRTRQDEPALFVALTFERREVLDSSNIKPMNLIGVDRGENIPAVIALTDPEGCPLSRFKDSLGNPTHILRIGESYKEKQRTIQAKKEVEQRRAGGYSRKYASKAKNLADDMVRNTARDLLYYAVTQDAMLIFENLSRGFGRQGKRTFMAERQYTRMEDWLTAKLAYEGLPSKTYLSKTLAQYTSKTCSNCGFTITSADYDRVLEKLKKTATGWMTTINGKELKVEGQITYYNRYKRQNVVKDLSVELDRLSEESVNNDISSWTKGRSGEALSLLKKRFSHRPVQEKFVCLNCGFETHADEQAALNIARSWLFLRSQEYKKYQTNKTTGNTDKRAFVETWQSFYRKKLKEVWKPAV

SEQ ID NO: 35021 - protein, 978 aa, synthetic construct
  REGION 1..978: note = engineered CasX variant
QEIKRINKIRRRLVKDSNTKKAGKTGPMKTLLVRVMTPDLRERLENLRKKPENIPQPISNTSRANLNKLLTDYTEMKKAILHVYWEEFQKDPVGLMSRVAQPASKKIDQNKLKPEMDEKGNLTTAGFACSQCGQPLFVYKLEQVSEKGKAYTNYVGRCNVAEHEKLILLYQLKPEKDSDEAVTYSLGKFGQRALDFYSIHVTKESTHPVKPLAQIAGNRYASAPVGKALSDACMGTIASFLSKYQDIIIEHQKVVKGNQKRLESLRELAGKENLEYPSVTLPPQPHTKEGVDAYNEVIARVRMWVNLNLWQKLKLSRDDAKPLLRLKGFPSFPLVERQANEVDWWDMVCNVKKLINEKKEDGKVFWQNLAGYKRQEALRPYLSSEEDRKKGKKFARYQLGDLLLHLEKKHGEDWGKVYDEAWERIDKKVEGLSKHIKLEEERRSEDAQSKAALTDWLRAKASFVIEGLKEADKDEFCRCELKLQKWYGDLRGKPFAIEAENSILDISGFSKQYNCAFIWQKDGVKKLNLYLIINYFKGGKLRFKKIKPEAFEANRFYTVINKKSGEIVPMEVNFNFDDPNLIILPLAFGKRQGREFIWNDLLSLETGSLKLANGRVIEKTLYNRRTRQDEPALFVALTFERREVLDSSNIKPMNLIGVDRGENIPAVIALTDPEGCPLSRFKDSLGNPTHILRIGESYKEKQRTIQAKKEVEQRRAGGYSRKYASKAKNLADDMVRNTARDLLYYAVTQDAMLIFENLSRGFGRQGKRTFMAERQYTRMEDWLTAKLAYEGLPSKTYLSKTLAQYTSKTCSNCGFTITSADYDRVLEKLKKTATGWMTTINGKELKVEGQITYYNRYKRQNVVKDLSVELDRLSEESVNNDISSWTKGRSGEALSLLKKRFSHRPVQEKFVCLNCGFETHADEQAALNIARSWLFLRSQEYKKYQTNKTTGNTDKRAFVETWQSFYRKKLKEVWKPAV

SEQ ID NO: 35022 - protein, 978 aa, synthetic construct
  REGION 1..978: note = engineered CasX variant
QEIKRINKIRRRLVKDSNTKKAGKTGPMKTLLVRVMTPDLRERLENLRKKPENIPQPISNTSRANLNKLLTDYTEMKKAILHVYWEEFQKDPVGLMSRVAQPASKKIDQNKLKPEMDEKGNLTTAGFACSQCGQPLFVYKLEQVSEKGKAYTNYVGRCNVAEHEKLILLYQLKPEKDSDEAVTYSLGKFGQRALDFYSIHVTKESTHPVKPLAQIAGNRYASVPVGKALSDACMGTIASFLSKYQDIIIEHQKVVKGNQKRLESLRELAGKENLEYPSVTLPPQPHTKEGVDAYNEVIARVRMWVNLNLWQKLKLSRDDAKPLLRLKGFPSFPLVERQANEVDWWDMVCNVKKLINEKKEDGKVFWQNLAGYKRQEALRPYLSSEEDRKKGKKFARYQLGDLLLHLEKKHGEDWGKVYDEAWERIDKKVEGLSKHIKLEEERRSEDAQSKAALTDWLRAKASFVIEGLKEADKDEFCRCELKLQKWYGDLRGKPFAIEAENSILDISGFSKQYNCAFIWQKDGVKKLNLYLIINYFKGGKLRFKKIKPEAFEANRFYTVINKKSGEIVPMEVNFNFDDPNLIILPLAFGKRQGREFIWNDLLSLETGSLKLANGRVIEKTLYNRRTRQDEPALFVALTFERREVLDSSNIKPMNLIGVDRGENIPAVIALTDPEGCPLSRFKDSLGNPTHILRIGESYKEKQRTIQAKKEVEQRRAGGYSRKYASKAKNLADDMVRNTARDLLYYAVTQDAMLIFENLSRGFGRQGKRTFMAERQYTRMEDWLTAKLAYEGLPSKTYLSKTLAQYTSKTCSNCGFTITSADYDRVLEKLKKTATGWMTTINGKELKVEGQITYYNRYKRQNVVKDLSVELDRLSEESVNNDISSWTKGRSGEALSLLKKRFSHRPVQEKFVCLNCGFETHADEQAALNIARSWLFLRSQEYKKYQTNKTTGNTDKRAFVETWQSFYRKKLKEVWKPAV

SEQ ID NO: 35023 - protein, 978 aa, synthetic construct
  REGION 1..978: note = engineered CasX variant
QEIKRINKIRRRLVKDSNTKKAGKTGPMKTLLVRVMTPDLRERLENLRKKPENIPQPISNTSRANLNKLLTDYTEMKKAILHVYWEEFQKDPVGLMSRVAQPASKKIDQNKLKPEMDEKGNLTTAGFACSQCGQPLFVYKLEQVSEKGKAYTNYVGRCNVAEHEKLIKLYQLKPEKDSDEAVTYSLGKFGQRALDFYSIHVTKESTHPVKPLAQIAGNRYASGPVGKALSDACMGTIASFLSKYQDIIIEHQKVVKGNQKRLESLRELAGKENLEYPSVTLPPQPHTKEGVDAYNEVIARVRMWVNLNLWQKLKLSRDDAKPLLRLKGFPSFPLVERQANEVDWWDMVCNVKKLINEKKEDGKVFWQNLAGYKRQEALRPYLSSEEDRKKGKKFARYQLGDLLLHLEKKHGEDWGKVYDEAWERIDKKVEGLSKHIKLEEERRSEDAQSKAALTDWLRAKASFVIEGLKEADKDEFCRCELKLQKWYGDLRGKPFAIEAENSILDISGFSKQYNCAFIWQKDGVKKLNLYLIINYFKGGKLRFKKIKPEAFEANRFYTVINKKSGEIVPMEVNFNFDDPNLIILPLAFGKRQGREFIWNDLLSLETGSLKLANGRVIEKTLYNRRTRQDEPALFVALTFERREVLDSSNIKPMNLIGVDRGENIPAVIALTDPEGCPLSRFKDSLGNPTHILRIGESYKEKQRTIQAKKEVEQRRAGGYSRKYASKAKNLADDMVRNTARDLLYYAVTQDAMLIFENLSRGFGRQGKRTFMAERQYTRMEDWLTAKLAYEGLPSKTYLSKTLAQYTSKTCSNCGFTITSADYDRVLEKLKKTATGWMTTINGKELKVEGQITYYNRYKRQNVVKDLSVELDRLSEESVNNDISSWTKGRSGEALSLLKKRFSHRPVQEKFVCLNCGFETHADEQAALNIARSWLFLRSQEYKKYQTNKTTGNTDKRAFVETWQSFYRKKLKEVWKPAV

SEQ ID NO: 35024 - protein, 977 aa, synthetic construct
  REGION 1..977: note = engineered CasX variant
QEIKRINKIRRRLVKDSNTKKAGKTGPMKTLLVRVMTPDLRERLENLRKKPENIPQPISNTSRANLNKLLTDYTEMKKAILHVYWEEFQKDPVGLMSRVAQPASKKIDQNKLKPEMDEKGNLTTAGFACSQCGQPLFVYKLEQVSEKGKAYTNYVGRCNVAEHEKLILLYQLKPEKDSDEAVTYSLGKFGQRALDFYSIHVTKESTHPVKPLAQIAGNRYASPVGKALSDACMGTIASFLSKYQDIIIEHQKVVKGNQKRLESLRELAGKENLEYPSVTLPPQPHTKEGVDAYNEVIARVRMWVNLNLWQKLKLSRDDAKPLLRLKGFPSFPLVERQANEVDWWDMVCNVKKLINEKKEDGKVFWQNLAGYKRQEALRPYLSSEEDRKKGKKFARYQLGDLLLHLEKKHGEDWGKVYDEAWERIDKKVEGLSKHIKLEEERRSEDAQSKAALTDWLRAKASFVIEGLKEADKDEFCRCELKLQKWYGDLRGKPFAIEAENSILDISGFSKQYNCAFIWQKDGVKKLNLYLIINYFKGGKLRFKKIKPEAFEANRFYTVINKKSGEIVPMEVNFNFDDPNLIILPLAFGKRQGREFIWNDLLSLETGSLKLANGRVIEKTLYNRRTRQDEPALFVALTFERREVLDSSNIKPMNLIGVDRGENIPAVIALTDPEGCPLSRFKDSLGNPTHILRIGESYKEKQRTIQAKKEVEQRRAGGYSRKYASKAKNLADDMVRNTARDLLYYAVTQDAMLIFENLSRGFGRQGKRTFMAERQYTRMEDWLTAKLAYEGLPSKTYLSKTLAQYTSKTCSNCGFTITSADYDRVLEKLKKTATGWMTTINGKELKVEGQITYYNRYKRQNVVKDLSVELDRLSEESVNNDISSWTKGRSGEALSLLKKRFSHRPVQEKFVCLNCGFETHADEQAALNIARSWLFLRSQEYKKYQTNKTTGNTDKRAFVETWQSFYRKKLKEVWKPAV

SEQ ID NO: 35025 - protein, 978 aa, synthetic construct
  REGION 1..978: note = engineered CasX variant
QEIKRINKIRRRLVKDSNTKKAGKTGPMKTLLVRVMTPDLRERLENLRKKPENIPQPISNTSRANLNKLLTDYTEMKKAILHVYWEEFQKDPVGLMSRVAQPASKKIDQNKLKPEMDEKGNLTTAGFACSQCGQPLFVYKLEQVSEKGKAYTNYFGRCNVAEHEKLILLYQLKPEKDSDEAVTYSLGKFGQRALDFYSIHVTKESTHPVKPLAQIAGNRYASYPVGKALSDACMGTIASFLSKYQDIIIEHQKVVKGNQKRLESLRELAGKENLEYPSVTLPPQPHTKEGVDAYNEVIARVRMWVNLNLWQKLKLSRDDAKPLLRLKGFPSFPLVERQANEVDWWDMVCNVKKLINEKKEDGKVFWQNLAGYKRQEALRPYLSSEEDRKKGKKFARYQLGDLLLHLEKKHGEDWGKVYDEAWERIDKKVEGLSKHIKLEEERRSEDAQSKAALTDWLRAKASFVIEGLKEADKDEFCRCELKLQKWYGDLRGKPFAIEAENSILDISGFSKQYNCAFIWQKDGVKKLNLYLIINYFKGGKLRFKKIKPEAFEANRFYTVINKKSGEIVPMEVNFNFDDPNLIILPLAFGKRQGREFIWNDLLSLETGSLKLANGRVIEKTLYNRRTRQDEPALFVALTFERREVLDSSNIKPMNLIGVDRGENIPAVIALTDPEGCPLSRFKDSLGNPTHILRIGESYKEKQRTIQAKKEVEQRRAGGYSRKYASKAKNLADDMVRNTARDLLYYAVTQDAMLIFENLSRGFGRQGKRTFMAERQYTRMEDWLTAKLAYEGLASKTYLSKTLAQYTSKTCSNCGFTITSADYDRVLEKLKKTATGWMTTINGKELKVEGQITYYNRYKRQNVVKDLSVELDRLSEESVNNDISSWTKGRSGEALSLLKKRFSHRPVQEKFVCLNCGFETHADEQAALNIARSWLFLRSQEYKKYQTNKTTGNTDKRAFVETWQSFYRKKLKEVWKPAV

SEQ ID NO: 35026 - protein, 978 aa, synthetic construct
  REGION 1..978: note = engineered CasX variant
QEIKRINKIRRRLVKDSNTKKAGKTGPMKTLLVRVMTPDLRERLENLRKKPENIPQPISNTSRANLNKLLTDYTEMKKAILHVYWEEFQKDPVGLMSRVAQPASKKIDQNKLKPEMDEKGNLTTAGFACSQCGQPLFVYKLEQVSEKGKAYTNYFGRCNVAEHEKLILLYQLKPEKDSDEAVTYSLGKFGQRALDFYSIHVTKESTHPVKPLAQIAGNRYASHPVGKALSDACMGTIASFLSKYQDIIIEHQKVVKGNQKRLESLRELAGKENLEYPSVTLPPQPHTKEGVDAYNEVIARVRMWVNLNLWQKLKLSRDDAKPLLRLKGFPSFPLVERQANEVDWWDMVCNVKKLINEKKEDGKVFWQNLAGYKRQEALRPYLSSEEDRKKGKKFARYQLGDLLLHLEKKHGEDWGKVYDEAWERIDKKVEGLSKHIKLEEERRSEDAQSKAALTDWLRAKASFVIEGLKEADKDEFCRCELKLQKWYGDLRGKPFAIEAENSILDISGFSKQYNCAFIWQKDGVKKLNLYLIINYFKGGKLRFKKIKPEAFEANRFYTVINKKSGEIVPMEVNFNFDDPNLIILPLAFGKRQGREFIWNDLLSLETGSLKLANGRVIEKTLYNRRTRQDEPALFVALTFERREVLDSSNIKPMNLIGVDRGENIPAVIALTDPEGCPLSRFKDSLGNPTHILRIGESYKEKQRTIQAKKEVEQRRAGGYSRKYASKAKNLADDMVRNTARDLLYYAVTQDAMLIFENLSRGFGRQGKRTFMAERQYTRMEDWLTAKLAYEGLASKTYLSKTLAQYTSKTCSNCGFTITSADYDRVLEKLKKTATGWMTTINGKELKVEGQITYYNRYKRQNVVKDLSVELDRLSEESVNNDISSWTKGRSGEALSLLKKRFSHRPVQEKFVCLNCGFETHADEQAALNIARSWLFLRSQEYKKYQTNKTTGNTDKRAFVETWQSFYRKKLKEVWKPAV

SEQ ID NO: 35027 - protein, 978 aa, synthetic construct
  REGION 1..978: note = engineered CasX variant
QEIKRINKIRRRLVKDSNTKKAGKTGPMKTLLVRVMTPDLRERLENLRKKPENIPQPISNTSRANLNKLLTDYTEMKKAILHVYWEEFQKDPVGLMSRVAQPASKKIDQNKLKPEMDEKGNLTTAGFACSQCGQPLFVYKLEQVSEKGKAYTNYFGRCNVAEHEKLILLYQLKPEKDSDEAVTYSLGKFGQRALDFYSIHVTKESTHPVKPLAQIAGNRYASSPVGKALSDACMGTIASFLSKYQDIIIEHQKVVKGNQKRLESLRELAGKENLEYPSVTLPPQPHTKEGVDAYNEVIARVRMWVNLNLWQKLKLSRDDAKPLLRLKGFPSFPLVERQANEVDWWDMVCNVKKLINEKKEDGKVFWQNLAGYKRQEALRPYLSSEEDRKKGKKFARYQLGDLLLHLEKKHGEDWGKVYDEAWERIDKKVEGLSKHIKLEEERRSEDAQSKAALTDWLRAKASFVIEGLKEADKDEFCRCELKLQKWYGDLRGKPFAIEAENSILDISGFSKQYNCAFIWQKDGVKKLNLYLIINYFKGGKLRFKKIKPEAFEANRFYTVINKKSGEIVPMEVNFNFDDPNLIILPLAFGKRQGREFIWNDLLSLETGSLKLANGRVIEKTLYNRRTRQDEPALFVALTFERREVLDSSNIKPMNLIGVDRGENIPAVIALTDPEGCPLSRFKDSLGNPTHILRIGESYKEKQRTIQAKKEVEQRRAGGYSRKYASKAKNLADDMVRNTARDLLYYAVTQDAMLIFENLSRGFGRQGKRTFMAERQYTRMEDWLTAKLAYEGLASKTYLSKTLAQYTSKTCSNCGFTITSADYDRVLEKLKKTATGWMTTINGKELKVEGQITYYNRYKRQNVVKDLSVELDRLSEESVNNDISSWTKGRSGEALSLLKKRFSHRPVQEKFVCLNCGFETHADEQAALNIARSWLFLRSQEYKKYQTNKTTGNTDKRAFVETWQSFYRKKLKEVWKPAV

SEQ ID NO: 35028 - protein, 978 aa, synthetic construct
  REGION 1..978: note = engineered CasX variant
QEIKRINKIRRRLVKDSNTKKAGKTGPMKTLLVRVMTPDLRERLENLRKKPENIPQPISNTSRANLNKLLTDYTEMKKAILHVYWEEFQKDPVGLMSRVAQPASKKIDQNKLKPEMDEKGNLTTAGFACSQCGQPLFVYKLEQVSEKGKAYTNYFGRCNVAEHEKLILLYQLKPEKDSDEAVTYSLGKFGQRALDFYSIHVTKESTHPVKPLAQIAGNRYASTPVGKALSDACMGTIASFLSKYQDIIIEHQKVVKGNQKRLESLRELAGKENLEYPSVTLPPQPHTKEGVDAYNEVIARVRMWVNLNLWQKLKLSRDDAKPLLRLKGFPSFPLVERQANEVDWWDMVCNVKKLINEKKEDGKVFWQNLAGYKRQEALRPYLSSEEDRKKGKKFARYQLGDLLLHLEKKHGEDWGKVYDEAWERIDKKVEGLSKHIKLEEERRSEDAQSKAALTDWLRAKASFVIEGLKEADKDEFCRCELKLQKWYGDLRGKPFAIEAENSILDISGFSKQYNCAFIWQKDGVKKLNLYLIINYFKGGKLRFKKIKPEAFEANRFYTVINKKSGEIVPMEVNFNFDDPNLIILPLAFGKRQGREFIWNDLLSLETGSLKLANGRVIEKTLYNRRTRQDEPALFVALTFERREVLDSSNIKPMNLIGVDRGENIPAVIALTDPEGCPLSRFKDSLGNPTHILRIGESYKEKQRTIQAKKEVEQRRAGGYSRKYASKAKNLADDMVRNTARDLLYYAVTQDAMLIFENLSRGFGRQGKRTFMAERQYTRMEDWLTAKLAYEGLASKTYLSKTLAQYTSKTCSNCGFTITSADYDRVLEKLKKTATGWMTTINGKELKVEGQITYYNRYKRQNVVKDLSVELDRLSEESVNNDISSWTKGRSGEALSLLKKRFSHRPVQEKFVCLNCGFETHADEQAALNIARSWLFLRSQEYKKYQTNKTTGNTDKRAFVETWQSFYRKKLKEVWKPAV

SEQ ID NO: 35029 - protein, 978 aa, synthetic construct
  REGION 1..978: note = engineered CasX variant
QEIKRINKIRRRLVKDSNTKKAGKTGPMKTLLVRVMTPDLRERLENLRKKPENIPQPISNTSRANLNKLLTDYTEMKKAILHVYWEEFQKDPVGLMSRVAQPASKKIDQNKLKPEMDEKGNLTTAGFACSQCGQPLFVYKLEQVSEKGKAYTNYFGRCNVAEHEKLILLYQLKPEKDSDEAVTYSLGKFGQRALDFYSIHVTKESTHPVKPLAQIAGNRYASAPVGKALSDACMGTIASFLSKYQDIIIEHQKVVKGNQKRLESLRELAGKENLEYPSVTLPPQPHTKEGVDAYNEVIARVRMWVNLNLWQKLKLSRDDAKPLLRLKGFPSFPLVERQANEVDWWDMVCNVKKLINEKKEDGKVFWQNLAGYKRQEALRPYLSSEEDRKKGKKFARYQLGDLLLHLEKKHGEDWGKVYDEAWERIDKKVEGLSKHIKLEEERRSEDAQSKAALTDWLRAKASFVIEGLKEADKDEFCRCELKLQKWYGDLRGKPFAIEAENSILDISGFSKQYNCAFIWQKDGVKKLNLYLIINYFKGGKLRFKKIKPEAFEANRFYTVINKKSGEIVPMEVNFNFDDPNLIILPLAFGKRQGREFIWNDLLSLETGSLKLANGRVIEKTLYNRRTRQDEPALFVALTFERREVLDSSNIKPMNLIGVDRGENIPAVIALTDPEGCPLSRFKDSLGNPTHILRIGESYKEKQRTIQAKKEVEQRRAGGYSRKYASKAKNLADDMVRNTARDLLYYAVTQDAMLIFENLSRGFGRQGKRTFMAERQYTRMEDWLTAKLAYEGLASKTYLSKTLAQYTSKTCSNCGFTITSADYDRVLEKLKKTATGWMTTINGKELKVEGQITYYNRYKRQNVVKDLSVELDRLSEESVNNDISSWTKGRSGEALSLLKKRFSHRPVQEKFVCLNCGFETHADEQAALNIARSWLFLRSQEYKKYQTNKTTGNTDKRAFVETWQSFYRKKLKEVWKPAV

SEQ ID NO: 35030 - protein, 978 aa, synthetic construct
  REGION 1..978: note = engineered CasX variant
QEIKRINKIRRRLVKDSNTKKAGKTGPMKTLLVRVMTPDLRERLENLRKKPENIPQPISNTSRANLNKLLTDYTEMKKAILHVYWEEFQKDPVGLMSRVAQPASKKIDQNKLKPEMDEKGNLTTAGFACSQCGQPLFVYKLEQVSEKGKAYTNYFGRCNVAEHEKLILLYQLKPEKDSDEAVTYSLGKFGQRALDFYSIHVTKESTHPVKPLAQIAGNRYASVPVGKALSDACMGTIASFLSKYQDIIIEHQKVVKGNQKRLESLRELAGKENLEYPSVTLPPQPHTKEGVDAYNEVIARVRMWVNLNLWQKLKLSRDDAKPLLRLKGFPSFPLVERQANEVDWWDMVCNVKKLINEKKEDGKVFWQNLAGYKRQEALRPYLSSEEDRKKGKKFARYQLGDLLLHLEKKHGEDWGKVYDEAWERIDKKVEGLSKHIKLEEERRSEDAQSKAALTDWLRAKASFVIEGLKEADKDEFCRCELKLQKWYGDLRGKPFAIEAENSILDISGFSKQYNCAFIWQKDGVKKLNLYLIINYFKGGKLRFKKIKPEAFEANRFYTVINKKSGEIVPMEVNFNFDDPNLIILPLAFGKRQGREFIWNDLLSLETGSLKLANGRVIEKTLYNRRTRQDEPALFVALTFERREVLDSSNIKPMNLIGVDRGENIPAVIALTDPEGCPLSRFKDSLGNPTHILRIGESYKEKQRTIQAKKEVEQRRAGGYSRKYASKAKNLADDMVRNTARDLLYYAVTQDAMLIFENLSRGFGRQGKRTFMAERQYTRMEDWLTAKLAYEGLASKTYLSKTLAQYTSKTCSNCGFTITSADYDRVLEKLKKTATGWMTTINGKELKVEGQITYYNRYKRQNVVKDLSVELDRLSEESVNNDISSWTKGRSGEALSLLKKRFSHRPVQEKFVCLNCGFETHADEQAALNIARSWLFLRSQEYKKYQTNKTTGNTDKRAFVETWQSFYRKKLKEVWKPAV

SEQ ID NO: 35031 - protein, 978 aa, synthetic construct
  REGION 1..978: note = engineered CasX variant
QEIKRINKIRRRLVKDSNTKKAGKTGPMKTLLVRVMTPDLRERLENLRKKPENIPQPISNTSRANLNKLLTDYTEMKKAILHVYWEEFQKDPVGLMSRVAQPASKKIDQNKLKPEMDEKGNLTTAGFACSQCGQPLFVYKLEQVSEKGKAYTNYFGRCNVAEHEKLIKLYQLKPEKDSDEAVTYSLGKFGQRALDFYSIHVTKESTHPVKPLAQIAGNRYASGPVGKALSDACMGTIASFLSKYQDIIIEHQKVVKGNQKRLESLRELAGKENLEYPSVTLPPQPHTKEGVDAYNEVIARVRMWVNLNLWQKLKLSRDDAKPLLRLKGFPSFPLVERQANEVDWWDMVCNVKKLINEKKEDGKVFWQNLAGYKRQEALRPYLSSEEDRKKGKKFARYQLGDLLLHLEKKHGEDWGKVYDEAWERIDKKVEGLSKHIKLEEERRSEDAQSKAALTDWLRAKASFVIEGLKEADKDEFCRCELKLQKWYGDLRGKPFAIEAENSILDISGFSKQYNCAFIWQKDGVKKLNLYLIINYFKGGKLRFKKIKPEAFEANRFYTVINKKSGEIVPMEVNFNFDDPNLIILPLAFGKRQGREFIWNDLLSLETGSLKLANGRVIEKTLYNRRTRQDEPALFVALTFERREVLDSSNIKPMNLIGVDRGENIPAVIALTDPEGCPLSRFKDSLGNPTHILRIGESYKEKQRTIQAKKEVEQRRAGGYSRKYASKAKNLADDMVRNTARDLLYYAVTQDAMLIFENLSRGFGRQGKRTFMAERQYTRMEDWLTAKLAYEGLASKTYLSKTLAQYTSKTCSNCGFTITSADYDRVLEKLKKTATGWMTTINGKELKVEGQITYYNRYKRQNVVKDLSVELDRLSEESVNNDISSWTKGRSGEALSLLKKRFSHRPVQEKFVCLNCGFETHADEQAALNIARSWLFLRSQEYKKYQTNKTTGNTDKRAFVETWQSFYRKKLKEVWKPAV

SEQ ID NO: 35032 - protein, 977 aa, synthetic construct
  REGION 1..977: note = engineered CasX variant
QEIKRINKIRRRLVKDSNTKKAGKTGPMKTLLVRVMTPDLRERLENLRKKPENIPQPISNTSRANLNKLLTDYTEMKKAILHVYWEEFQKDPVGLMSRVAQPASKKIDQNKLKPEMDEKGNLTTAGFACSQCGQPLFVYKLEQVSEKGKAYTNYFGRCNVAEHEKLILLYQLKPEKDSDEAVTYSLGKFGQRALDFYSIHVTKESTHPVKPLAQIAGNRYASPVGKALSDACMGTIASFLSKYQDIIIEHQKVVKGNQKRLESLRELAGKENLEYPSVTLPPQPHTKEGVDAYNEVIARVRMWVNLNLWQKLKLSRDDAKPLLRLKGFPSFPLVERQANEVDWWDMVCNVKKLINEKKEDGKVFWQNLAGYKRQEALRPYLSSEEDRKKGKKFARYQLGDLLLHLEKKHGEDWGKVYDEAWERIDKKVEGLSKHIKLEEERRSEDAQSKAALTDWLRAKASFVIEGLKEADKDEFCRCELKLQKWYGDLRGKPFAIEAENSILDISGFSKQYNCAFIWQKDGVKKLNLYLIINYFKGGKLRFKKIKPEAFEANRFYTVINKKSGEIVPMEVNFNFDDPNLIILPLAFGKRQGREFIWNDLLSLETGSLKLANGRVIEKTLYNRRTRQDEPALFVALTFERREVLDSSNIKPMNLIGVDRGENIPAVIALTDPEGCPLSRFKDSLGNPTHILRIGESYKEKQRTIQAKKEVEQRRAGGYSRKYASKAKNLADDMVRNTARDLLYYAVTQDAMLIFENLSRGFGRQGKRTFMAERQYTRMEDWLTAKLAYEGLASKTYLSKTLAQYTSKTCSNCGFTITSADYDRVLEKLKKTATGWMTTINGKELKVEGQITYYNRYKRQNVVKDLSVELDRLSEESVNNDISSWTKGRSGEALSLLKKRFSHRPVQEKFVCLNCGFETHADEQAALNIARSWLFLRSQEYKKYQTNKTTGNTDKRAFVETWQSFYRKKLKEVWKPAV

SEQ ID NO: 35033 - protein, 978 aa, synthetic construct
  REGION 1..978: note = engineered CasX variant
QEIKRINKIRRRLVKDSNTKKAGKTGPMKTLLVRVMTPDLRERLENLRKKPENIPQPISNTSRANLNKLLTDYTEMKKAILHVYWEEFQKDPVGLMSRVAQPASKKIDQNKLKPEMDEKGNLTTAGFACSQCGQPLFVYKLEQVSEKGKAYTNYFGRCNVAEHEKLILLYQLKPEKDSDEAVTYSLGKFGQRALDFYSIHVTKESTHPVKPLAQIAGNRYASYPVGKALSDACMGTIASFLSKYQDIIIEHQKVVKGNQKRLESLRELAGKENLEYPSVTLPPQPHTKEGVDAYNEVIARVRMWVNLNLWQKLKLSRDDAKPLLRLKGFPSFPLVERQANEVDWWDMVCNVKKLINEKKEDGKVFWQNLAGYKRQEALRPYLSSEEDRKKGKKFARYQLGDLLLHLEKKHGEDWGKVYDEAWERIDKKVEGLSKHIKLEEERRSEDAQSKAALTDWLRAKASFVIEGLKEADKDEFCRCELKLQKWYGDLRGKPFAIEAENSILDISGFSKQYNCAFIWQKDGVKKLNLYLIINYFKGGKLRFKKIKPEAFEANRFYTVINKKSGEIVPMEVNFNFDDPNLIILPLAFGKRQGREFIWNDLLSLETGSLKLANGRVIEKTLYNRRTRQDEPALFVALTFERREVLDSSNIKPMNLIGVDRGENIPAVIALTDPEGCPLSRFKDSLGNPTHILRIGESYKEKQRTIQAKKEVEQRRAGGYSRKYASKAKNLADDMVRNTARDLLYYAVTQDAMLIFENLSRGFGRQGKRTFMAERQYTRMEDWLTAKLAYEGLPSKVYLSKTLAQYTSKTCSNCGFTITSADYDRVLEKLKKTATGWMTTINGKELKVEGQITYYNRYKRQNVVKDLSVELDRLSEESVNNDISSWTKGRSGEALSLLKKRFSHRPVQEKFVCLNCGFETHADEQAALNIARSWLFLRSQEYKKYQTNKTTGNTDKRAFVETWQSFYRKKLKEVWKPAV

SEQ ID NO: 35034 - protein, 978 aa, synthetic construct
  REGION 1..978: note = engineered CasX variant
QEIKRINKIRRRLVKDSNTKKAGKTGPMKTLLVRVMTPDLRERLENLRKKPENIPQPISNTSRANLNKLLTDYTEMKKAILHVYWEEFQKDPVGLMSRVAQPASKKIDQNKLKPEMDEKGNLTTAGFACSQCGQPLFVYKLEQVSEKGKAYTNYFGRCNVAEHEKLILLYQLKPEKDSDEAVTYSLGKFGQRALDFYSIHVTKESTHPVKPLAQIAGNRYASHPVGKALSDACMGTIASFLSKYQDIIIEHQKVVKGNQKRLESLRELAGKENLEYPSVTLPPQPHTKEGVDAYNEVIARVRMWVNLNLWQKLKLSRDDAKPLLRLKGFPSFPLVERQANEVDWWDMVCNVKKLINEKKEDGKVFWQNLAGYKRQEALRPYLSSEEDRKKGKKFARYQLGDLLLHLEKKHGEDWGKVYDEAWERIDKKVEGLSKHIKLEEERRSEDAQSKAALTDWLRAKASFVIEGLKEADKDEFCRCELKLQKWYGDLRGKPFAIEAENSILDISGFSKQYNCAFIWQKDGVKKLNLYLIINYFKGGKLRFKKIKPEAFEANRFYTVINKKSGEIVPMEVNFNFDDPNLIILPLAFGKRQGREFIWNDLLSLETGSLKLANGRVIEKTLYNRRTRQDEPALFVALTFERREVLDSSNIKPMNLIGVDRGENIPAVIALTDPEGCPLSRFKDSLGNPTHILRIGESYKEKQRTIQAKKEVEQRRAGGYSRKYASKAKNLADDMVRNTARDLLYYAVTQDAMLIFENLSRGFGRQGKRTFMAERQYTRMEDWLTAKLAYEGLPSKVYLSKTLAQYTSKTCSNCGFTITSADYDRVLEKLKKTATGWMTTINGKELKVEGQITYYNRYKRQNVVKDLSVELDRLSEESVNNDISSWTKGRSGEALSLLKKRFSHRPVQEKFVCLNCGFETHADEQAALNIARSWLFLRSQEYKKYQTNKTTGNTDKRAFVETWQSFYRKKLKEVWKPAV

SEQ ID NO: 35035 - protein, 978 aa, synthetic construct
  REGION 1..978: note = engineered CasX variant
QEIKRINKIRRRLVKDSNTKKAGKTGPMKTLLVRVMTPDLRERLENLRKKPENIPQPISNTSRANLNKLLTDYTEMKKAILHVYWEEFQKDPVGLMSRVAQPASKKIDQNKLKPEMDEKGNLTTAGFACSQCGQPLFVYKLEQVSEKGKAYTNYFGRCNVAEHEKLILLYQLKPEKDSDEAVTYSLGKFGQRALDFYSIHVTKESTHPVKPLAQIAGNRYASSPVGKALSDACMGTIASFLSKYQDIIIEHQKVVKGNQKRLESLRELAGKENLEYPSVTLPPQPHTKEGVDAYNEVIARVRMWVNLNLWQKLKLSRDDAKPLLRLKGFPSFPLVERQANEVDWWDMVCNVKKLINEKKEDGKVFWQNLAGYKRQEALRPYLSSEEDRKKGKKFARYQLGDLLLHLEKKHGEDWGKVYDEAWERIDKKVEGLSKHIKLEEERRSEDAQSKAALTDWLRAKASFVIEGLKEADKDEFCRCELKLQKWYGDLRGKPFAIEAENSILDISGFSKQYNCAFIWQKDGVKKLNLYLIINYFKGGKLRFKKIKPEAFEANRFYTVINKKSGEIVPMEVNFNFDDPNLIILPLAFGKRQGREFIWNDLLSLETGSLKLANGRVIEKTLYNRRTRQDEPALFVALTFERREVLDSSNIKPMNLIGVDRGENIPAVIALTDPEGCPLSRFKDSLGNPTHILRIGESYKEKQRTIQAKKEVEQRRAGGYSRKYASKAKNLADDMVRNTARDLLYYAVTQDAMLIFENLSRGFGRQGKRTFMAERQYTRMEDWLTAKLAYEGLPSKVYLSKTLAQYTSKTCSNCGFTITSADYDRVLEKLKKTATGWMTTINGKELKVEGQITYYNRYKRQNVVKDLSVELDRLSEESVNNDISSWTKGRSGEALSLLKKRFSHRPVQEKFVCLNCGFETHADEQAALNIARSWLFLRSQEYKKYQTNKTTGNTDKRAFVETWQSFYRKKLKEVWKPAV

SEQ ID NO: 35036 - protein, 978 aa, synthetic construct
  REGION 1..978: note = engineered CasX variant
QEIKRINKIRRRLVKDSNTKKAGKTGPMKTLLVRVMTPDLRERLENLRKKPENIPQPISNTSRANLNKLLTDYTEMKKAILHVYWEEFQKDPVGLMSRVAQPASKKIDQNKLKPEMDEKGNLTTAGFACSQCGQPLFVYKLEQVSEKGKAYTNYFGRCNVAEHEKLILLYQLKPEKDSDEAVTYSLGKFGQRALDFYSIHVTKESTHPVKPLAQIAGNRYASTPVGKALSDACMGTIASFLSKYQDIIIEHQKVVKGNQKRLESLRELAGKENLEYPSVTLPPQPHTKEGVDAYNEVIARVRMWVNLNLWQKLKLSRDDAKPLLRLKGFPSFPLVERQANEVDWWDMVCNVKKLINEKKEDGKVFWQNLAGYKRQEALRPYLSSEEDRKKGKKFARYQLGDLLLHLEKKHGEDWGKVYDEAWERIDKKVEGLSKHIKLEEERRSEDAQSKAALTDWLRAKASFVIEGLKEADKDEFCRCELKLQKWYGDLRGKPFAIEAENSILDISGFSKQYNCAFIWQKDGVKKLNLYLIINYFKGGKLRFKKIKPEAFEANRFYTVINKKSGEIVPMEVNFNFDDPNLIILPLAFGKRQGREFIWNDLLSLETGSLKLANGRVIEKTLYNRRTRQDEPALFVALTFERREVLDSSNIKPMNLIGVDRGENIPAVIALTDPEGCPLSRFKDSLGNPTHILRIGESYKEKQRTIQAKKEVEQRRAGGYSRKYASKAKNLADDMVRNTARDLLYYAVTQDAMLIFENLSRGFGRQGKRTFMAERQYTRMEDWLTAKLAYEGLPSKVYLSKTLAQYTSKTCSNCGFTITSADYDRVLEKLKKTATGWMTTINGKELKVEGQITYYNRYKRQNVVKDLSVELDRLSEESVNNDISSWTKGRSGEALSLLKKRFSHRPVQEKFVCLNCGFETHADEQAALNIARSWLFLRSQEYKKYQTNKTTGNTDKRAFVETWQSFYRKKLKEVWKPAV

SEQ ID NO: 35037 - protein, 978 aa, synthetic construct
  REGION 1..978: note = engineered CasX variant
QEIKRINKIRRRLVKDSNTKKAGKTGPMKTLLVRVMTPDLRERLENLRKKPENIPQPISNTSRANLNKLLTDYTEMKKAILHVYWEEFQKDPVGLMSRVAQPASKKIDQNKLKPEMDEKGNLTTAGFACSQCGQPLFVYKLEQVSEKGKAYTNYFGRCNVAEHEKLILLYQLKPEKDSDEAVTYSLGKFGQRALDFYSIHVTKESTHPVKPLAQIAGNRYASAPVGKALSDACMGTIASFLSKYQDIIIEHQKVVKGNQKRLESLRELAGKENLEYPSVTLPPQPHTKEGVDAYNEVIARVRMWVNLNLWQKLKLSRDDAKPLLRLKGFPSFPLVERQANEVDWWDMVCNVKKLINEKKEDGKVFWQNLAGYKRQEALRPYLSSEEDRKKGKKFARYQLGDLLLHLEKKHGEDWGKVYDEAWERIDKKVEGLSKHIKLEEERRSEDAQSKAALTDWLRAKASFVIEGLKEADKDEFCRCELKLQKWYGDLRGKPFAIEAENSILDISGFSKQYNCAFIWQKDGVKKLNLYLIINYFKGGKLRFKKIKPEAFEANRFYTVINKKSGEIVPMEVNFNFDDPNLIILPLAFGKRQGREFIWNDLLSLETGSLKLANGRVIEKTLYNRRTRQDEPALFVALTFERREVLDSSNIKPMNLIGVDRGENIPAVIALTDPEGCPLSRFKDSLGNPTHILRIGESYKEKQRTIQAKKEVEQRRAGGYSRKYASKAKNLADDMVRNTARDLLYYAVTQDAMLIFENLSRGFGRQGKRTFMAERQYTRMEDWLTAKLAYEGLPSKVYLSKTLAQYTSKTCSNCGFTITSADYDRVLEKLKKTATGWMTTINGKELKVEGQITYYNRYKRQNVVKDLSVELDRLSEESVNNDISSWTKGRSGEALSLLKKRFSHRPVQEKFVCLNCGFETHADEQAALNIARSWLFLRSQEYKKYQTNKTTGNTDKRAFVETWQSFYRKKLKEVWKPAV

SEQ ID NO: 35038 - protein, 978 aa, synthetic construct
  REGION 1..978: note = engineered CasX variant
QEIKRINKIRRRLVKDSNTKKAGKTGPMKTLLVRVMTPDLRERLENLRKKPENIPQPISNTSRANLNKLLTDYTEMKKAILHVYWEEFQKDPVGLMSRVAQPASKKIDQNKLKPEMDEKGNLTTAGFACSQCGQPLFVYKLEQVSEKGKAYTNYFGRCNVAEHEKLILLYQLKPEKDSDEAVTYSLGKFGQRALDFYSIHVTKESTHPVKPLAQIAGNRYASVPVGKALSDACMGTIASFLSKYQDIIIEHQKVVKGNQKRLESLRELAGKENLEYPSVTLPPQPHTKEGVDAYNEVIARVRMWVNLNLWQKLKLSRDDAKPLLRLKGFPSFPLVERQANEVDWWDMVCNVKKLINEKKEDGKVFWQNLAGYKRQEALRPYLSSEEDRKKGKKFARYQLGDLLLHLEKKHGEDWGKVYDEAWERIDKKVEGLSKHIKLEEERRSEDAQSKAALTDWLRAKASFVIEGLKEADKDEFCRCELKLQKWYGDLRGKPFAIEAENSILDISGFSKQYNCAFIWQKDGVKKLNLYLIINYFKGGKLRFKKIKPEAFEANRFYTVINKKSGEIVPMEVNFNFDDPNLIILPLAFGKRQGREFIWNDLLSLETGSLKLANGRVIEKTLYNRRTRQDEPALFVALTFERREVLDSSNIKPMNLIGVDRGENIPAVIALTDPEGCPLSRFKDSLGNPTHILRIGESYKEKQRTIQAKKEVEQRRAGGYSRKYASKAKNLADDMVRNTARDLLYYAVTQDAMLIFENLSRGFGRQGKRTFMAERQYTRMEDWLTAKLAYEGLPSKVYLSKTLAQYTSKTCSNCGFTITSADYDRVLEKLKKTATGWMTTINGKELKVEGQITYYNRYKRQNVVKDLSVELDRLSEESVNNDISSWTKGRSGEALSLLKKRFSHRPVQEKFVCLNCGFETHADEQAALNIARSWLFLRSQEYKKYQTNKTTGNTDKRAFVETWQSFYRKKLKEVWKPAV

SEQ ID NO: 35039 - protein, 978 aa, synthetic construct
  REGION 1..978: note = engineered CasX variant
QEIKRINKIRRRLVKDSNTKKAGKTGPMKTLLVRVMTPDLRERLENLRKKPENIPQPISNTSRANLNKLLTDYTEMKKAILHVYWEEFQKDPVGLMSRVAQPASKKIDQNKLKPEMDEKGNLTTAGFACSQCGQPLFVYKLEQVSEKGKAYTNYFGRCNVAEHEKLIKLYQLKPEKDSDEAVTYSLGKFGQRALDFYSIHVTKESTHPVKPLAQIAGNRYASGPVGKALSDACMGTIASFLSKYQDIIIEHQKVVKGNQKRLESLRELAGKENLEYPSVTLPPQPHTKEGVDAYNEVIARVRMWVNLNLWQKLKLSRDDAKPLLRLKGFPSFPLVERQANEVDWWDMVCNVKKLINEKKEDGKVFWQNLAGYKRQEALRPYLSSEEDRKKGKKFARYQLGDLLLHLEKKHGEDWGKVYDEAWERIDKKVEGLSKHIKLEEERRSEDAQSKAALTDWLRAKASFVIEGLKEADKDEFCRCELKLQKWYGDLRGKPFAIEAENSILDISGFSKQYNCAFIWQKDGVKKLNLYLIINYFKGGKLRFKKIKPEAFEANRFYTVINKKSGEIVPMEVNFNFDDPNLIILPLAFGKRQGREFIWNDLLSLETGSLKLANGRVIEKTLYNRRTRQDEPALFVALTFERREVLDSSNIKPMNLIGVDRGENIPAVIALTDPEGCPLSRFKDSLGNPTHILRIGESYKEKQRTIQAKKEVEQRRAGGYSRKYASKAKNLADDMVRNTARDLLYYAVTQDAMLIFENLSRGFGRQGKRTFMAERQYTRMEDWLTAKLAYEGLPSKVYLSKTLAQYTSKTCSNCGFTITSADYDRVLEKLKKTATGWMTTINGKELKVEGQITYYNRYKRQNVVKDLSVELDRLSEESVNNDISSWTKGRSGEALSLLKKRFSHRPVQEKFVCLNCGFETHADEQAALNIARSWLFLRSQEYKKYQTNKTTGNTDKRAFVETWQSFYRKKLKEVWKPAV

SEQ ID NO: 35040 - protein, 977 aa, synthetic construct
  REGION 1..977: note = engineered CasX variant
QEIKRINKIRRRLVKDSNTKKAGKTGPMKTLLVRVMTPDLRERLENLRKKPENIPQPISNTSRANLNKLLTDYTEMKKAILHVYWEEFQKDPVGLMSRVAQPASKKIDQNKLKPEMDEKGNLTTAGFACSQCGQPLFVYKLEQVSEKGKAYTNYFGRCNVAEHEKLILLYQLKPEKDSDEAVTYSLGKFGQRALDFYSIHVTKESTHPVKPLAQIAGNRYASPVGKALSDACMGTIASFLSKYQDIIIEHQKVVKGNQKRLESLRELAGKENLEYPSVTLPPQPHTKEGVDAYNEVIARVRMWVNLNLWQKLKLSRDDAKPLLRLKGFPSFPLVERQANEVDWWDMVCNVKKLINEKKEDGKVFWQNLAGYKRQEALRPYLSSEEDRKKGKKFARYQLGDLLLHLEKKHGEDWGKVYDEAWERIDKKVEGLSKHIKLEEERRSEDAQSKAALTDWLRAKASFVIEGLKEADKDEFCRCELKLQKWYGDLRGKPFAIEAENSILDISGFSKQYNCAFIWQKDGVKKLNLYLIINYFKGGKLRFKKIKPEAFEANRFYTVINKKSGEIVPMEVNFNFDDPNLIILPLAFGKRQGREFIWNDLLSLETGSLKLANGRVIEKTLYNRRTRQDEPALFVALTFERREVLDSSNIKPMNLIGVDRGENIPAVIALTDPEGCPLSRFKDSLGNPTHILRIGESYKEKQRTIQAKKEVEQRRAGGYSRKYASKAKNLADDMVRNTARDLLYYAVTQDAMLIFENLSRGFGRQGKRTFMAERQYTRMEDWLTAKLAYEGLPSKVYLSKTLAQYTSKTCSNCGFTITSADYDRVLEKLKKTATGWMTTINGKELKVEGQITYYNRYKRQNVVKDLSVELDRLSEESVNNDISSWTKGRSGEALSLLKKRFSHRPVQEKFVCLNCGFETHADEQAALNIARSWLFLRSQEYKKYQTNKTTGNTDKRAFVETWQSFYRKKLKEVWKPAV

SEQ ID NO: 35041 - protein, 979 aa, synthetic construct
  REGION 1..979: note = engineered CasX variant
QEIKRINKIRRRLVKDSNTKKAGKTGPMKTLLVRVMTPDLRERLENLRKKPENIPQPISNTSRANLNKLLTDYTEMKKAILHVYWEEFQKDPVGLMSRVAQPASKKIDQNKLKPEMDEKGNLTTAGFACSQCGQPLFVYKLEQVSEKGKAYTNYFGRCNVAEHEKLILLYQLKPEKDSDEAVTYSLGKFGQRALDFYSIHVTKESTHPVKPLAQIAGNRYASYPVGKALSDACMGTIASFLSKYQDIIIEHQKVVKGNQKRLESLRELAGKENLEYPSVTLPPQPHTKEGVDAYNEVIARVRMWVNLNLWQKLKLSRDDAKPLLRLKGFPSFPLVERQANEVDWWDMVCNVKKLINEKKEDGKVFWQNLAGYKRQEALRPYLSSEEDRKKGKKFARYQLGDLLLHLEKKHGEDWGKVYDEAWERIDKKVEGLSKHIKLEEERRSEDAQSKAALTDWLRAKASFVIEGLKEADKDEFCRCELKLQKWYGDLRGKPFAIEAENSILDISGFSKQYNCAFIWQKDGVKKLNLYLIINYFKGGKLRFKKIKPEAFEANRFYTVINKKSGEIVPMEVNFNFDDPNLIILPLAFGKRQGREFIWNDLLSLETGSLKLANGRVIEKTLYNRRTRQDEPALFVALTFERREVLDSSNIKPMNLIGVDRGENIPAVIALTDPEGCPLSRFKDSLGNPTHILRIGESYKEKQRTIQAKKEVEQRRAGGYSRKYASKAKNLADDMVRNTARDLLYYAVTQDAMLIFENLSRGFGRQGKRTFMAERQYTRMEDWLTAKLAYEGPLPSKTYLSKTLAQYTSKTCSNCGFTITSADYDRVLEKLKKTATGWMTTINGKELKVEGQITYYNRYKRQNVVKDLSVELDRLSEESVNNDISSWTKGRSGEALSLLKKRFSHRPVQEKFVCLNCGFETHADEQAALNIARSWLFLRSQEYKKYQTNKTTGNTDKRAFVETWQSFYRKKLKEVWKPAV

SEQ ID NO: 35042 - protein, 979 aa, synthetic construct
  REGION 1..979: note = engineered CasX variant
QEIKRINKIRRRLVKDSNTKKAGKTGPMKTLLVRVMTPDLRERLENLRKKPENIPQPISNTSRANLNKLLTDYTEMKKAILHVYWEEFQKDPVGLMSRVAQPASKKIDQNKLKPEMDEKGNLTTAGFACSQCGQPLFVYKLEQVSEKGKAYTNYFGRCNVAEHEKLILLYQLKPEKDSDEAVTYSLGKFGQRALDFYSIHVTKESTHPVKPLAQIAGNRYASHPVGKALSDACMGTIASFLSKYQDIIIEHQKVVKGNQKRLESLRELAGKENLEYPSVTLPPQPHTKEGVDAYNEVIARVRMWVNLNLWQKLKLSRDDAKPLLRLKGFPSFPLVERQANEVDWWDMVCNVKKLINEKKEDGKVFWQNLAGYKRQEALRPYLSSEEDRKKGKKFARYQLGDLLLHLEKKHGEDWGKVYDEAWERIDKKVEGLSKHIKLEEERRSEDAQSKAALTDWLRAKASFVIEGLKEADKDEFCRCELKLQKWYGDLRGKPFAIEAENSILDISGFSKQYNCAFIWQKDGVKKLNLYLIINYFKGGKLRFKKIKPEAFEANRFYTVINKKSGEIVPMEVNFNFDDPNLIILPLAFGKRQGREFIWNDLLSLETGSLKLANGRVIEKTLYNRRTRQDEPALFVALTFERREVLDSSNIKPMNLIGVDRGENIPAVIALTDPEGCPLSRFKDSLGNPTHILRIGESYKEKQRTIQAKKEVEQRRAGGYSRKYASKAKNLADDMVRNTARDLLYYAVTQDAMLIFENLSRGFGRQGKRTFMAERQYTRMEDWLTAKLAYEGPLPSKTYLSKTLAQYTSKTCSNCGFTITSADYDRVLEKLKKTATGWMTTINGKELKVEGQITYYNRYKRQNVVKDLSVELDRLSEESVNNDISSWTKGRSGEALSLLKKRFSHRPVQEKFVCLNCGFETHADEQAALNIARSWLFLRSQEYKKYQTNKTTGNTDKRAFVETWQSFYRKKLKEVWKPAV

SEQ ID NO: 35043 - protein, 979 aa, synthetic construct
  REGION 1..979: note = engineered CasX variant
QEIKRINKIRRRLVKDSNTKKAGKTGPMKTLLVRVMTPDLRERLENLRKKPENIPQPISNTSRANLNKLLTDYTEMKKAILHVYWEEFQKDPVGLMSRVAQPASKKIDQNKLKPEMDEKGNLTTAGFACSQCGQPLFVYKLEQVSEKGKAYTNYFGRCNVAEHEKLILLYQLKPEKDSDEAVTYSLGKFGQRALDFYSIHVTKESTHPVKPLAQIAGNRYASSPVGKALSDACMGTIASFLSKYQDIIIEHQKVVKGNQKRLESLRELAGKENLEYPSVTLPPQPHTKEGVDAYNEVIARVRMWVNLNLWQKLKLSRDDAKPLLRLKGFPSFPLVERQANEVDWWDMVCNVKKLINEKKEDGKVFWQNLAGYKRQEALRPYLSSEEDRKKGKKFARYQLGDLLLHLEKKHGEDWGKVYDEAWERIDKKVEGLSKHIKLEEERRSEDAQSKAALTDWLRAKASFVIEGLKEADKDEFCRCELKLQKWYGDLRGKPFAIEAENSILDISGFSKQYNCAFIWQKDGVKKLNLYLIINYFKGGKLRFKKIKPEAFEANRFYTVINKKSGEIVPMEVNFNFDDPNLIILPLAFGKRQGREFIWNDLLSLETGSLKLANGRVIEKTLYNRRTRQDEPALFVALTFERREVLDSSNIKPMNLIGVDRGENIPAVIALTDPEGCPLSRFKDSLGNPTHILRIGESYKEKQRTIQAKKEVEQRRAGGYSRKYASKAKNLADDMVRNTARDLLYYAVTQDAMLIFENLSRGFGRQGKRTFMAERQYTRMEDWLTAKLAYEGPLPSKTYLSKTLAQYTSKTCSNCGFTITSADYDRVLEKLKKTATGWMTTINGKELKVEGQITYYNRYKRQNVVKDLSVELDRLSEESVNNDISSWTKGRSGEALSLLKKRFSHRPVQEKFVCLNCGFETHADEQAALNIARSWLFLRSQEYKKYQTNKTTGNTDKRAFVETWQSFYRKKLKEVWKPAV

SEQ ID NO: 35044 - protein, 979 aa, synthetic construct
  REGION 1..979: note = engineered CasX variant
QEIKRINKIRRRLVKDSNTKKAGKTGPMKTLLVRVMTPDLRERLENLRKKPENIPQPISNTSRANLNKLLTDYTEMKKAILHVYWEEFQKDPVGLMSRVAQPASKKIDQNKLKPEMDEKGNLTTAGFACSQCGQPLFVYKLEQVSEKGKAYTNYFGRCNVAEHEKLILLYQLKPEKDSDEAVTYSLGKFGQRALDFYSIHVTKESTHPVKPLAQIAGNRYASTPVGKALSDACMGTIASFLSKYQDIIIEHQKVVKGNQKRLESLRELAGKENLEYPSVTLPPQPHTKEGVDAYNEVIARVRMWVNLNLWQKLKLSRDDAKPLLRLKGFPSFPLVERQANEVDWWDMVCNVKKLINEKKEDGKVFWQNLAGYKRQEALRPYLSSEEDRKKGKKFARYQLGDLLLHLEKKHGEDWGKVYDEAWERIDKKVEGLSKHIKLEEERRSEDAQSKAALTDWLRAKASFVIEGLKEADKDEFCRCELKLQKWYGDLRGKPFAIEAENSILDISGFSKQYNCAFIWQKDGVKKLNLYLIINYFKGGKLRFKKIKPEAFEANRFYTVINKKSGEIVPMEVNFNFDDPNLIILPLAFGKRQGREFIWNDLLSLETGSLKLANGRVIEKTLYNRRTRQDEPALFVALTFERREVLDSSNIKPMNLIGVDRGENIPAVIALTDPEGCPLSRFKDSLGNPTHILRIGESYKEKQRTIQAKKEVEQRRAGGYSRKYASKAKNLADDMVRNTARDLLYYAVTQDAMLIFENLSRGFGRQGKRTFMAERQYTRMEDWLTAKLAYEGPLPSKTYLSKTLAQYTSKTCSNCGFTITSADYDRVLEKLKKTATGWMTTINGKELKVEGQITYYNRYKRQNVVKDLSVELDRLSEESVNNDISSWTKGRSGEALSLLKKRFSHRPVQEKFVCLNCGFETHADEQAALNIARSWLFLRSQEYKKYQTNKTTGNTDKRAFVETWQSFYRKKLKEVWKPAV

SEQ ID NO: 35045 - protein, 979 aa, synthetic construct
  REGION 1..979: note = engineered CasX variant
QEIKRINKIRRRLVKDSNTKKAGKTGPMKTLLVRVMTPDLRERLENLRKKPENIPQPISNTSRANLNKLLTDYTEMKKAILHVYWEEFQKDPVGLMSRVAQPASKKIDQNKLKPEMDEKGNLTTAGFACSQCGQPLFVYKLEQVSEKGKAYTNYFGRCNVAEHEKLILLYQLKPEKDSDEAVTYSLGKFGQRALDFYSIHVTKESTHPVKPLAQIAGNRYASAPVGKALSDACMGTIASFLSKYQDIIIEHQKVVKGNQKRLESLRELAGKENLEYPSVTLPPQPHTKEGVDAYNEVIARVRMWVNLNLWQKLKLSRDDAKPLLRLKGFPSFPLVERQANEVDWWDMVCNVKKLINEKKEDGKVFWQNLAGYKRQEALRPYLSSEEDRKKGKKFARYQLGDLLLHLEKKHGEDWGKVYDEAWERIDKKVEGLSKHIKLEEERRSEDAQSKAALTDWLRAKASFVIEGLKEADKDEFCRCELKLQKWYGDLRGKPFAIEAENSILDISGFSKQYNCAFIWQKDGVKKLNLYLIINYFKGGKLRFKKIKPEAFEANRFYTVINKKSGEIVPMEVNFNFDDPNLIILPLAFGKRQGREFIWNDLLSLETGSLKLANGRVIEKTLYNRRTRQDEPALFVALTFERREVLDSSNIKPMNLIGVDRGENIPAVIALTDPEGCPLSRFKDSLGNPTHILRIGESYKEKQRTIQAKKEVEQRRAGGYSRKYASKAKNLADDMVRNTARDLLYYAVTQDAMLIFENLSRGFGRQGKRTFMAERQYTRMEDWLTAKLAYEGPLPSKTYLSKTLAQYTSKTCSNCGFTITSADYDRVLEKLKKTATGWMTTINGKELKVEGQITYYNRYKRQNVVKDLSVELDRLSEESVNNDISSWTKGRSGEALSLLKKRFSHRPVQEKFVCLNCGFETHADEQAALNIARSWLFLRSQEYKKYQTNKTTGNTDKRAFVETWQSFYRKKLKEVWKPAV

SEQ ID NO: 35046 - protein, 979 aa, synthetic construct
  REGION 1..979: note = engineered CasX variant
QEIKRINKIRRRLVKDSNTKKAGKTGPMKTLLVRVMTPDLRERLENLRKKPENIPQPISNTSRANLNKLLTDYTEMKKAILHVYWEEFQKDPVGLMSRVAQPASKKIDQNKLKPEMDEKGNLTTAGFACSQCGQPLFVYKLEQVSEKGKAYTNYFGRCNVAEHEKLILLYQLKPEKDSDEAVTYSLGKFGQRALDFYSIHVTKESTHPVKPLAQIAGNRYASVPVGKALSDACMGTIASFLSKYQDIIIEHQKVVKGNQKRLESLRELAGKENLEYPSVTLPPQPHTKEGVDAYNEVIARVRMWVNLNLWQKLKLSRDDAKPLLRLKGFPSFPLVERQANEVDWWDMVCNVKKLINEKKEDGKVFWQNLAGYKRQEALRPYLSSEEDRKKGKKFARYQLGDLLLHLEKKHGEDWGKVYDEAWERIDKKVEGLSKHIKLEEERRSEDAQSKAALTDWLRAKASFVIEGLKEADKDEFCRCELKLQKWYGDLRGKPFAIEAENSILDISGFSKQYNCAFIWQKDGVKKLNLYLIINYFKGGKLRFKKIKPEAFEANRFYTVINKKSGEIVPMEVNFNFDDPNLIILPLAFGKRQGREFIWNDLLSLETGSLKLANGRVIEKTLYNRRTRQDEPALFVALTFERREVLDSSNIKPMNLIGVDRGENIPAVIALTDPEGCPLSRFKDSLGNPTHILRIGESYKEKQRTIQAKKEVEQRRAGGYSRKYASKAKNLADDMVRNTARDLLYYAVTQDAMLIFENLSRGFGRQGKRTFMAERQYTRMEDWLTAKLAYEGPLPSKTYLSKTLAQYTSKTCSNCGFTITSADYDRVLEKLKKTATGWMTTINGKELKVEGQITYYNRYKRQNVVKDLSVELDRLSEESVNNDISSWTKGRSGEALSLLKKRFSHRPVQEKFVCLNCGFETHADEQAALNIARSWLFLRSQEYKKYQTNKTTGNTDKRAFVETWQSFYRKKLKEVWKPAV

SEQ ID NO: 35047 - protein, 979 aa, synthetic construct
  REGION 1..979: note = engineered CasX variant
QEIKRINKIRRRLVKDSNTKKAGKTGPMKTLLVRVMTPDLRERLENLRKKPENIPQPISNTSRANLNKLLTDYTEMKKAILHVYWEEFQKDPVGLMSRVAQPASKKIDQNKLKPEMDEKGNLTTAGFACSQCGQPLFVYKLEQVSEKGKAYTNYFGRCNVAEHEKLIKLYQLKPEKDSDEAVTYSLGKFGQRALDFYSIHVTKESTHPVKPLAQIAGNRYASGPVGKALSDACMGTIASFLSKYQDIIIEHQKVVKGNQKRLESLRELAGKENLEYPSVTLPPQPHTKEGVDAYNEVIARVRMWVNLNLWQKLKLSRDDAKPLLRLKGFPSFPLVERQANEVDWWDMVCNVKKLINEKKEDGKVFWQNLAGYKRQEALRPYLSSEEDRKKGKKFARYQLGDLLLHLEKKHGEDWGKVYDEAWERIDKKVEGLSKHIKLEEERRSEDAQSKAALTDWLRAKASFVIEGLKEADKDEFCRCELKLQKWYGDLRGKPFAIEAENSILDISGFSKQYNCAFIWQKDGVKKLNLYLIINYFKGGKLRFKKIKPEAFEANRFYTVINKKSGEIVPMEVNFNFDDPNLIILPLAFGKRQGREFIWNDLLSLETGSLKLANGRVIEKTLYNRRTRQDEPALFVALTFERREVLDSSNIKPMNLIGVDRGENIPAVIALTDPEGCPLSRFKDSLGNPTHILRIGESYKEKQRTIQAKKEVEQRRAGGYSRKYASKAKNLADDMVRNTARDLLYYAVTQDAMLIFENLSRGFGRQGKRTFMAERQYTRMEDWLTAKLAYEGPLPSKTYLSKTLAQYTSKTCSNCGFTITSADYDRVLEKLKKTATGWMTTINGKELKVEGQITYYNRYKRQNVVKDLSVELDRLSEESVNNDISSWTKGRSGEALSLLKKRFSHRPVQEKFVCLNCGFETHADEQAALNIARSWLFLRSQEYKKYQTNKTTGNTDKRAFVETWQSFYRKKLKEVWKPAV

SEQ ID NO: 35048 - protein, 978 aa, synthetic construct
  REGION 1..978: note = engineered CasX variant
QEIKRINKIRRRLVKDSNTKKAGKTGPMKTLLVRVMTPDLRERLENLRKKPENIPQPISNTSRANLNKLLTDYTEMKKAILHVYWEEFQKDPVGLMSRVAQPASKKIDQNKLKPEMDEKGNLTTAGFACSQCGQPLFVYKLEQVSEKGKAYTNYFGRCNVAEHEKLILLYQLKPEKDSDEAVTYSLGKFGQRALDFYSIHVTKESTHPVKPLAQIAGNRYASPVGKALSDACMGTIASFLSKYQDIIIEHQKVVKGNQKRLESLRELAGKENLEYPSVTLPPQPHTKEGVDAYNEVIARVRMWVNLNLWQKLKLSRDDAKPLLRLKGFPSFPLVERQANEVDWWDMVCNVKKLINEKKEDGKVFWQNLAGYKRQEALRPYLSSEEDRKKGKKFARYQLGDLLLHLEKKHGEDWGKVYDEAWERIDKKVEGLSKHIKLEEERRSEDAQSKAALTDWLRAKASFVIEGLKEADKDEFCRCELKLQKWYGDLRGKPFAIEAENSILDISGFSKQYNCAFIWQKDGVKKLNLYLIINYFKGGKLRFKKIKPEAFEANRFYTVINKKSGEIVPMEVNFNFDDPNLIILPLAFGKRQGREFIWNDLLSLETGSLKLANGRVIEKTLYNRRTRQDEPALFVALTFERREVLDSSNIKPMNLIGVDRGENIPAVIALTDPEGCPLSRFKDSLGNPTHILRIGESYKEKQRTIQAKKEVEQRRAGGYSRKYASKAKNLADDMVRNTARDLLYYAVTQDAMLIFENLSRGFGRQGKRTFMAERQYTRMEDWLTAKLAYEGPLPSKTYLSKTLAQYTSKTCSNCGFTITSADYDRVLEKLKKTATGWMTTINGKELKVEGQITYYNRYKRQNVVKDLSVELDRLSEESVNNDISSWTKGRSGEALSLLKKRFSHRPVQEKFVCLNCGFETHADEQAALNIARSWLFLRSQEYKKYQTNKTTGNTDKRAFVETWQSFYRKKLKEVWKPAV

SEQ ID NO: 35049 - protein, 979 aa, synthetic construct
  REGION 1..979: note = engineered CasX variant
QEIKRINKIRRRLVKDSNTKKAGKTGPMKTLLVRVMTPDLRERLENLRKKPENIPQPISNTSRANLNKLLTDYTEMKKAILHVYWEEFQKDPVGLMSRVAQPASKKIDQNKLKPEMDEKGNLTTAGFACSQCGQPLFVYKLEQVSEKGKAYTNYFGRCNVAEHEKLILLYQLKPEKDSDEAVTYSLGKFGQRALDFYSIHVTKESTHPVKPLAQIAGNRYASYPVGKALSDACMGTIASFLSKYQDIIIEHQKVVKGNQKRLESLRELAGKENLEYPSVTLPPQPHTKEGVDAYNEVIARVRMWVNLNLWQKLKLSRDDAKPLLRLKGFPSFPLVERQANEVDWWDMVCNVKKLINEKKEDGKVFWQNLAGYKRQEALRPYLSSEEDVRKKGKKFARYQLGDLLLHLEKKHGEDWGKVYDEAWERIDKKVEGLSKHIKLEEERRSEDAQSKAALTDWLRAKASFVIEGLKEADKDEFCRCELKLQKWYGDLRGKPFAIEAENSILDISGFSKQYNCAFIWQKDGVKKLNLYLIINYFKGGKLRFKKIKPEAFEANRFYTVINKKSGEIVPMEVNFNFDDPNLIILPLAFGKRQGREFIWNDLLSLETGSLKLANGRVIEKTLYNRRTRQDEPALFVALTFERREVLDSSNIKPMNLIGVDRGENIPAVIALTDPEGCPLSRFKDSLGNPTHILRIGESYKEKQRTIQAKKEVEQRRAGGYSRKYASKAKNLADDMVRNTARDLLYYAVTQDAMLIFENLSRGFGRQGKRTFMAERQYTRMEDWLTAKLAYEGLPSKTYLSKTLAQYTSKTCSNCGFTITSADYDRVLEKLKKTATGWMTTINGKELKVEGQITYYNRYKRQNVVKDLSVELDRLSEESVNNDISSWTKGRSGEALSLLKKRFSHRPVQEKFVCLNCGFETHADEQAALNIARSWLFLRSQEYKKYQTNKTTGNTDKRAFVETWQSFYRKKLKEVWKPAV

SEQ ID NO: 35050 - protein, 979 aa, synthetic construct
  REGION 1..979: note = engineered CasX variant
QEIKRINKIRRRLVKDSNTKKAGKTGPMKTLLVRVMTPDLRERLENLRKKPENIPQPISNTSRANLNKLLTDYTEMKKAILHVYWEEFQKDPVGLMSRVAQPASKKIDQNKLKPEMDEKGNLTTAGFACSQCGQPLFVYKLEQVSEKGKAYTNYFGRCNVAEHEKLILLYQLKPEKDSDEAVTYSLGKFGQRALDFYSIHVTKESTHPVKPLAQIAGNRYASHPVGKALSDACMGTIASFLSKYQDIIIEHQKVVKGNQKRLESLRELAGKENLEYPSVTLPPQPHTKEGVDAYNEVIARVRMWVNLNLWQKLKLSRDDAKPLLRLKGFPSFPLVERQANEVDWWDMVCNVKKLINEKKEDGKVFWQNLAGYKRQEALRPYLSSEEDVRKKGKKFARYQLGDLLLHLEKKHGEDWGKVYDEAWERIDKKVEGLSKHIKLEEERRSEDAQSKAALTDWLRAKASFVIEGLKEADKDEFCRCELKLQKWYGDLRGKPFAIEAENSILDISGFSKQYNCAFIWQKDGVKKLNLYLIINYFKGGKLRFKKIKPEAFEANRFYTVINKKSGEIVPMEVNFNFDDPNLIILPLAFGKRQGREFIWNDLLSLETGSLKLANGRVIEKTLYNRRTRQDEPALFVALTFERREVLDSSNIKPMNLIGVDRGENIPAVIALTDPEGCPLSRFKDSLGNPTHILRIGESYKEKQRTIQAKKEVEQRRAGGYSRKYASKAKNLADDMVRNTARDLLYYAVTQDAMLIFENLSRGFGRQGKRTFMAERQYTRMEDWLTAKLAYEGLPSKTYLSKTLAQYTSKTCSNCGFTITSADYDRVLEKLKKTATGWMTTINGKELKVEGQITYYNRYKRQNVVKDLSVELDRLSEESVNNDISSWTKGRSGEALSLLKKRFSHRPVQEKFVCLNCGFETHADEQAALNIARSWLFLRSQEYKKYQTNKTTGNTDKRAFVETWQSFYRKKLKEVWKPAV

SEQ ID NO: 35051 - protein, 979 aa, synthetic construct
  REGION 1..979: note = engineered CasX variant
QEIKRINKIRRRLVKDSNTKKAGKTGPMKTLLVRVMTPDLRERLENLRKKPENIPQPISNTSRANLNKLLTDYTEMKKAILHVYWEEFQKDPVGLMSRVAQPASKKIDQNKLKPEMDEKGNLTTAGFACSQCGQPLFVYKLEQVSEKGKAYTNYFGRCNVAEHEKLILLYQLKPEKDSDEAVTYSLGKFGQRALDFYSIHVTKESTHPVKPLAQIAGNRYASSPVGKALSDACMGTIASFLSKYQDIIIEHQKVVKGNQKRLESLRELAGKENLEYPSVTLPPQPHTKEGVDAYNEVIARVRMWVNLNLWQKLKLSRDDAKPLLRLKGFPSFPLVERQANEVDWWDMVCNVKKLINEKKEDGKVFWQNLAGYKRQEALRPYLSSEEDVRKKGKKFARYQLGDLLLHLEKKHGEDWGKVYDEAWERIDKKVEGLSKHIKLEEERRSEDAQSKAALTDWLRAKASFVIEGLKEADKDEFCRCELKLQKWYGDLRGKPFAIEAENSILDISGFSKQYNCAFIWQKDGVKKLNLYLIINYFKGGKLRFKKIKPEAFEANRFYTVINKKSGEIVPMEVNFNFDDPNLIILPLAFGKRQGREFIWNDLLSLETGSLKLANGRVIEKTLYNRRTRQDEPALFVALTFERREVLDSSNIKPMNLIGVDRGENIPAVIALTDPEGCPLSRFKDSLGNPTHILRIGESYKEKQRTIQAKKEVEQRRAGGYSRKYASKAKNLADDMVRNTARDLLYYAVTQDAMLIFENLSRGFGRQGKRTFMAERQYTRMEDWLTAKLAYEGLPSKTYLSKTLAQYTSKTCSNCGFTITSADYDRVLEKLKKTATGWMTTINGKELKVEGQITYYNRYKRQNVVKDLSVELDRLSEESVNNDISSWTKGRSGEALSLLKKRFSHRPVQEKFVCLNCGFETHADEQAALNIARSWLFLRSQEYKKYQTNKTTGNTDKRAFVETWQSFYRKKLKEVWKPAV

SEQ ID NO: 35052 - protein, 979 aa, synthetic construct
  REGION 1..979: note = engineered CasX variant
QEIKRINKIRRRLVKDSNTKKAGKTGPMKTLLVRVMTPDLRERLENLRKKPENIPQPISNTSRANLNKLLTDYTEMKKAILHVYWEEFQKDPVGLMSRVAQPASKKIDQNKLKPEMDEKGNLTTAGFACSQCGQPLFVYKLEQVSEKGKAYTNYFGRCNVAEHEKLILLYQLKPEKDSDEAVTYSLGKFGQRALDFYSIHVTKESTHPVKPLAQIAGNRYASTPVGKALSDACMGTIASFLSKYQDIIIEHQKVVKGNQKRLESLRELAGKENLEYPSVTLPPQPHTKEGVDAYNEVIARVRMWVNLNLWQKLKLSRDDAKPLLRLKGFPSFPLVERQANEVDWWDMVCNVKKLINEKKEDGKVFWQNLAGYKRQEALRPYLSSEEDVRKKGKKFARYQLGDLLLHLEKKHGEDWGKVYDEAWERIDKKVEGLSKHIKLEEERRSEDAQSKAALTDWLRAKASFVIEGLKEADKDEFCRCELKLQKWYGDLRGKPFAIEAENSILDISGFSKQYNCAFIWQKDGVKKLNLYLIINYFKGGKLRFKKIKPEAFEANRFYTVINKKSGEIVPMEVNFNFDDPNLIILPLAFGKRQGREFIWNDLLSLETGSLKLANGRVIEKTLYNRRTRQDEPALFVALTFERREVLDSSNIKPMNLIGVDRGENIPAVIALTDPEGCPLSRFKDSLGNPTHILRIGESYKEKQRTIQAKKEVEQRRAGGYSRKYASKAKNLADDMVRNTARDLLYYAVTQDAMLIFENLSRGFGRQGKRTFMAERQYTRMEDWLTAKLAYEGLPSKTYLSKTLAQYTSKTCSNCGFTITSADYDRVLEKLKKTATGWMTTINGKELKVEGQITYYNRYKRQNVVKDLSVELDRLSEESVNNDISSWTKGRSGEALSLLKKRFSHRPVQEKFVCLNCGFETHADEQAALNIARSWLFLRSQEYKKYQTNKTTGNTDKRAFVETWQSFYRKKLKEVWKPAV

SEQ ID NO: 35053 - protein, 979 aa, synthetic construct
  REGION 1..979: note = engineered CasX variant
QEIKRINKIRRRLVKDSNTKKAGKTGPMKTLLVRVMTPDLRERLENLRKKPENIPQPISNTSRANLNKLLTDYTEMKKAILHVYWEEFQKDPVGLMSRVAQPASKKIDQNKLKPEMDEKGNLTTAGFACSQCGQPLFVYKLEQVSEKGKAYTNYFGRCNVAEHEKLILLYQLKPEKDSDEAVTYSLGKFGQRALDFYSIHVTKESTHPVKPLAQIAGNRYASAPVGKALSDACMGTIASFLSKYQDIIIEHQKVVKGNQKRLESLRELAGKENLEYPSVTLPPQPHTKEGVDAYNEVIARVRMWVNLNLWQKLKLSRDDAKPLLRLKGFPSFPLVERQANEVDWWDMVCNVKKLINEKKEDGKVFWQNLAGYKRQEALRPYLSSEEDVRKKGKKFARYQLGDLLLHLEKKHGEDWGKVYDEAWERIDKKVEGLSKHIKLEEERRSEDAQSKAALTDWLRAKASFVIEGLKEADKDEFCRCELKLQKWYGDLRGKPFAIEAENSILDISGFSKQYNCAFIWQKDGVKKLNLYLIINYFKGGKLRFKKIKPEAFEANRFYTVINKKSGEIVPMEVNFNFDDPNLIILPLAFGKRQGREFIWNDLLSLETGSLKLANGRVIEKTLYNRRTRQDEPALFVALTFERREVLDSSNIKPMNLIGVDRGENIPAVIALTDPEGCPLSRFKDSLGNPTHILRIGESYKEKQRTIQAKKEVEQRRAGGYSRKYASKAKNLADDMVRNTARDLLYYAVTQDAMLIFENLSRGFGRQGKRTFMAERQYTRMEDWLTAKLAYEGLPSKTYLSKTLAQYTSKTCSNCGFTITSADYDRVLEKLKKTATGWMTTINGKELKVEGQITYYNRYKRQNVVKDLSVELDRLSEESVNNDISSWTKGRSGEALSLLKKRFSHRPVQEKFVCLNCGFETHADEQAALNIARSWLFLRSQEYKKYQTNKTTGNTDKRAFVETWQSFYRKKLKEVWKPAV

SEQ ID NO: 35054 - protein, 979 aa, synthetic construct
  REGION 1..979: note = engineered CasX variant
QEIKRINKIRRRLVKDSNTKKAGKTGPMKTLLVRVMTPDLRERLENLRKKPENIPQPISNTSRANLNKLLTDYTEMKKAILHVYWEEFQKDPVGLMSRVAQPASKKIDQNKLKPEMDEKGNLTTAGFACSQCGQPLFVYKLEQVSEKGKAYTNYFGRCNVAEHEKLILLYQLKPEKDSDEAVTYSLGKFGQRALDFYSIHVTKESTHPVKPLAQIAGNRYASVPVGKALSDACMGTIASFLSKYQDIIIEHQKVVKGNQKRLESLRELAGKENLEYPSVTLPPQPHTKEGVDAYNEVIARVRMWVNLNLWQKLKLSRDDAKPLLRLKGFPSFPLVERQANEVDWWDMVCNVKKLINEKKEDGKVFWQNLAGYKRQEALRPYLSSEEDVRKKGKKFARYQLGDLLLHLEKKHGEDWGKVYDEAWERIDKKVEGLSKHIKLEEERRSEDAQSKAALTDWLRAKASFVIEGLKEADKDEFCRCELKLQKWYGDLRGKPFAIEAENSILDISGFSKQYNCAFIWQKDGVKKLNLYLIINYFKGGKLRFKKIKPEAFEANRFYTVINKKSGEIVPMEVNFNFDDPNLIILPLAFGKRQGREFIWNDLLSLETGSLKLANGRVIEKTLYNRRTRQDEPALFVALTFERREVLDSSNIKPMNLIGVDRGENIPAVIALTDPEGCPLSRFKDSLGNPTHILRIGESYKEKQRTIQAKKEVEQRRAGGYSRKYASKAKNLADDMVRNTARDLLYYAVTQDAMLIFENLSRGFGRQGKRTFMAERQYTRMEDWLTAKLAYEGLPSKTYLSKTLAQYTSKTCSNCGFTITSADYDRVLEKLKKTATGWMTTINGKELKVEGQITYYNRYKRQNVVKDLSVELDRLSEESVNNDISSWTKGRSGEALSLLKKRFSHRPVQEKFVCLNCGFETHADEQAALNIARSWLFLRSQEYKKYQTNKTTGNTDKRAFVETWQSFYRKKLKEVWKPAV

SEQ ID NO: 35055 - protein, 979 aa, synthetic construct
  REGION 1..979: note = engineered CasX variant
QEIKRINKIRRRLVKDSNTKKAGKTGPMKTLLVRVMTPDLRERLENLRKKPENIPQPISNTSRANLNKLLTDYTEMKKAILHVYWEEFQKDPVGLMSRVAQPASKKIDQNKLKPEMDEKGNLTTAGFACSQCGQPLFVYKLEQVSEKGKAYTNYFGRCNVAEHEKLIKLYQLKPEKDSDEAVTYSLGKFGQRALDFYSIHVTKESTHPVKPLAQIAGNRYASGPVGKALSDACMGTIASFLSKYQDIIIEHQKVVKGNQKRLESLRELAGKENLEYPSVTLPPQPHTKEGVDAYNEVIARVRMWVNLNLWQKLKLSRDDAKPLLRLKGFPSFPLVERQANEVDWWDMVCNVKKLINEKKEDGKVFWQNLAGYKRQEALRPYLSSEEDVRKKGKKFARYQLGDLLLHLEKKHGEDWGKVYDEAWERIDKKVEGLSKHIKLEEERRSEDAQSKAALTDWLRAKASFVIEGLKEADKDEFCRCELKLQKWYGDLRGKPFAIEAENSILDISGFSKQYNCAFIWQKDGVKKLNLYLIINYFKGGKLRFKKIKPEAFEANRFYTVINKKSGEIVPMEVNFNFDDPNLIILPLAFGKRQGREFIWNDLLSLETGSLKLANGRVIEKTLYNRRTRQDEPALFVALTFERREVLDSSNIKPMNLIGVDRGENIPAVIALTDPEGCPLSRFKDSLGNPTHILRIGESYKEKQRTIQAKKEVEQRRAGGYSRKYASKAKNLADDMVRNTARDLLYYAVTQDAMLIFENLSRGFGRQGKRTFMAERQYTRMEDWLTAKLAYEGLPSKTYLSKTLAQYTSKTCSNCGFTITSADYDRVLEKLKKTATGWMTTINGKELKVEGQITYYNRYKRQNVVKDLSVELDRLSEESVNNDISSWTKGRSGEALSLLKKRFSHRPVQEKFVCLNCGFETHADEQAALNIARSWLFLRSQEYKKYQTNKTTGNTDKRAFVETWQSFYRKKLKEVWKPAV

SEQ ID NO: 35056 - protein, 978 aa, synthetic construct
  REGION 1..978: note = engineered CasX variant
QEIKRINKIRRRLVKDSNTKKAGKTGPMKTLLVRVMTPDLRERLENLRKKPENIPQPISNTSRANLNKLLTDYTEMKKAILHVYWEEFQKDPVGLMSRVAQPASKKIDQNKLKPEMDEKGNLTTAGFACSQCGQPLFVYKLEQVSEKGKAYTNYFGRCNVAEHEKLILLYQLKPEKDSDEAVTYSLGKFGQRALDFYSIHVTKESTHPVKPLAQIAGNRYASPVGKALSDACMGTIASFLSKYQDIIIEHQKVVKGNQKRLESLRELAGKENLEYPSVTLPPQPHTKEGVDAYNEVIARVRMWVNLNLWQKLKLSRDDAKPLLRLKGFPSFPLVERQANEVDWWDMVCNVKKLINEKKEDGKVFWQNLAGYKRQEALRPYLSSEEDVRKKGKKFARYQLGDLLLHLEKKHGEDWGKVYDEAWERIDKKVEGLSKHIKLEEERRSEDAQSKAALTDWLRAKASFVIEGLKEADKDEFCRCELKLQKWYGDLRGKPFAIEAENSILDISGFSKQYNCAFIWQKDGVKKLNLYLIINYFKGGKLRFKKIKPEAFEANRFYTVINKKSGEIVPMEVNFNFDDPNLIILPLAFGKRQGREFIWNDLLSLETGSLKLANGRVIEKTLYNRRTRQDEPALFVALTFERREVLDSSNIKPMNLIGVDRGENIPAVIALTDPEGCPLSRFKDSLGNPTHILRIGESYKEKQRTIQAKKEVEQRRAGGYSRKYASKAKNLADDMVRNTARDLLYYAVTQDAMLIFENLSRGFGRQGKRTFMAERQYTRMEDWLTAKLAYEGLPSKTYLSKTLAQYTSKTCSNCGFTITSADYDRVLEKLKKTATGWMTTINGKELKVEGQITYYNRYKRQNVVKDLSVELDRLSEESVNNDISSWTKGRSGEALSLLKKRFSHRPVQEKFVCLNCGFETHADEQAALNIARSWLFLRSQEYKKYQTNKTTGNTDKRAFVETWQSFYRKKLKEVWKPAV

SEQ ID NO: 35057 - protein, 978 aa, synthetic construct
  REGION 1..978: note = engineered CasX variant
QEIKRINKIRRRLVKDSNTKKAGKTGPMKTLLVRVMTPDLRERLENLRKKPENIPQPISNTSRANLNKLLTDYTEMKKAILHVYWEEFQKDPVGLMSRVAQPASKKIDQNKLKPEMDEKGNLTTAGFACSQCGQPLFVYKLEQVSEKGKAYTNYFGRCNVAEHEKLILLYQLKPEKDSDEAVTYSLGKFGQRALDFYSIHVTKESTHPVKPLAQIAGNRYASYPVGKALSDACMGTIASFLSKYQDIIIEHQKVVKGNQKRLESLRELAGKENLEYPSVTLPPQPHTKEGVDAYNEVIARVRMWVNLNLWQKLKLSRDDAKPLLRLKGFPSFPLVERQANEVDWWDMVCNVKKLINEKKEDGKVFWQNLAGYKRQEALRPYLSSEEDRKKGKKFARYQLGDLLLHLEKKHGEDWGKVYDEAWERIDKKVEGLSKHIKLEEERRSEDAQSKAALTDWLRAKASFVIEGLKEADKDEFCRCELKLQKWYGDLRGKPFAIEAENSILDISGFSKQYNCAFIWQKDGVKKLNLYLIINYFKGGKLRFKKIKPEAFEANRFYTVINKKSGEIVPMEVNFNFDDPNLIILPLAFGKRQGREFIWNDLLSLETGSLKLANGRVIEKTLYNRRTRQDEPALFVALTFERREVLDSSNIKPMNLIGVDRGENIPAVIALTDPEGCPLSRFKDSLGNPTHILRIGESYKEKQRTIQAKKEVEQRRAGGYSRKYASKAKNLADDMVRNTARDLLYYAVTQDAMLIFENLSRGFGRQGKRTFMAERQYTRMEDWLTAKLAYEGLPSKTYLSKTLAQYTSKTCSNCGFTITSADYDRMLEKLKKTATGWMTTINGKELKVEGQITYYNRYKRQNVVKDLSVELDRLSEESVNNDISSWTKGRSGEALSLLKKRFSHRPVQEKFVCLNCGFETHADEQAALNIARSWLFLRSQEYKKYQTNKTTGNTDKRAFVETWQSFYRKKLKEVWKPAV

SEQ ID NO: 35058 - protein, 978 aa, synthetic construct
  REGION 1..978: note = engineered CasX variant
QEIKRINKIRRRLVKDSNTKKAGKTGPMKTLLVRVMTPDLRERLENLRKKPENIPQPISNTSRANLNKLLTDYTEMKKAILHVYWEEFQKDPVGLMSRVAQPASKKIDQNKLKPEMDEKGNLTTAGFACSQCGQPLFVYKLEQVSEKGKAYTNYFGRCNVAEHEKLILLYQLKPEKDSDEAVTYSLGKFGQRALDFYSIHVTKESTHPVKPLAQIAGNRYASHPVGKALSDACMGTIASFLSKYQDIIIEHQKVVKGNQKRLESLRELAGKENLEYPSVTLPPQPHTKEGVDAYNEVIARVRMWVNLNLWQKLKLSRDDAKPLLRLKGFPSFPLVERQANEVDWWDMVCNVKKLINEKKEDGKVFWQNLAGYKRQEALRPYLSSEEDRKKGKKFARYQLGDLLLHLEKKHGEDWGKVYDEAWERIDKKVEGLSKHIKLEEERRSEDAQSKAALTDWLRAKASFVIEGLKEADKDEFCRCELKLQKWYGDLRGKPFAIEAENSILDISGFSKQYNCAFIWQKDGVKKLNLYLIINYFKGGKLRFKKIKPEAFEANRFYTVINKKSGEIVPMEVNFNFDDPNLIILPLAFGKRQGREFIWNDLLSLETGSLKLANGRVIEKTLYNRRTRQDEPALFVALTFERREVLDSSNIKPMNLIGVDRGENIPAVIALTDPEGCPLSRFKDSLGNPTHILRIGESYKEKQRTIQAKKEVEQRRAGGYSRKYASKAKNLADDMVRNTARDLLYYAVTQDAMLIFENLSRGFGRQGKRTFMAERQYTRMEDWLTAKLAYEGLPSKTYLSKTLAQYTSKTCSNCGFTITSADYDRMLEKLKKTATGWMTTINGKELKVEGQITYYNRYKRQNVVKDLSVELDRLSEESVNNDISSWTKGRSGEALSLLKKRFSHRPVQEKFVCLNCGFETHADEQAALNIARSWLFLRSQEYKKYQTNKTTGNTDKRAFVETWQSFYRKKLKEVWKPAV

SEQ ID NO: 35059 - protein, 978 aa, synthetic construct
  REGION 1..978: note = engineered CasX variant
QEIKRINKIRRRLVKDSNTKKAGKTGPMKTLLVRVMTPDLRERLENLRKKPENIPQPISNTSRANLNKLLTDYTEMKKAILHVYWEEFQKDPVGLMSRVAQPASKKIDQNKLKPEMDEKGNLTTAGFACSQCGQPLFVYKLEQVSEKGKAYTNYFGRCNVAEHEKLILLYQLKPEKDSDEAVTYSLGKFGQRALDFYSIHVTKESTHPVKPLAQIAGNRYASSPVGKALSDACMGTIASFLSKYQDIIIEHQKVVKGNQKRLESLRELAGKENLEYPSVTLPPQPHTKEGVDAYNEVIARVRMWVNLNLWQKLKLSRDDAKPLLRLKGFPSFPLVERQANEVDWWDMVCNVKKLINEKKEDGKVFWQNLAGYKRQEALRPYLSSEEDRKKGKKFARYQLGDLLLHLEKKHGEDWGKVYDEAWERIDKKVEGLSKHIKLEEERRSEDAQSKAALTDWLRAKASFVIEGLKEADKDEFCRCELKLQKWYGDLRGKPFAIEAENSILDISGFSKQYNCAFIWQKDGVKKLNLYLIINYFKGGKLRFKKIKPEAFEANRFYTVINKKSGEIVPMEVNFNFDDPNLIILPLAFGKRQGREFIWNDLLSLETGSLKLANGRVIEKTLYNRRTRQDEPALFVALTFERREVLDSSNIKPMNLIGVDRGENIPAVIALTDPEGCPLSRFKDSLGNPTHILRIGESYKEKQRTIQAKKEVEQRRAGGYSRKYASKAKNLADDMVRNTARDLLYYAVTQDAMLIFENLSRGFGRQGKRTFMAERQYTRMEDWLTAKLAYEGLPSKTYLSKTLAQYTSKTCSNCGFTITSADYDRMLEKLKKTATGWMTTINGKELKVEGQITYYNRYKRQNVVKDLSVELDRLSEESVNNDISSWTKGRSGEALSLLKKRFSHRPVQEKFVCLNCGFETHADEQAALNIARSWLFLRSQEYKKYQTNKTTGNTDKRAFVETWQSFYRKKLKEVWKPAV

SEQ ID NO: 35060 - protein, 978 aa, synthetic construct
  REGION 1..978: note = engineered CasX variant
QEIKRINKIRRRLVKDSNTKKAGKTGPMKTLLVRVMTPDLRERLENLRKKPENIPQPISNTSRANLNKLLTDYTEMKKAILHVYWEEFQKDPVGLMSRVAQPASKKIDQNKLKPEMDEKGNLTTAGFACSQCGQPLFVYKLEQVSEKGKAYTNYFGRCNVAEHEKLILLYQLKPEKDSDEAVTYSLGKFGQRALDFYSIHVTKESTHPVKPLAQIAGNRYASTPVGKALSDACMGTIASFLSKYQDIIIEHQKVVKGNQKRLESLRELAGKENLEYPSVTLPPQPHTKEGVDAYNEVIARVRMWVNLNLWQKLKLSRDDAKPLLRLKGFPSFPLVERQANEVDWWDMVCNVKKLINEKKEDGKVFWQNLAGYKRQEALRPYLSSEEDRKKGKKFARYQLGDLLLHLEKKHGEDWGKVYDEAWERIDKKVEGLSKHIKLEEERRSEDAQSKAALTDWLRAKASFVIEGLKEADKDEFCRCELKLQKWYGDLRGKPFAIEAENSILDISGFSKQYNCAFIWQKDGVKKLNLYLIINYFKGGKLRFKKIKPEAFEANRFYTVINKKSGEIVPMEVNFNFDDPNLIILPLAFGKRQGREFIWNDLLSLETGSLKLANGRVIEKTLYNRRTRQDEPALFVALTFERREVLDSSNIKPMNLIGVDRGENIPAVIALTDPEGCPLSRFKDSLGNPTHILRIGESYKEKQRTIQAKKEVEQRRAGGYSRKYASKAKNLADDMVRNTARDLLYYAVTQDAMLIFENLSRGFGRQGKRTFMAERQYTRMEDWLTAKLAYEGLPSKTYLSKTLAQYTSKTCSNCGFTITSADYDRMLEKLKKTATGWMTTINGKELKVEGQITYYNRYKRQNVVKDLSVELDRLSEESVNNDISSWTKGRSGEALSLLKKRFSHRPVQEKFVCLNCGFETHADEQAALNIARSWLFLRSQEYKKYQTNKTTGNTDKRAFVETWQSFYRKKLKEVWKPAV

SEQ ID NO: 35061 - protein, 978 aa, synthetic construct
  REGION 1..978: note = engineered CasX variant
QEIKRINKIRRRLVKDSNTKKAGKTGPMKTLLVRVMTPDLRERLENLRKKPENIPQPISNTSRANLNKLLTDYTEMKKAILHVYWEEFQKDPVGLMSRVAQPASKKIDQNKLKPEMDEKGNLTTAGFACSQCGQPLFVYKLEQVSEKGKAYTNYFGRCNVAEHEKLILLYQLKPEKDSDEAVTYSLGKFGQRALDFYSIHVTKESTHPVKPLAQIAGNRYASAPVGKALSDACMGTIASFLSKYQDIIIEHQKVVKGNQKRLESLRELAGKENLEYPSVTLPPQPHTKEGVDAYNEVIARVRMWVNLNLWQKLKLSRDDAKPLLRLKGFPSFPLVERQANEVDWWDMVCNVKKLINEKKEDGKVFWQNLAGYKRQEALRPYLSSEEDRKKGKKFARYQLGDLLLHLEKKHGEDWGKVYDEAWERIDKKVEGLSKHIKLEEERRSEDAQSKAALTDWLRAKASFVIEGLKEADKDEFCRCELKLQKWYGDLRGKPFAIEAENSILDISGFSKQYNCAFIWQKDGVKKLNLYLIINYFKGGKLRFKKIKPEAFEANRFYTVINKKSGEIVPMEVNFNFDDPNLIILPLAFGKRQGREFIWNDLLSLETGSLKLANGRVIEKTLYNRRTRQDEPALFVALTFERREVLDSSNIKPMNLIGVDRGENIPAVIALTDPEGCPLSRFKDSLGNPTHILRIGESYKEKQRTIQAKKEVEQRRAGGYSRKYASKAKNLADDMVRNTARDLLYYAVTQDAMLIFENLSRGFGRQGKRTFMAERQYTRMEDWLTAKLAYEGLPSKTYLSKTLAQYTSKTCSNCGFTITSADYDRMLEKLKKTATGWMTTINGKELKVEGQITYYNRYKRQNVVKDLSVELDRLSEESVNNDISSWTKGRSGEALSLLKKRFSHRPVQEKFVCLNCGFETHADEQAALNIARSWLFLRSQEYKKYQTNKTTGNTDKRAFVETWQSFYRKKLKEVWKPAV

SEQ ID NO: 35062 - protein, 978 aa, synthetic construct
  REGION 1..978: note = engineered CasX variant
QEIKRINKIRRRLVKDSNTKKAGKTGPMKTLLVRVMTPDLRERLENLRKKPENIPQPISNTSRANLNKLLTDYTEMKKAILHVYWEEFQKDPVGLMSRVAQPASKKIDQNKLKPEMDEKGNLTTAGFACSQCGQPLFVYKLEQVSEKGKAYTNYFGRCNVAEHEKLILLYQLKPEKDSDEAVTYSLGKFGQRALDFYSIHVTKESTHPVKPLAQIAGNRYASVPVGKALSDACMGTIASFLSKYQDIIIEHQKVVKGNQKRLESLRELAGKENLEYPSVTLPPQPHTKEGVDAYNEVIARVRMWVNLNLWQKLKLSRDDAKPLLRLKGFPSFPLVERQANEVDWWDMVCNVKKLINEKKEDGKVFWQNLAGYKRQEALRPYLSSEEDRKKGKKFARYQLGDLLLHLEKKHGEDWGKVYDEAWERIDKKVEGLSKHIKLEEERRSEDAQSKAALTDWLRAKASFVIEGLKEADKDEFCRCELKLQKWYGDLRGKPFAIEAENSILDISGFSKQYNCAFIWQKDGVKKLNLYLIINYFKGGKLRFKKIKPEAFEANRFYTVINKKSGEIVPMEVNFNFDDPNLIILPLAFGKRQGREFIWNDLLSLETGSLKLANGRVIEKTLYNRRTRQDEPALFVALTFERREVLDSSNIKPMNLIGVDRGENIPAVIALTDPEGCPLSRFKDSLGNPTHILRIGESYKEKQRTIQAKKEVEQRRAGGYSRKYASKAKNLADDMVRNTARDLLYYAVTQDAMLIFENLSRGFGRQGKRTFMAERQYTRMEDWLTAKLAYEGLPSKTYLSKTLAQYTSKTCSNCGFTITSADYDRMLEKLKKTATGWMTTINGKELKVEGQITYYNRYKRQNVVKDLSVELDRLSEESVNNDISSWTKGRSGEALSLLKKRFSHRPVQEKFVCLNCGFETHADEQAALNIARSWLFLRSQEYKKYQTNKTTGNTDKRAFVETWQSFYRKKLKEVWKPAV

SEQ ID NO: 35063 - protein, 978 aa, synthetic construct
  REGION 1..978: note = engineered CasX variant
QEIKRINKIRRRLVKDSNTKKAGKTGPMKTLLVRVMTPDLRERLENLRKKPENIPQPISNTSRANLNKLLTDYTEMKKAILHVYWEEFQKDPVGLMSRVAQPASKKIDQNKLKPEMDEKGNLTTAGFACSQCGQPLFVYKLEQVSEKGKAYTNYFGRCNVAEHEKLIKLYQLKPEKDSDEAVTYSLGKFGQRALDFYSIHVTKESTHPVKPLAQIAGNRYASGPVGKALSDACMGTIASFLSKYQDIIIEHQKVVKGNQKRLESLRELAGKENLEYPSVTLPPQPHTKEGVDAYNEVIARVRMWVNLNLWQKLKLSRDDAKPLLRLKGFPSFPLVERQANEVDWWDMVCNVKKLINEKKEDGKVFWQNLAGYKRQEALRPYLSSEEDRKKGKKFARYQLGDLLLHLEKKHGEDWGKVYDEAWERIDKKVEGLSKHIKLEEERRSEDAQSKAALTDWLRAKASFVIEGLKEADKDEFCRCELKLQKWYGDLRGKPFAIEAENSILDISGFSKQYNCAFIWQKDGVKKLNLYLIINYFKGGKLRFKKIKPEAFEANRFYTVINKKSGEIVPMEVNFNFDDPNLIILPLAFGKRQGREFIWNDLLSLETGSLKLANGRVIEKTLYNRRTRQDEPALFVALTFERREVLDSSNIKPMNLIGVDRGENIPAVIALTDPEGCPLSRFKDSLGNPTHILRIGESYKEKQRTIQAKKEVEQRRAGGYSRKYASKAKNLADDMVRNTARDLLYYAVTQDAMLIFENLSRGFGRQGKRTFMAERQYTRMEDWLTAKLAYEGLPSKTYLSKTLAQYTSKTCSNCGFTITSADYDRMLEKLKKTATGWMTTINGKELKVEGQITYYNRYKRQNVVKDLSVELDRLSEESVNNDISSWTKGRSGEALSLLKKRFSHRPVQEKFVCLNCGFETHADEQAALNIARSWLFLRSQEYKKYQTNKTTGNTDKRAFVETWQSFYRKKLKEVWKPAV

SEQ ID NO: 35064 - protein, 977 aa, synthetic construct
  REGION 1..977: note = engineered CasX variant
QEIKRINKIRRRLVKDSNTKKAGKTGPMKTLLVRVMTPDLRERLENLRKKPENIPQPISNTSRANLNKLLTDYTEMKKAILHVYWEEFQKDPVGLMSRVAQPASKKIDQNKLKPEMDEKGNLTTAGFACSQCGQPLFVYKLEQVSEKGKAYTNYFGRCNVAEHEKLILLYQLKPEKDSDEAVTYSLGKFGQRALDFYSIHVTKESTHPVKPLAQIAGNRYASPVGKALSDACMGTIASFLSKYQDIIIEHQKVVKGNQKRLESLRELAGKENLEYPSVTLPPQPHTKEGVDAYNEVIARVRMWVNLNLWQKLKLSRDDAKPLLRLKGFPSFPLVERQANEVDWWDMVCNVKKLINEKKEDGKVFWQNLAGYKRQEALRPYLSSEEDRKKGKKFARYQLGDLLLHLEKKHGEDWGKVYDEAWERIDKKVEGLSKHIKLEEERRSEDAQSKAALTDWLRAKASFVIEGLKEADKDEFCRCELKLQKWYGDLRGKPFAIEAENSILDISGFSKQYNCAFIWQKDGVKKLNLYLIINYFKGGKLRFKKIKPEAFEANRFYTVINKKSGEIVPMEVNFNFDDPNLIILPLAFGKRQGREFIWNDLLSLETGSLKLANGRVIEKTLYNRRTRQDEPALFVALTFERREVLDSSNIKPMNLIGVDRGENIPAVIALTDPEGCPLSRFKDSLGNPTHILRIGESYKEKQRTIQAKKEVEQRRAGGYSRKYASKAKNLADDMVRNTARDLLYYAVTQDAMLIFENLSRGFGRQGKRTFMAERQYTRMEDWLTAKLAYEGLPSKTYLSKTLAQYTSKTCSNCGFTITSADYDRMLEKLKKTATGWMTTINGKELKVEGQITYYNRYKRQNVVKDLSVELDRLSEESVNNDISSWTKGRSGEALSLLKKRFSHRPVQEKFVCLNCGFETHADEQAALNIARSWLFLRSQEYKKYQTNKTTGNTDKRAFVETWQSFYRKKLKEVWKPAV

SEQ ID NO: 35065 - protein, 978 aa, synthetic construct
  REGION 1..978: note = engineered CasX variant
QEIKRINKIRRRLVKDSNTKKAGKTGPMKTLLVRVMTPDLRERLENLRKKPENIPQPISNTSRANLNKLLTDYTEMKKAILHVYWEEFQKDPVGLMSRVAQPASKKIDQNKLKPEMDEKGNLTTAGFACSQCGQPLFVYKLEQVSEKGKAYTNYFGRCNVAEHEKLILLYQLKPEKDSDEAVTYSLGKFGQRALDFYSIHVTKESTHPVKPLAQIAGNRYASYPVGKALSDACMGTIASFLSKYQDIIIEHQKVVKGNQKRLESLRELAGKENLEYPSVTLPPQPHTKEGVDAYNEVIARVRMWVNLNLWQKLKLSRDDAKPLLRLKGFPSFPLVERQANEVDWWDMVCNVKKLINEKKEDGKVFWQNLAGYKRQEALRPYLSSEEDRKKGKKFARYQLGDLLLHLEKKHGEDWGKVYDEAWERIDKKVEGLSKHIKLEEERRSEDAQSKAALTDWLRAKASFVIEGLKEADKDEFCRCELKLQKWYGDLRGKPFAIEAENSILDISGFSKQYNCAFIWQKDGVKKLNLYLIINYFKGGKLRFKKIKPEAFEANRFYTVINKKSGEIVPMEVNFNFDDPNLIILPLAFGKRQGREFIWNDLLSLETGSLKLANGRVIEKTLYNRRTRQDEPALFVALTFERREVLDSSNIKPMNLIGVDRGENIPAVIALTDPEGCPLSRFKDSLGNPTHILRIGESYKEKQRTIQAKKEVEQRRAGGYSRKYASKAKNLADDMVRNTARDLLYYAVTQDAMLIFENLSRGFGRQGKRTFMAERQYTRMEDWLTAKLAYEGLPSKTYLSKTLAQYTSKTCSNCGFTITSADYDRVLEKLKKTATGWMTTINGKELKVEGQITYYNRYKRQNVVKDLSVELDRLSEESVNNDISSWTKGRQGEALSLLKKRFSHRPVQEKFVCLNCGFETHADEQAALNIARSWLFLRSQEYKKYQTNKTTGNTDKRAFVETWQSFYRKKLKEVWKPAV

SEQ ID NO: 35066 - protein, 978 aa, synthetic construct
  REGION 1..978: note = engineered CasX variant
QEIKRINKIRRRLVKDSNTKKAGKTGPMKTLLVRVMTPDLRERLENLRKKPENIPQPISNTSRANLNKLLTDYTEMKKAILHVYWEEFQKDPVGLMSRVAQPASKKIDQNKLKPEMDEKGNLTTAGFACSQCGQPLFVYKLEQVSEKGKAYTNYFGRCNVAEHEKLILLYQLKPEKDSDEAVTYSLGKFGQRALDFYSIHVTKESTHPVKPLAQIAGNRYASHPVGKALSDACMGTIASFLSKYQDIIIEHQKVVKGNQKRLESLRELAGKENLEYPSVTLPPQPHTKEGVDAYNEVIARVRMWVNLNLWQKLKLSRDDAKPLLRLKGFPSFPLVERQANEVDWWDMVCNVKKLINEKKEDGKVFWQNLAGYKRQEALRPYLSSEEDRKKGKKFARYQLGDLLLHLEKKHGEDWGKVYDEAWERIDKKVEGLSKHIKLEEERRSEDAQSKAALTDWLRAKASFVIEGLKEADKDEFCRCELKLQKWYGDLRGKPFAIEAENSILDISGFSKQYNCAFIWQKDGVKKLNLYLIINYFKGGKLRFKKIKPEAFEANRFYTVINKKSGEIVPMEVNFNFDDPNLIILPLAFGKRQGREFIWNDLLSLETGSLKLANGRVIEKTLYNRRTRQDEPALFVALTFERREVLDSSNIKPMNLIGVDRGENIPAVIALTDPEGCPLSRFKDSLGNPTHILRIGESYKEKQRTIQAKKEVEQRRAGGYSRKYASKAKNLADDMVRNTARDLLYYAVTQDAMLIFENLSRGFGRQGKRTFMAERQYTRMEDWLTAKLAYEGLPSKTYLSKTLAQYTSKTCSNCGFTITSADYDRVLEKLKKTATGWMTTINGKELKVEGQITYYNRYKRQNVVKDLSVELDRLSEESVNNDISSWTKGRQGEALSLLKKRFSHRPVQEKFVCLNCGFETHADEQAALNIARSWLFLRSQEYKKYQTNKTTGNTDKRAFVETWQSFYRKKLKEVWKPAV

SEQ ID NO: 35067 - protein, 978 aa, synthetic construct
  REGION 1..978: note = engineered CasX variant
QEIKRINKIRRRLVKDSNTKKAGKTGPMKTLLVRVMTPDLRERLENLRKKPENIPQPISNTSRANLNKLLTDYTEMKKAILHVYWEEFQKDPVGLMSRVAQPASKKIDQNKLKPEMDEKGNLTTAGFACSQCGQPLFVYKLEQVSEKGKAYTNYFGRCNVAEHEKLILLYQLKPEKDSDEAVTYSLGKFGQRALDFYSIHVTKESTHPVKPLAQIAGNRYASSPVGKALSDACMGTIASFLSKYQDIIIEHQKVVKGNQKRLESLRELAGKENLEYPSVTLPPQPHTKEGVDAYNEVIARVRMWVNLNLWQKLKLSRDDAKPLLRLKGFPSFPLVERQANEVDWWDMVCNVKKLINEKKEDGKVFWQNLAGYKRQEALRPYLSSEEDRKKGKKFARYQLGDLLLHLEKKHGEDWGKVYDEAWERIDKKVEGLSKHIKLEEERRSEDAQSKAALTDWLRAKASFVIEGLKEADKDEFCRCELKLQKWYGDLRGKPFAIEAENSILDISGFSKQYNCAFIWQKDGVKKLNLYLIINYFKGGKLRFKKIKPEAFEANRFYTVINKKSGEIVPMEVNFNFDDPNLIILPLAFGKRQGREFIWNDLLSLETGSLKLANGRVIEKTLYNRRTRQDEPALFVALTFERREVLDSSNIKPMNLIGVDRGENIPAVIALTDPEGCPLSRFKDSLGNPTHILRIGESYKEKQRTIQAKKEVEQRRAGGYSRKYASKAKNLADDMVRNTARDLLYYAVTQDAMLIFENLSRGFGRQGKRTFMAERQYTRMEDWLTAKLAYEGLPSKTYLSKTLAQYTSKTCSNCGFTITSADYDRVLEKLKKTATGWMTTINGKELKVEGQITYYNRYKRQNVVKDLSVELDRLSEESVNNDISSWTKGRQGEALSLLKKRFSHRPVQEKFVCLNCGFETHADEQAALNIARSWLFLRSQEYKKYQTNKTTGNTDKRAFVETWQSFYRKKLKEVWKPAV

SEQ ID NO: 35068 - protein, 978 aa, synthetic construct
  REGION 1..978: note = engineered CasX variant
QEIKRINKIRRRLVKDSNTKKAGKTGPMKTLLVRVMTPDLRERLENLRKKPENIPQPISNTSRANLNKLLTDYTEMKKAILHVYWEEFQKDPVGLMSRVAQPASKKIDQNKLKPEMDEKGNLTTAGFACSQCGQPLFVYKLEQVSEKGKAYTNYFGRCNVAEHEKLILLYQLKPEKDSDEAVTYSLGKFGQRALDFYSIHVTKESTHPVKPLAQIAGNRYASTPVGKALSDACMGTIASFLSKYQDIIIEHQKVVKGNQKRLESLRELAGKENLEYPSVTLPPQPHTKEGVDAYNEVIARVRMWVNLNLWQKLKLSRDDAKPLLRLKGFPSFPLVERQANEVDWWDMVCNVKKLINEKKEDGKVFWQNLAGYKRQEALRPYLSSEEDRKKGKKFARYQLGDLLLHLEKKHGEDWGKVYDEAWERIDKKVEGLSKHIKLEEERRSEDAQSKAALTDWLRAKASFVIEGLKEADKDEFCRCELKLQKWYGDLRGKPFAIEAENSILDISGFSKQYNCAFIWQKDGVKKLNLYLIINYFKGGKLRFKKIKPEAFEANRFYTVINKKSGEIVPMEVNFNFDDPNLIILPLAFGKRQGREFIWNDLLSLETGSLKLANGRVIEKTLYNRRTRQDEPALFVALTFERREVLDSSNIKPMNLIGVDRGENIPAVIALTDPEGCPLSRFKDSLGNPTHILRIGESYKEKQRTIQAKKEVEQRRAGGYSRKYASKAKNLADDMVRNTARDLLYYAVTQDAMLIFENLSRGFGRQGKRTFMAERQYTRMEDWLTAKLAYEGLPSKTYLSKTLAQYTSKTCSNCGFTITSADYDRVLEKLKKTATGWMTTINGKELKVEGQITYYNRYKRQNVVKDLSVELDRLSEESVNNDISSWTKGRQGEALSLLKKRFSHRPVQEKFVCLNCGFETHADEQAALNIARSWLFLRSQEYKKYQTNKTTGNTDKRAFVETWQSFYRKKLKEVWKPAV

SEQ ID NO: 35069 - protein, 978 aa, synthetic construct
  REGION 1..978: note = engineered CasX variant
QEIKRINKIRRRLVKDSNTKKAGKTGPMKTLLVRVMTPDLRERLENLRKKPENIPQPISNTSRANLNKLLTDYTEMKKAILHVYWEEFQKDPVGLMSRVAQPASKKIDQNKLKPEMDEKGNLTTAGFACSQCGQPLFVYKLEQVSEKGKAYTNYFGRCNVAEHEKLILLYQLKPEKDSDEAVTYSLGKFGQRALDFYSIHVTKESTHPVKPLAQIAGNRYASAPVGKALSDACMGTIASFLSKYQDIIIEHQKVVKGNQKRLESLRELAGKENLEYPSVTLPPQPHTKEGVDAYNEVIARVRMWVNLNLWQKLKLSRDDAKPLLRLKGFPSFPLVERQANEVDWWDMVCNVKKLINEKKEDGKVFWQNLAGYKRQEALRPYLSSEEDRKKGKKFARYQLGDLLLHLEKKHGEDWGKVYDEAWERIDKKVEGLSKHIKLEEERRSEDAQSKAALTDWLRAKASFVIEGLKEADKDEFCRCELKLQKWYGDLRGKPFAIEAENSILDISGFSKQYNCAFIWQKDGVKKLNLYLIINYFKGGKLRFKKIKPEAFEANRFYTVINKKSGEIVPMEVNFNFDDPNLIILPLAFGKRQGREFIWNDLLSLETGSLKLANGRVIEKTLYNRRTRQDEPALFVALTFERREVLDSSNIKPMNLIGVDRGENIPAVIALTDPEGCPLSRFKDSLGNPTHILRIGESYKEKQRTIQAKKEVEQRRAGGYSRKYASKAKNLADDMVRNTARDLLYYAVTQDAMLIFENLSRGFGRQGKRTFMAERQYTRMEDWLTAKLAYEGLPSKTYLSKTLAQYTSKTCSNCGFTITSADYDRVLEKLKKTATGWMTTINGKELKVEGQITYYNRYKRQNVVKDLSVELDRLSEESVNNDISSWTKGRQGEALSLLKKRFSHRPVQEKFVCLNCGFETHADEQAALNIARSWLFLRSQEYKKYQTNKTTGNTDKRAFVETWQSFYRKKLKEVWKPAV

SEQ ID NO: 35070 - protein, 978 aa, synthetic construct
  REGION 1..978: note = engineered CasX variant
QEIKRINKIRRRLVKDSNTKKAGKTGPMKTLLVRVMTPDLRERLENLRKKPENIPQPISNTSRANLNKLLTDYTEMKKAILHVYWEEFQKDPVGLMSRVAQPASKKIDQNKLKPEMDEKGNLTTAGFACSQCGQPLFVYKLEQVSEKGKAYTNYFGRCNVAEHEKLILLYQLKPEKDSDEAVTYSLGKFGQRALDFYSIHVTKESTHPVKPLAQIAGNRYASVPVGKALSDACMGTIASFLSKYQDIIIEHQKVVKGNQKRLESLRELAGKENLEYPSVTLPPQPHTKEGVDAYNEVIARVRMWVNLNLWQKLKLSRDDAKPLLRLKGFPSFPLVERQANEVDWWDMVCNVKKLINEKKEDGKVFWQNLAGYKRQEALRPYLSSEEDRKKGKKFARYQLGDLLLHLEKKHGEDWGKVYDEAWERIDKKVEGLSKHIKLEEERRSEDAQSKAALTDWLRAKASFVIEGLKEADKDEFCRCELKLQKWYGDLRGKPFAIEAENSILDISGFSKQYNCAFIWQKDGVKKLNLYLIINYFKGGKLRFKKIKPEAFEANRFYTVINKKSGEIVPMEVNFNFDDPNLIILPLAFGKRQGREFIWNDLLSLETGSLKLANGRVIEKTLYNRRTRQDEPALFVALTFERREVLDSSNIKPMNLIGVDRGENIPAVIALTDPEGCPLSRFKDSLGNPTHILRIGESYKEKQRTIQAKKEVEQRRAGGYSRKYASKAKNLADDMVRNTARDLLYYAVTQDAMLIFENLSRGFGRQGKRTFMAERQYTRMEDWLTAKLAYEGLPSKTYLSKTLAQYTSKTCSNCGFTITSADYDRVLEKLKKTATGWMTTINGKELKVEGQITYYNRYKRQNVVKDLSVELDRLSEESVNNDISSWTKGRQGEALSLLKKRFSHRPVQEKFVCLNCGFETHADEQAALNIARSWLFLRSQEYKKYQTNKTTGNTDKRAFVETWQSFYRKKLKEVWKPAV

SEQ ID NO: 35071 - protein, 978 aa, synthetic construct
  REGION 1..978: note = engineered CasX variant
QEIKRINKIRRRLVKDSNTKKAGKTGPMKTLLVRVMTPDLRERLENLRKKPENIPQPISNTSRANLNKLLTDYTEMKKAILHVYWEEFQKDPVGLMSRVAQPASKKIDQNKLKPEMDEKGNLTTAGFACSQCGQPLFVYKLEQVSEKGKAYTNYFGRCNVAEHEKLIKLYQLKPEKDSDEAVTYSLGKFGQRALDFYSIHVTKESTHPVKPLAQIAGNRYASGPVGKALSDACMGTIASFLSKYQDIIIEHQKVVKGNQKRLESLRELAGKENLEYPSVTLPPQPHTKEGVDAYNEVIARVRMWVNLNLWQKLKLSRDDAKPLLRLKGFPSFPLVERQANEVDWWDMVCNVKKLINEKKEDGKVFWQNLAGYKRQEALRPYLSSEEDRKKGKKFARYQLGDLLLHLEKKHGEDWGKVYDEAWERIDKKVEGLSKHIKLEEERRSEDAQSKAALTDWLRAKASFVIEGLKEADKDEFCRCELKLQKWYGDLRGKPFAIEAENSILDISGFSKQYNCAFIWQKDGVKKLNLYLIINYFKGGKLRFKKIKPEAFEANRFYTVINKKSGEIVPMEVNFNFDDPNLIILPLAFGKRQGREFIWNDLLSLETGSLKLANGRVIEKTLYNRRTRQDEPALFVALTFERREVLDSSNIKPMNLIGVDRGENIPAVIALTDPEGCPLSRFKDSLGNPTHILRIGESYKEKQRTIQAKKEVEQRRAGGYSRKYASKAKNLADDMVRNTARDLLYYAVTQDAMLIFENLSRGFGRQGKRTFMAERQYTRMEDWLTAKLAYEGLPSKTYLSKTLAQYTSKTCSNCGFTITSADYDRVLEKLKKTATGWMTTINGKELKVEGQITYYNRYKRQNVVKDLSVELDRLSEESVNNDISSWTKGRQGEALSLLKKRFSHRPVQEKFVCLNCGFETHADEQAALNIARSWLFLRSQEYKKYQTNKTTGNTDKRAFVETWQSFYRKKLKEVWKPAV

SEQ ID NO: 35072 - protein, 977 aa, synthetic construct
  REGION 1..977: note = engineered CasX variant
QEIKRINKIRRRLVKDSNTKKAGKTGPMKTLLVRVMTPDLRERLENLRKKPENIPQPISNTSRANLNKLLTDYTEMKKAILHVYWEEFQKDPVGLMSRVAQPASKKIDQNKLKPEMDEKGNLTTAGFACSQCGQPLFVYKLEQVSEKGKAYTNYFGRCNVAEHEKLILLYQLKPEKDSDEAVTYSLGKFGQRALDFYSIHVTKESTHPVKPLAQIAGNRYASPVGKALSDACMGTIASFLSKYQDIIIEHQKVVKGNQKRLESLRELAGKENLEYPSVTLPPQPHTKEGVDAYNEVIARVRMWVNLNLWQKLKLSRDDAKPLLRLKGFPSFPLVERQANEVDWWDMVCNVKKLINEKKEDGKVFWQNLAGYKRQEALRPYLSSEEDRKKGKKFARYQLGDLLLHLEKKHGEDWGKVYDEAWERIDKKVEGLSKHIKLEEERRSEDAQSKAALTDWLRAKASFVIEGLKEADKDEFCRCELKLQKWYGDLRGKPFAIEAENSILDISGFSKQYNCAFIWQKDGVKKLNLYLIINYFKGGKLRFKKIKPEAFEANRFYTVINKKSGEIVPMEVNFNFDDPNLIILPLAFGKRQGREFIWNDLLSLETGSLKLANGRVIEKTLYNRRTRQDEPALFVALTFERREVLDSSNIKPMNLIGVDRGENIPAVIALTDPEGCPLSRFKDSLGNPTHILRIGESYKEKQRTIQAKKEVEQRRAGGYSRKYASKAKNLADDMVRNTARDLLYYAVTQDAMLIFENLSRGFGRQGKRTFMAERQYTRMEDWLTAKLAYEGLPSKTYLSKTLAQYTSKTCSNCGFTITSADYDRVLEKLKKTATGWMTTINGKELKVEGQITYYNRYKRQNVVKDLSVELDRLSEESVNNDISSWTKGRQGEALSLLKKRFSHRPVQEKFVCLNCGFETHADEQAALNIARSWLFLRSQEYKKYQTNKTTGNTDKRAFVETWQSFYRKKLKEVWKPAV

SEQ ID NO: 35073 - protein, 978 aa, synthetic construct
  REGION 1..978: note = engineered CasX variant
QEIKRINKIRRRLVKDSNTKKAGKTGPMKTLLVRVMTPDLRERLENLRKKPENIPQPISNTSRANLNKLLTDYTEMKKAILHVYWEEFQKDPVGLMSRVAQPASKKIDQNKLKPEMDEKGNLTTAGFACSQCGQPLFVYKLEQVSEKGKAYTNYFGRCNVAEHEKLILLYQLKPEKDSDEAVTYSLGKFGQRALDFYSIHVTKESTHPVKPLAQIAGNRYASYPVGKALSDACMGTIASFLSKYQDIIIEHQKVVKGNQKRLESLRELAGKENLEYPSVTLPPQPHTKEGVDAYNEVIARVRMWVNLNLWQKLKLSRDDAKPLLRLKGFPSFPLVERQANEVDWWDMVCNVKKLINEKKEDGKVFWQNLAGYKRQEALRPYLSSEEDRKKGKKFARYQLGDLLLHLEKKHGEDWGKVYDEAWERIDKKVEGLSKHIKLEEERRSEDAQSKAALTDWLRAKASFVIEGLKEADKDEFCRCELKLQKWYGDLRGKPFAIEAENSILDISGFSKQYNCAFIWQKDGVKKLNLYLIINYFKGGKLRFKKIKPEAFEANRFYTVINKKSGEIVPMEVNFNFDDPNLIILPLAFGKRQGREFIWNDLLSLETGSLKLANGRVIEKTLYNRRTRQDEPALFVALTFERREVLDSSNIKPMNLIGVDRGENIPAVIALTDPEGCPLSRFKDSLGNPTHILRIGESYKEKQRTIQAKKEVEQRRAGGYSRKYASKAKNLADDMVRNTARDLLYYAVTQDAMLIFENLSRGFGRQGKRTFMAERQYTRMEDWLTAKLAYEGLPSKTYLSKTLAQYTSKTCSNCGFTITSADYDRVLEKLKKTATGWMTTINGKELKVEGQITYYNRYKRQNVVKDLSVELDRLSEESVNNDISSWTKGRSGEALSLLKKRFSHRPVQEKFVCLNCEFETHADEQAALNIARSWLFLRSQEYKKYQTNKTTGNTDKRAFVETWQSFYRKKLKEVWKPAV

SEQ ID NO: 35074 - protein, 978 aa, synthetic construct
  REGION 1..978: note = engineered CasX variant
QEIKRINKIRRRLVKDSNTKKAGKTGPMKTLLVRVMTPDLRERLENLRKKPENIPQPISNTSRANLNKLLTDYTEMKKAILHVYWEEFQKDPVGLMSRVAQPASKKIDQNKLKPEMDEKGNLTTAGFACSQCGQPLFVYKLEQVSEKGKAYTNYFGRCNVAEHEKLILLYQLKPEKDSDEAVTYSLGKFGQRALDFYSIHVTKESTHPVKPLAQIAGNRYASHPVGKALSDACMGTIASFLSKYQDIIIEHQKVVKGNQKRLESLRELAGKENLEYPSVTLPPQPHTKEGVDAYNEVIARVRMWVNLNLWQKLKLSRDDAKPLLRLKGFPSFPLVERQANEVDWWDMVCNVKKLINEKKEDGKVFWQNLAGYKRQEALRPYLSSEEDRKKGKKFARYQLGDLLLHLEKKHGEDWGKVYDEAWERIDKKVEGLSKHIKLEEERRSEDAQSKAALTDWLRAKASFVIEGLKEADKDEFCRCELKLQKWYGDLRGKPFAIEAENSILDISGFSKQYNCAFIWQKDGVKKLNLYLIINYFKGGKLRFKKIKPEAFEANRFYTVINKKSGEIVPMEVNFNFDDPNLIILPLAFGKRQGREFIWNDLLSLETGSLKLANGRVIEKTLYNRRTRQDEPALFVALTFERREVLDSSNIKPMNLIGVDRGENIPAVIALTDPEGCPLSRFKDSLGNPTHILRIGESYKEKQRTIQAKKEVEQRRAGGYSRKYASKAKNLADDMVRNTARDLLYYAVTQDAMLIFENLSRGFGRQGKRTFMAERQYTRMEDWLTAKLAYEGLPSKTYLSKTLAQYTSKTCSNCGFTITSADYDRVLEKLKKTATGWMTTINGKELKVEGQITYYNRYKRQNVVKDLSVELDRLSEESVNNDISSWTKGRSGEALSLLKKRFSHRPVQEKFVCLNCEFETHADEQAALNIARSWLFLRSQEYKKYQTNKTTGNTDKRAFVETWQSFYRKKLKEVWKPAV

SEQ ID NO: 35075 - protein, 978 aa, synthetic construct
  REGION 1..978: note = engineered CasX variant
QEIKRINKIRRRLVKDSNTKKAGKTGPMKTLLVRVMTPDLRERLENLRKKPENIPQPISNTSRANLNKLLTDYTEMKKAILHVYWEEFQKDPVGLMSRVAQPASKKIDQNKLKPEMDEKGNLTTAGFACSQCGQPLFVYKLEQVSEKGKAYTNYFGRCNVAEHEKLILLYQLKPEKDSDEAVTYSLGKFGQRALDFYSIHVTKESTHPVKPLAQIAGNRYASSPVGKALSDACMGTIASFLSKYQDIIIEHQKVVKGNQKRLESLRELAGKENLEYPSVTLPPQPHTKEGVDAYNEVIARVRMWVNLNLWQKLKLSRDDAKPLLRLKGFPSFPLVERQANEVDWWDMVCNVKKLINEKKEDGKVFWQNLAGYKRQEALRPYLSSEEDRKKGKKFARYQLGDLLLHLEKKHGEDWGKVYDEAWERIDKKVEGLSKHIKLEEERRSEDAQSKAALTDWLRAKASFVIEGLKEADKDEFCRCELKLQKWYGDLRGKPFAIEAENSILDISGFSKQYNCAFIWQKDGVKKLNLYLIINYFKGGKLRFKKIKPEAFEANRFYTVINKKSGEIVPMEVNFNFDDPNLIILPLAFGKRQGREFIWNDLLSLETGSLKLANGRVIEKTLYNRRTRQDEPALFVALTFERREVLDSSNIKPMNLIGVDRGENIPAVIALTDPEGCPLSRFKDSLGNPTHILRIGESYKEKQRTIQAKKEVEQRRAGGYSRKYASKAKNLADDMVRNTARDLLYYAVTQDAMLIFENLSRGFGRQGKRTFMAERQYTRMEDWLTAKLAYEGLPSKTYLSKTLAQYTSKTCSNCGFTITSADYDRVLEKLKKTATGWMTTINGKELKVEGQITYYNRYKRQNVVKDLSVELDRLSEESVNNDISSWTKGRSGEALSLLKKRFSHRPVQEKFVCLNCEFETHADEQAALNIARSWLFLRSQEYKKYQTNKTTGNTDKRAFVETWQSFYRKKLKEVWKPAV

SEQ ID NO: 35076 - protein, 978 aa, synthetic construct
  REGION 1..978: note = engineered CasX variant
QEIKRINKIRRRLVKDSNTKKAGKTGPMKTLLVRVMTPDLRERLENLRKKPENIPQPISNTSRANLNKLLTDYTEMKKAILHVYWEEFQKDPVGLMSRVAQPASKKIDQNKLKPEMDEKGNLTTAGFACSQCGQPLFVYKLEQVSEKGKAYTNYFGRCNVAEHEKLILLYQLKPEKDSDEAVTYSLGKFGQRALDFYSIHVTKESTHPVKPLAQIAGNRYASTPVGKALSDACMGTIASFLSKYQDIIIEHQKVVKGNQKRLESLRELAGKENLEYPSVTLPPQPHTKEGVDAYNEVIARVRMWVNLNLWQKLKLSRDDAKPLLRLKGFPSFPLVERQANEVDWWDMVCNVKKLINEKKEDGKVFWQNLAGYKRQEALRPYLSSEEDRKKGKKFARYQLGDLLLHLEKKHGEDWGKVYDEAWERIDKKVEGLSKHIKLEEERRSEDAQSKAALTDWLRAKASFVIEGLKEADKDEFCRCELKLQKWYGDLRGKPFAIEAENSILDISGFSKQYNCAFIWQKDGVKKLNLYLIINYFKGGKLRFKKIKPEAFEANRFYTVINKKSGEIVPMEVNFNFDDPNLIILPLAFGKRQGREFIWNDLLSLETGSLKLANGRVIEKTLYNRRTRQDEPALFVALTFERREVLDSSNIKPMNLIGVDRGENIPAVIALTDPEGCPLSRFKDSLGNPTHILRIGESYKEKQRTIQAKKEVEQRRAGGYSRKYASKAKNLADDMVRNTARDLLYYAVTQDAMLIFENLSRGFGRQGKRTFMAERQYTRMEDWLTAKLAYEGLPSKTYLSKTLAQYTSKTCSNCGFTITSADYDRVLEKLKKTATGWMTTINGKELKVEGQITYYNRYKRQNVVKDLSVELDRLSEESVNNDISSWTKGRSGEALSLLKKRFSHRPVQEKFVCLNCEFETHADEQAALNIARSWLFLRSQEYKKYQTNKTTGNTDKRAFVETWQSFYRKKLKEVWKPAV

SEQ ID NO: 35077 - protein, 978 aa, synthetic construct
  REGION 1..978: note = engineered CasX variant
QEIKRINKIRRRLVKDSNTKKAGKTGPMKTLLVRVMTPDLRERLENLRKKPENIPQPISNTSRANLNKLLTDYTEMKKAILHVYWEEFQKDPVGLMSRVAQPASKKIDQNKLKPEMDEKGNLTTAGFACSQCGQPLFVYKLEQVSEKGKAYTNYFGRCNVAEHEKLILLYQLKPEKDSDEAVTYSLGKFGQRALDFYSIHVTKESTHPVKPLAQIAGNRYASAPVGKALSDACMGTIASFLSKYQDIIIEHQKVVKGNQKRLESLRELAGKENLEYPSVTLPPQPHTKEGVDAYNEVIARVRMWVNLNLWQKLKLSRDDAKPLLRLKGFPSFPLVERQANEVDWWDMVCNVKKLINEKKEDGKVFWQNLAGYKRQEALRPYLSSEEDRKKGKKFARYQLGDLLLHLEKKHGEDWGKVYDEAWERIDKKVEGLSKHIKLEEERRSEDAQSKAALTDWLRAKASFVIEGLKEADKDEFCRCELKLQKWYGDLRGKPFAIEAENSILDISGFSKQYNCAFIWQKDGVKKLNLYLIINYFKGGKLRFKKIKPEAFEANRFYTVINKKSGEIVPMEVNFNFDDPNLIILPLAFGKRQGREFIWNDLLSLETGSLKLANGRVIEKTLYNRRTRQDEPALFVALTFERREVLDSSNIKPMNLIGVDRGENIPAVIALTDPEGCPLSRFKDSLGNPTHILRIGESYKEKQRTIQAKKEVEQRRAGGYSRKYASKAKNLADDMVRNTARDLLYYAVTQDAMLIFENLSRGFGRQGKRTFMAERQYTRMEDWLTAKLAYEGLPSKTYLSKTLAQYTSKTCSNCGFTITSADYDRVLEKLKKTATGWMTTINGKELKVEGQITYYNRYKRQNVVKDLSVELDRLSEESVNNDISSWTKGRSGEALSLLKKRFSHRPVQEKFVCLNCEFETHADEQAALNIARSWLFLRSQEYKKYQTNKTTGNTDKRAFVETWQSFYRKKLKEVWKPAV

SEQ ID NO: 35078 - protein, 978 aa, synthetic construct
  REGION 1..978: note = engineered CasX variant
QEIKRINKIRRRLVKDSNTKKAGKTGPMKTLLVRVMTPDLRERLENLRKKPENIPQPISNTSRANLNKLLTDYTEMKKAILHVYWEEFQKDPVGLMSRVAQPASKKIDQNKLKPEMDEKGNLTTAGFACSQCGQPLFVYKLEQVSEKGKAYTNYFGRCNVAEHEKLILLYQLKPEKDSDEAVTYSLGKFGQRALDFYSIHVTKESTHPVKPLAQIAGNRYASVPVGKALSDACMGTIASFLSKYQDIIIEHQKVVKGNQKRLESLRELAGKENLEYPSVTLPPQPHTKEGVDAYNEVIARVRMWVNLNLWQKLKLSRDDAKPLLRLKGFPSFPLVERQANEVDWWDMVCNVKKLINEKKEDGKVFWQNLAGYKRQEALRPYLSSEEDRKKGKKFARYQLGDLLLHLEKKHGEDWGKVYDEAWERIDKKVEGLSKHIKLEEERRSEDAQSKAALTDWLRAKASFVIEGLKEADKDEFCRCELKLQKWYGDLRGKPFAIEAENSILDISGFSKQYNCAFIWQKDGVKKLNLYLIINYFKGGKLRFKKIKPEAFEANRFYTVINKKSGEIVPMEVNFNFDDPNLIILPLAFGKRQGREFIWNDLLSLETGSLKLANGRVIEKTLYNRRTRQDEPALFVALTFERREVLDSSNIKPMNLIGVDRGENIPAVIALTDPEGCPLSRFKDSLGNPTHILRIGESYKEKQRTIQAKKEVEQRRAGGYSRKYASKAKNLADDMVRNTARDLLYYAVTQDAMLIFENLSRGFGRQGKRTFMAERQYTRMEDWLTAKLAYEGLPSKTYLSKTLAQYTSKTCSNCGFTITSADYDRVLEKLKKTATGWMTTINGKELKVEGQITYYNRYKRQNVVKDLSVELDRLSEESVNNDISSWTKGRSGEALSLLKKRFSHRPVQEKFVCLNCEFETHADEQAALNIARSWLFLRSQEYKKYQTNKTTGNTDKRAFVETWQSFYRKKLKEVWKPAV

SEQ ID NO: 35079 - protein, 978 aa, synthetic construct
  REGION 1..978: note = engineered CasX variant
QEIKRINKIRRRLVKDSNTKKAGKTGPMKTLLVRVMTPDLRERLENLRKKPENIPQPISNTSRANLNKLLTDYTEMKKAILHVYWEEFQKDPVGLMSRVAQPASKKIDQNKLKPEMDEKGNLTTAGFACSQCGQPLFVYKLEQVSEKGKAYTNYFGRCNVAEHEKLIKLYQLKPEKDSDEAVTYSLGKFGQRALDFYSIHVTKESTHPVKPLAQIAGNRYASGPVGKALSDACMGTIASFLSKYQDIIIEHQKVVKGNQKRLESLRELAGKENLEYPSVTLPPQPHTKEGVDAYNEVIARVRMWVNLNLWQKLKLSRDDAKPLLRLKGFPSFPLVERQANEVDWWDMVCNVKKLINEKKEDGKVFWQNLAGYKRQEALRPYLSSEEDRKKGKKFARYQLGDLLLHLEKKHGEDWGKVYDEAWERIDKKVEGLSKHIKLEEERRSEDAQSKAALTDWLRAKASFVIEGLKEADKDEFCRCELKLQKWYGDLRGKPFAIEAENSILDISGFSKQYNCAFIWQKDGVKKLNLYLIINYFKGGKLRFKKIKPEAFEANRFYTVINKKSGEIVPMEVNFNFDDPNLIILPLAFGKRQGREFIWNDLLSLETGSLKLANGRVIEKTLYNRRTRQDEPALFVALTFERREVLDSSNIKPMNLIGVDRGENIPAVIALTDPEGCPLSRFKDSLGNPTHILRIGESYKEKQRTIQAKKEVEQRRAGGYSRKYASKAKNLADDMVRNTARDLLYYAVTQDAMLIFENLSRGFGRQGKRTFMAERQYTRMEDWLTAKLAYEGLPSKTYLSKTLAQYTSKTCSNCGFTITSADYDRVLEKLKKTATGWMTTINGKELKVEGQITYYNRYKRQNVVKDLSVELDRLSEESVNNDISSWTKGRSGEALSLLKKRFSHRPVQEKFVCLNCEFETHADEQAALNIARSWLFLRSQEYKKYQTNKTTGNTDKRAFVETWQSFYRKKLKEVWKPAV

SEQ ID NO: 35080 - protein, 977 aa, synthetic construct
  REGION 1..977: note = engineered CasX variant
QEIKRINKIRRRLVKDSNTKKAGKTGPMKTLLVRVMTPDLRERLENLRKKPENIPQPISNTSRANLNKLLTDYTEMKKAILHVYWEEFQKDPVGLMSRVAQPASKKIDQNKLKPEMDEKGNLTTAGFACSQCGQPLFVYKLEQVSEKGKAYTNYFGRCNVAEHEKLILLYQLKPEKDSDEAVTYSLGKFGQRALDFYSIHVTKESTHPVKPLAQIAGNRYASPVGKALSDACMGTIASFLSKYQDIIIEHQKVVKGNQKRLESLRELAGKENLEYPSVTLPPQPHTKEGVDAYNEVIARVRMWVNLNLWQKLKLSRDDAKPLLRLKGFPSFPLVERQANEVDWWDMVCNVKKLINEKKEDGKVFWQNLAGYKRQEALRPYLSSEEDRKKGKKFARYQLGDLLLHLEKKHGEDWGKVYDEAWERIDKKVEGLSKHIKLEEERRSEDAQSKAALTDWLRAKASFVIEGLKEADKDEFCRCELKLQKWYGDLRGKPFAIEAENSILDISGFSKQYNCAFIWQKDGVKKLNLYLIINYFKGGKLRFKKIKPEAFEANRFYTVINKKSGEIVPMEVNFNFDDPNLIILPLAFGKRQGREFIWNDLLSLETGSLKLANGRVIEKTLYNRRTRQDEPALFVALTFERREVLDSSNIKPMNLIGVDRGENIPAVIALTDPEGCPLSRFKDSLGNPTHILRIGESYKEKQRTIQAKKEVEQRRAGGYSRKYASKAKNLADDMVRNTARDLLYYAVTQDAMLIFENLSRGFGRQGKRTFMAERQYTRMEDWLTAKLAYEGLPSKTYLSKTLAQYTSKTCSNCGFTITSADYDRVLEKLKKTATGWMTTINGKELKVEGQITYYNRYKRQNVVKDLSVELDRLSEESVNNDISSWTKGRSGEALSLLKKRFSHRPVQEKFVCLNCEFETHADEQAALNIARSWLFLRSQEYKKYQTNKTTGNTDKRAFVETWQSFYRKKLKEVWKPAV

SEQ ID NO: 35081 - protein, 979 aa, synthetic construct
  REGION 1..979: note = engineered CasX variant
QEIKRINKIRRRLVKDSNTKKAGKTGPMKTLLVRVMTPDLRERLENLRKKPENIPQPISNTSRANLNKLLTDYTEMKKAILHVYWEEFQKDPVGLMSRVAQPASKKIDQNKLKPEMDEKGNLTTAGFACSQCGQPLFVYKLEQVSEKGKAYTNYFGRCNVAEHEKLILLYQLKPEKDSDEAVTYSLGKFGQRALDFYSIHVTKESTHPVKPLAQIAGNRYASYPVGKALSDACMGTIASFLSKYQDIIIEHQKVVKGNQKRLESLRELAGKENLEYPSVTLPPQPHTKEGVDAYNEVIARVRMWVNLNLWQKLKLSRDDAKPLLRLKGFPSFPLVERQANEVDWWDMVCNVKKLINEKKEDGKVFWQNLAGYKRQEALRPYLSSEEDRKKGKKFARYQLGDLLLHLEKKHGEDWGKVYDEAWERIDKKVEGLSKHIKLEEERRSEDAQSKAALTDWLRAKASFVIEGLKEADKDEFCRCELKLQKWYGDLRGKPFAIEAENSILDISGFSKQYNCAFIWQKDGVKKLNLYLIINYFKGGKLRFKKIKPEAFEANRFYTVINKKSGEIVPMEVNFNFDDPNLIILPLAFGKRQGREFIWNDLLSLETGSLKLANGRVIEKTLYNRRTRQDEPALFVALTFERREVLDSSNIKPMNLIGVDRGENIPAVIALTDPEGCPLSRFKDSLGNPTHILRIGESYKEKQRTIQAKKEVEQRRAGGYSRKYASKAKNLADDMVRNTARDLLYYAVTQDAMLIFENLSRGFGRQGKRTFMAERQYTRMEDWLTAKLAYEGLPSKTYLSKTLAQYTSKTCSNCGFTITSADYDRVLEKLKKTATGWMTTINGKELKVEGQITYYNRYKRQNVVKDLSVELDRLSEESVNNDISSWTKGRSGEALSLLKKRFSHRPVQEKFVCLNCGFETHADEQAALNIARSWLFLRSQEYKKYQTNKTSTGNTDKRAFVETWQSFYRKKLKEVWKPAV

SEQ ID NO: 35082 - protein, 979 aa, synthetic construct
  REGION 1..979: note = engineered CasX variant
QEIKRINKIRRRLVKDSNTKKAGKTGPMKTLLVRVMTPDLRERLENLRKKPENIPQPISNTSRANLNKLLTDYTEMKKAILHVYWEEFQKDPVGLMSRVAQPASKKIDQNKLKPEMDEKGNLTTAGFACSQCGQPLFVYKLEQVSEKGKAYTNYFGRCNVAEHEKLILLYQLKPEKDSDEAVTYSLGKFGQRALDFYSIHVTKESTHPVKPLAQIAGNRYASHPVGKALSDACMGTIASFLSKYQDIIIEHQKVVKGNQKRLESLRELAGKENLEYPSVTLPPQPHTKEGVDAYNEVIARVRMWVNLNLWQKLKLSRDDAKPLLRLKGFPSFPLVERQANEVDWWDMVCNVKKLINEKKEDGKVFWQNLAGYKRQEALRPYLSSEEDRKKGKKFARYQLGDLLLHLEKKHGEDWGKVYDEAWERIDKKVEGLSKHIKLEEERRSEDAQSKAALTDWLRAKASFVIEGLKEADKDEFCRCELKLQKWYGDLRGKPFAIEAENSILDISGFSKQYNCAFIWQKDGVKKLNLYLIINYFKGGKLRFKKIKPEAFEANRFYTVINKKSGEIVPMEVNFNFDDPNLIILPLAFGKRQGREFIWNDLLSLETGSLKLANGRVIEKTLYNRRTRQDEPALFVALTFERREVLDSSNIKPMNLIGVDRGENIPAVIALTDPEGCPLSRFKDSLGNPTHILRIGESYKEKQRTIQAKKEVEQRRAGGYSRKYASKAKNLADDMVRNTARDLLYYAVTQDAMLIFENLSRGFGRQGKRTFMAERQYTRMEDWLTAKLAYEGLPSKTYLSKTLAQYTSKTCSNCGFTITSADYDRVLEKLKKTATGWMTTINGKELKVEGQITYYNRYKRQNVVKDLSVELDRLSEESVNNDISSWTKGRSGEALSLLKKRFSHRPVQEKFVCLNCGFETHADEQAALNIARSWLFLRSQEYKKYQTNKTSTGNTDKRAFVETWQSFYRKKLKEVWKPAV

SEQ ID NO: 35083 - protein, 979 aa, synthetic construct
  REGION 1..979: note = engineered CasX variant
QEIKRINKIRRRLVKDSNTKKAGKTGPMKTLLVRVMTPDLRERLENLRKKPENIPQPISNTSRANLNKLLTDYTEMKKAILHVYWEEFQKDPVGLMSRVAQPASKKIDQNKLKPEMDEKGNLTTAGFACSQCGQPLFVYKLEQVSEKGKAYTNYFGRCNVAEHEKLILLYQLKPEKDSDEAVTYSLGKFGQRALDFYSIHVTKESTHPVKPLAQIAGNRYASSPVGKALSDACMGTIASFLSKYQDIIIEHQKVVKGNQKRLESLRELAGKENLEYPSVTLPPQPHTKEGVDAYNEVIARVRMWVNLNLWQKLKLSRDDAKPLLRLKGFPSFPLVERQANEVDWWDMVCNVKKLINEKKEDGKVFWQNLAGYKRQEALRPYLSSEEDRKKGKKFARYQLGDLLLHLEKKHGEDWGKVYDEAWERIDKKVEGLSKHIKLEEERRSEDAQSKAALTDWLRAKASFVIEGLKEADKDEFCRCELKLQKWYGDLRGKPFAIEAENSILDISGFSKQYNCAFIWQKDGVKKLNLYLIINYFKGGKLRFKKIKPEAFEANRFYTVINKKSGEIVPMEVNFNFDDPNLIILPLAFGKRQGREFIWNDLLSLETGSLKLANGRVIEKTLYNRRTRQDEPALFVALTFERREVLDSSNIKPMNLIGVDRGENIPAVIALTDPEGCPLSRFKDSLGNPTHILRIGESYKEKQRTIQAKKEVEQRRAGGYSRKYASKAKNLADDMVRNTARDLLYYAVTQDAMLIFENLSRGFGRQGKRTFMAERQYTRMEDWLTAKLAYEGLPSKTYLSKTLAQYTSKTCSNCGFTITSADYDRVLEKLKKTATGWMTTINGKELKVEGQITYYNRYKRQNVVKDLSVELDRLSEESVNNDISSWTKGRSGEALSLLKKRFSHRPVQEKFVCLNCGFETHADEQAALNIARSWLFLRSQEYKKYQTNKTSTGNTDKRAFVETWQSFYRKKLKEVWKPAV

SEQ ID NO: 35084 - protein, 979 aa, synthetic construct
  REGION 1..979: note = engineered CasX variant
QEIKRINKIRRRLVKDSNTKKAGKTGPMKTLLVRVMTPDLRERLENLRKKPENIPQPISNTSRANLNKLLTDYTEMKKAILHVYWEEFQKDPVGLMSRVAQPASKKIDQNKLKPEMDEKGNLTTAGFACSQCGQPLFVYKLEQVSEKGKAYTNYFGRCNVAEHEKLILLYQLKPEKDSDEAVTYSLGKFGQRALDFYSIHVTKESTHPVKPLAQIAGNRYASTPVGKALSDACMGTIASFLSKYQDIIIEHQKVVKGNQKRLESLRELAGKENLEYPSVTLPPQPHTKEGVDAYNEVIARVRMWVNLNLWQKLKLSRDDAKPLLRLKGFPSFPLVERQANEVDWWDMVCNVKKLINEKKEDGKVFWQNLAGYKRQEALRPYLSSEEDRKKGKKFARYQLGDLLLHLEKKHGEDWGKVYDEAWERIDKKVEGLSKHIKLEEERRSEDAQSKAALTDWLRAKASFVIEGLKEADKDEFCRCELKLQKWYGDLRGKPFAIEAENSILDISGFSKQYNCAFIWQKDGVKKLNLYLIINYFKGGKLRFKKIKPEAFEANRFYTVINKKSGEIVPMEVNFNFDDPNLIILPLAFGKRQGREFIWNDLLSLETGSLKLANGRVIEKTLYNRRTRQDEPALFVALTFERREVLDSSNIKPMNLIGVDRGENIPAVIALTDPEGCPLSRFKDSLGNPTHILRIGESYKEKQRTIQAKKEVEQRRAGGYSRKYASKAKNLADDMVRNTARDLLYYAVTQDAMLIFENLSRGFGRQGKRTFMAERQYTRMEDWLTAKLAYEGLPSKTYLSKTLAQYTSKTCSNCGFTITSADYDRVLEKLKKTATGWMTTINGKELKVEGQITYYNRYKRQNVVKDLSVELDRLSEESVNNDISSWTKGRSGEALSLLKKRFSHRPVQEKFVCLNCGFETHADEQAALNIARSWLFLRSQEYKKYQTNKTSTGNTDKRAFVETWQSFYRKKLKEVWKPAV

SEQ ID NO: 35085 - protein, 979 aa, synthetic construct
  REGION 1..979: note = engineered CasX variant
QEIKRINKIRRRLVKDSNTKKAGKTGPMKTLLVRVMTPDLRERLENLRKKPENIPQPISNTSRANLNKLLTDYTEMKKAILHVYWEEFQKDPVGLMSRVAQPASKKIDQNKLKPEMDEKGNLTTAGFACSQCGQPLFVYKLEQVSEKGKAYTNYFGRCNVAEHEKLILLYQLKPEKDSDEAVTYSLGKFGQRALDFYSIHVTKESTHPVKPLAQIAGNRYASAPVGKALSDACMGTIASFLSKYQDIIIEHQKVVKGNQKRLESLRELAGKENLEYPSVTLPPQPHTKEGVDAYNEVIARVRMWVNLNLWQKLKLSRDDAKPLLRLKGFPSFPLVERQANEVDWWDMVCNVKKLINEKKEDGKVFWQNLAGYKRQEALRPYLSSEEDRKKGKKFARYQLGDLLLHLEKKHGEDWGKVYDEAWERIDKKVEGLSKHIKLEEERRSEDAQSKAALTDWLRAKASFVIEGLKEADKDEFCRCELKLQKWYGDLRGKPFAIEAENSILDISGFSKQYNCAFIWQKDGVKKLNLYLIINYFKGGKLRFKKIKPEAFEANRFYTVINKKSGEIVPMEVNFNFDDPNLIILPLAFGKRQGREFIWNDLLSLETGSLKLANGRVIEKTLYNRRTRQDEPALFVALTFERREVLDSSNIKPMNLIGVDRGENIPAVIALTDPEGCPLSRFKDSLGNPTHILRIGESYKEKQRTIQAKKEVEQRRAGGYSRKYASKAKNLADDMVRNTARDLLYYAVTQDAMLIFENLSRGFGRQGKRTFMAERQYTRMEDWLTAKLAYEGLPSKTYLSKTLAQYTSKTCSNCGFTITSADYDRVLEKLKKTATGWMTTINGKELKVEGQITYYNRYKRQNVVKDLSVELDRLSEESVNNDISSWTKGRSGEALSLLKKRFSHRPVQEKFVCLNCGFETHADEQAALNIARSWLFLRSQEYKKYQTNKTSTGNTDKRAFVETWQSFYRKKLKEVWKPAV

SEQ ID NO: 35086 - protein, 979 aa, synthetic construct
  REGION 1..979: note = engineered CasX variant
QEIKRINKIRRRLVKDSNTKKAGKTGPMKTLLVRVMTPDLRERLENLRKKPENIPQPISNTSRANLNKLLTDYTEMKKAILHVYWEEFQKDPVGLMSRVAQPASKKIDQNKLKPEMDEKGNLTTAGFACSQCGQPLFVYKLEQVSEKGKAYTNYFGRCNVAEHEKLILLYQLKPEKDSDEAVTYSLGKFGQRALDFYSIHVTKESTHPVKPLAQIAGNRYASVPVGKALSDACMGTIASFLSKYQDIIIEHQKVVKGNQKRLESLRELAGKENLEYPSVTLPPQPHTKEGVDAYNEVIARVRMWVNLNLWQKLKLSRDDAKPLLRLKGFPSFPLVERQANEVDWWDMVCNVKKLINEKKEDGKVFWQNLAGYKRQEALRPYLSSEEDRKKGKKFARYQLGDLLLHLEKKHGEDWGKVYDEAWERIDKKVEGLSKHIKLEEERRSEDAQSKAALTDWLRAKASFVIEGLKEADKDEFCRCELKLQKWYGDLRGKPFAIEAENSILDISGFSKQYNCAFIWQKDGVKKLNLYLIINYFKGGKLRFKKIKPEAFEANRFYTVINKKSGEIVPMEVNFNFDDPNLIILPLAFGKRQGREFIWNDLLSLETGSLKLANGRVIEKTLYNRRTRQDEPALFVALTFERREVLDSSNIKPMNLIGVDRGENIPAVIALTDPEGCPLSRFKDSLGNPTHILRIGESYKEKQRTIQAKKEVEQRRAGGYSRKYASKAKNLADDMVRNTARDLLYYAVTQDAMLIFENLSRGFGRQGKRTFMAERQYTRMEDWLTAKLAYEGLPSKTYLSKTLAQYTSKTCSNCGFTITSADYDRVLEKLKKTATGWMTTINGKELKVEGQITYYNRYKRQNVVKDLSVELDRLSEESVNNDISSWTKGRSGEALSLLKKRFSHRPVQEKFVCLNCGFETHADEQAALNIARSWLFLRSQEYKKYQTNKTSTGNTDKRAFVETWQSFYRKKLKEVWKPAV

SEQ ID NO: 35087 - protein, 979 aa, synthetic construct
  REGION 1..979: note = engineered CasX variant
QEIKRINKIRRRLVKDSNTKKAGKTGPMKTLLVRVMTPDLRERLENLRKKPENIPQPISNTSRANLNKLLTDYTEMKKAILHVYWEEFQKDPVGLMSRVAQPASKKIDQNKLKPEMDEKGNLTTAGFACSQCGQPLFVYKLEQVSEKGKAYTNYFGRCNVAEHEKLIKLYQLKPEKDSDEAVTYSLGKFGQRALDFYSIHVTKESTHPVKPLAQIAGNRYASGPVGKALSDACMGTIASFLSKYQDIIIEHQKVVKGNQKRLESLRELAGKENLEYPSVTLPPQPHTKEGVDAYNEVIARVRMWVNLNLWQKLKLSRDDAKPLLRLKGFPSFPLVERQANEVDWWDMVCNVKKLINEKKEDGKVFWQNLAGYKRQEALRPYLSSEEDRKKGKKFARYQLGDLLLHLEKKHGEDWGKVYDEAWERIDKKVEGLSKHIKLEEERRSEDAQSKAALTDWLRAKASFVIEGLKEADKDEFCRCELKLQKWYGDLRGKPFAIEAENSILDISGFSKQYNCAFIWQKDGVKKLNLYLIINYFKGGKLRFKKIKPEAFEANRFYTVINKKSGEIVPMEVNFNFDDPNLIILPLAFGKRQGREFIWNDLLSLETGSLKLANGRVIEKTLYNRRTRQDEPALFVALTFERREVLDSSNIKPMNLIGVDRGENIPAVIALTDPEGCPLSRFKDSLGNPTHILRIGESYKEKQRTIQAKKEVEQRRAGGYSRKYASKAKNLADDMVRNTARDLLYYAVTQDAMLIFENLSRGFGRQGKRTFMAERQYTRMEDWLTAKLAYEGLPSKTYLSKTLAQYTSKTCSNCGFTITSADYDRVLEKLKKTATGWMTTINGKELKVEGQITYYNRYKRQNVVKDLSVELDRLSEESVNNDISSWTKGRSGEALSLLKKRFSHRPVQEKFVCLNCGFETHADEQAALNIARSWLFLRSQEYKKYQTNKTSTGNTDKRAFVETWQSFYRKKLKEVWKPAV

SEQ ID NO: 35088 - protein, 978 aa, synthetic construct
  REGION 1..978: note = engineered CasX variant
QEIKRINKIRRRLVKDSNTKKAGKTGPMKTLLVRVMTPDLRERLENLRKKPENIPQPISNTSRANLNKLLTDYTEMKKAILHVYWEEFQKDPVGLMSRVAQPASKKIDQNKLKPEMDEKGNLTTAGFACSQCGQPLFVYKLEQVSEKGKAYTNYFGRCNVAEHEKLILLYQLKPEKDSDEAVTYSLGKFGQRALDFYSIHVTKESTHPVKPLAQIAGNRYASPVGKALSDACMGTIASFLSKYQDIIIEHQKVVKGNQKRLESLRELAGKENLEYPSVTLPPQPHTKEGVDAYNEVIARVRMWVNLNLWQKLKLSRDDAKPLLRLKGFPSFPLVERQANEVDWWDMVCNVKKLINEKKEDGKVFWQNLAGYKRQEALRPYLSSEEDRKKGKKFARYQLGDLLLHLEKKHGEDWGKVYDEAWERIDKKVEGLSKHIKLEEERRSEDAQSKAALTDWLRAKASFVIEGLKEADKDEFCRCELKLQKWYGDLRGKPFAIEAENSILDISGFSKQYNCAFIWQKDGVKKLNLYLIINYFKGGKLRFKKIKPEAFEANRFYTVINKKSGEIVPMEVNFNFDDPNLIILPLAFGKRQGREFIWNDLLSLETGSLKLANGRVIEKTLYNRRTRQDEPALFVALTFERREVLDSSNIKPMNLIGVDRGENIPAVIALTDPEGCPLSRFKDSLGNPTHILRIGESYKEKQRTIQAKKEVEQRRAGGYSRKYASKAKNLADDMVRNTARDLLYYAVTQDAMLIFENLSRGFGRQGKRTFMAERQYTRMEDWLTAKLAYEGLPSKTYLSKTLAQYTSKTCSNCGFTITSADYDRVLEKLKKTATGWMTTINGKELKVEGQITYYNRYKRQNVVKDLSVELDRLSEESVNNDISSWTKGRSGEALSLLKKRFSHRPVQEKFVCLNCGFETHADEQAALNIARSWLFLRSQEYKKYQTNKTSTGNTDKRAFVETWQSFYRKKLKEVWKPAV

SEQ ID NO: 35089 - protein, 979 aa, synthetic construct
  REGION 1..979: note = engineered CasX variant
QEIKRINKIRRRLVKDSNTKKAGKTGPMKTLLVRVMTPDLRERLENLRKKPENIPQPISNTSRANLNKLLTDYTEMKKAILHVYWEEFQKDPVGLMSRVAQPASKKIDQNKLKPEMDEKGNLTTAGFACSQCGQPLFVYKLEQVSEKGKAYTNYFGRCNVAEHEKLILLYQLKPEKDSDEAVTYSLGKFGQRALDFYSIHVTKESTHPVKPLAQIAGNRYASYPVGKALSDACMGTIASFLSKYQDIIIEHQKVVKGNQKRLESLRELAGKENLEYPSVTLPPQPHTKEGVDAYNEVIARVRMWVNLNLWQKLKLSRDDAKPLLRLKGFPSFPLVERQANEVDWWDMVCNVKKLINEKKEDGKVFWQNLAGYKRQEALRPYLSSEEDRKKGKKFARYQLGDLLLHLEKKHGEDWGKVYDEAWERIDKKVEGLSKHIKLEEERRSEDAQSKAALTDWLRAKASFVIEGLKEADKDEFCRCELKLQKWYGDLRGKPFAIEAENSILDISGFSKQYNCAFIWQKDGVKKLNLYLIINYFKGGKLRFKKIKPEAFEANRFYTVINKKSGEIVPMEVNFNFDDPNLIILPLAFGKRQGREFIWNDLLSLETGSLKLANGRVIEKTLYNRRTRQDEPALFVALTFERREVLDSSNIKPMNLIGVDRGENIPAVIALTDPEGCPLSRFKDSLGNPTHILRIGESYKEKQRTIQAKKEVEQRRAGGYSRKYASKAKNLADDMVRNTARDLLYYAVTQDAMLIFENLSRGFGRQGKRTFMAERQYTRMEDWLTAKLAYEGLPSKTYLSKTLAQYTSKTCSNCGFTITSADYDRVLEKLKKTATGWMTTINGKELKVEGQITYYNRYKRQNVVKDLSVELDRLSEESVNNDISSWTKGRSGEALSLLKKRFSHRPVQEKFVCLNCGFETHADEQAALNIARSWLFLRSQEYKKYQTNKTTGKNTDKRAFVETWQSFYRKKLKEVWKPAV

SEQ ID NO: 35090 - protein, 979 aa, synthetic construct
  REGION 1..979: note = engineered CasX variant
QEIKRINKIRRRLVKDSNTKKAGKTGPMKTLLVRVMTPDLRERLENLRKKPENIPQPISNTSRANLNKLLTDYTEMKKAILHVYWEEFQKDPVGLMSRVAQPASKKIDQNKLKPEMDEKGNLTTAGFACSQCGQPLFVYKLEQVSEKGKAYTNYFGRCNVAEHEKLILLYQLKPEKDSDEAVTYSLGKFGQRALDFYSIHVTKESTHPVKPLAQIAGNRYASHPVGKALSDACMGTIASFLSKYQDIIIEHQKVVKGNQKRLESLRELAGKENLEYPSVTLPPQPHTKEGVDAYNEVIARVRMWVNLNLWQKLKLSRDDAKPLLRLKGFPSFPLVERQANEVDWWDMVCNVKKLINEKKEDGKVFWQNLAGYKRQEALRPYLSSEEDRKKGKKFARYQLGDLLLHLEKKHGEDWGKVYDEAWERIDKKVEGLSKHIKLEEERRSEDAQSKAALTDWLRAKASFVIEGLKEADKDEFCRCELKLQKWYGDLRGKPFAIEAENSILDISGFSKQYNCAFIWQKDGVKKLNLYLIINYFKGGKLRFKKIKPEAFEANRFYTVINKKSGEIVPMEVNFNFDDPNLIILPLAFGKRQGREFIWNDLLSLETGSLKLANGRVIEKTLYNRRTRQDEPALFVALTFERREVLDSSNIKPMNLIGVDRGENIPAVIALTDPEGCPLSRFKDSLGNPTHILRIGESYKEKQRTIQAKKEVEQRRAGGYSRKYASKAKNLADDMVRNTARDLLYYAVTQDAMLIFENLSRGFGRQGKRTFMAERQYTRMEDWLTAKLAYEGLPSKTYLSKTLAQYTSKTCSNCGFTITSADYDRVLEKLKKTATGWMTTINGKELKVEGQITYYNRYKRQNVVKDLSVELDRLSEESVNNDISSWTKGRSGEALSLLKKRFSHRPVQEKFVCLNCGFETHADEQAALNIARSWLFLRSQEYKKYQTNKTTGKNTDKRAFVETWQSFYRKKLKEVWKPAV

SEQ ID NO: 35091 - protein, 979 aa, synthetic construct
  REGION 1..979: note = engineered CasX variant
QEIKRINKIRRRLVKDSNTKKAGKTGPMKTLLVRVMTPDLRERLENLRKKPENIPQPISNTSRANLNKLLTDYTEMKKAILHVYWEEFQKDPVGLMSRVAQPASKKIDQNKLKPEMDEKGNLTTAGFACSQCGQPLFVYKLEQVSEKGKAYTNYFGRCNVAEHEKLILLYQLKPEKDSDEAVTYSLGKFGQRALDFYSIHVTKESTHPVKPLAQIAGNRYASSPVGKALSDACMGTIASFLSKYQDIIIEHQKVVKGNQKRLESLRELAGKENLEYPSVTLPPQPHTKEGVDAYNEVIARVRMWVNLNLWQKLKLSRDDAKPLLRLKGFPSFPLVERQANEVDWWDMVCNVKKLINEKKEDGKVFWQNLAGYKRQEALRPYLSSEEDRKKGKKFARYQLGDLLLHLEKKHGEDWGKVYDEAWERIDKKVEGLSKHIKLEEERRSEDAQSKAALTDWLRAKASFVIEGLKEADKDEFCRCELKLQKWYGDLRGKPFAIEAENSILDISGFSKQYNCAFIWQKDGVKKLNLYLIINYFKGGKLRFKKIKPEAFEANRFYTVINKKSGEIVPMEVNFNFDDPNLIILPLAFGKRQGREFIWNDLLSLETGSLKLANGRVIEKTLYNRRTRQDEPALFVALTFERREVLDSSNIKPMNLIGVDRGENIPAVIALTDPEGCPLSRFKDSLGNPTHILRIGESYKEKQRTIQAKKEVEQRRAGGYSRKYASKAKNLADDMVRNTARDLLYYAVTQDAMLIFENLSRGFGRQGKRTFMAERQYTRMEDWLTAKLAYEGLPSKTYLSKTLAQYTSKTCSNCGFTITSADYDRVLEKLKKTATGWMTTINGKELKVEGQITYYNRYKRQNVVKDLSVELDRLSEESVNNDISSWTKGRSGEALSLLKKRFSHRPVQEKFVCLNCGFETHADEQAALNIARSWLFLRSQEYKKYQTNKTTGKNTDKRAFVETWQSFYRKKLKEVWKPAV

SEQ ID NO: 35092 - protein, 979 aa, synthetic construct
  REGION 1..979: note = engineered CasX variant
QEIKRINKIRRRLVKDSNTKKAGKTGPMKTLLVRVMTPDLRERLENLRKKPENIPQPISNTSRANLNKLLTDYTEMKKAILHVYWEEFQKDPVGLMSRVAQPASKKIDQNKLKPEMDEKGNLTTAGFACSQCGQPLFVYKLEQVSEKGKAYTNYFGRCNVAEHEKLILLYQLKPEKDSDEAVTYSLGKFGQRALDFYSIHVTKESTHPVKPLAQIAGNRYASTPVGKALSDACMGTIASFLSKYQDIIIEHQKVVKGNQKRLESLRELAGKENLEYPSVTLPPQPHTKEGVDAYNEVIARVRMWVNLNLWQKLKLSRDDAKPLLRLKGFPSFPLVERQANEVDWWDMVCNVKKLINEKKEDGKVFWQNLAGYKRQEALRPYLSSEEDRKKGKKFARYQLGDLLLHLEKKHGEDWGKVYDEAWERIDKKVEGLSKHIKLEEERRSEDAQSKAALTDWLRAKASFVIEGLKEADKDEFCRCELKLQKWYGDLRGKPFAIEAENSILDISGFSKQYNCAFIWQKDGVKKLNLYLIINYFKGGKLRFKKIKPEAFEANRFYTVINKKSGEIVPMEVNFNFDDPNLIILPLAFGKRQGREFIWNDLLSLETGSLKLANGRVIEKTLYNRRTRQDEPALFVALTFERREVLDSSNIKPMNLIGVDRGENIPAVIALTDPEGCPLSRFKDSLGNPTHILRIGESYKEKQRTIQAKKEVEQRRAGGYSRKYASKAKNLADDMVRNTARDLLYYAVTQDAMLIFENLSRGFGRQGKRTFMAERQYTRMEDWLTAKLAYEGLPSKTYLSKTLAQYTSKTCSNCGFTITSADYDRVLEKLKKTATGWMTTINGKELKVEGQITYYNRYKRQNVVKDLSVELDRLSEESVNNDISSWTKGRSGEALSLLKKRFSHRPVQEKFVCLNCGFETHADEQAALNIARSWLFLRSQEYKKYQTNKTTGKNTDKRAFVETWQSFYRKKLKEVWKPAV

SEQ ID NO: 35093 - protein, 979 aa, synthetic construct
  REGION 1..979: note = engineered CasX variant
QEIKRINKIRRRLVKDSNTKKAGKTGPMKTLLVRVMTPDLRERLENLRKKPENIPQPISNTSRANLNKLLTDYTEMKKAILHVYWEEFQKDPVGLMSRVAQPASKKIDQNKLKPEMDEKGNLTTAGFACSQCGQPLFVYKLEQVSEKGKAYTNYFGRCNVAEHEKLILLYQLKPEKDSDEAVTYSLGKFGQRALDFYSIHVTKESTHPVKPLAQIAGNRYASAPVGKALSDACMGTIASFLSKYQDIIIEHQKVVKGNQKRLESLRELAGKENLEYPSVTLPPQPHTKEGVDAYNEVIARVRMWVNLNLWQKLKLSRDDAKPLLRLKGFPSFPLVERQANEVDWWDMVCNVKKLINEKKEDGKVFWQNLAGYKRQEALRPYLSSEEDRKKGKKFARYQLGDLLLHLEKKHGEDWGKVYDEAWERIDKKVEGLSKHIKLEEERRSEDAQSKAALTDWLRAKASFVIEGLKEADKDEFCRCELKLQKWYGDLRGKPFAIEAENSILDISGFSKQYNCAFIWQKDGVKKLNLYLIINYFKGGKLRFKKIKPEAFEANRFYTVINKKSGEIVPMEVNFNFDDPNLIILPLAFGKRQGREFIWNDLLSLETGSLKLANGRVIEKTLYNRRTRQDEPALFVALTFERREVLDSSNIKPMNLIGVDRGENIPAVIALTDPEGCPLSRFKDSLGNPTHILRIGESYKEKQRTIQAKKEVEQRRAGGYSRKYASKAKNLADDMVRNTARDLLYYAVTQDAMLIFENLSRGFGRQGKRTFMAERQYTRMEDWLTAKLAYEGLPSKTYLSKTLAQYTSKTCSNCGFTITSADYDRVLEKLKKTATGWMTTINGKELKVEGQITYYNRYKRQNVVKDLSVELDRLSEESVNNDISSWTKGRSGEALSLLKKRFSHRPVQEKFVCLNCGFETHADEQAALNIARSWLFLRSQEYKKYQTNKTTGKNTDKRAFVETWQSFYRKKLKEVWKPAV

SEQ ID NO: 35094 - protein, 979 aa, synthetic construct
  REGION 1..979: note = engineered CasX variant
QEIKRINKIRRRLVKDSNTKKAGKTGPMKTLLVRVMTPDLRERLENLRKKPENIPQPISNTSRANLNKLLTDYTEMKKAILHVYWEEFQKDPVGLMSRVAQPASKKIDQNKLKPEMDEKGNLTTAGFACSQCGQPLFVYKLEQVSEKGKAYTNYFGRCNVAEHEKLILLYQLKPEKDSDEAVTYSLGKFGQRALDFYSIHVTKESTHPVKPLAQIAGNRYASVPVGKALSDACMGTIASFLSKYQDIIIEHQKVVKGNQKRLESLRELAGKENLEYPSVTLPPQPHTKEGVDAYNEVIARVRMWVNLNLWQKLKLSRDDAKPLLRLKGFPSFPLVERQANEVDWWDMVCNVKKLINEKKEDGKVFWQNLAGYKRQEALRPYLSSEEDRKKGKKFARYQLGDLLLHLEKKHGEDWGKVYDEAWERIDKKVEGLSKHIKLEEERRSEDAQSKAALTDWLRAKASFVIEGLKEADKDEFCRCELKLQKWYGDLRGKPFAIEAENSILDISGFSKQYNCAFIWQKDGVKKLNLYLIINYFKGGKLRFKKIKPEAFEANRFYTVINKKSGEIVPMEVNFNFDDPNLIILPLAFGKRQGREFIWNDLLSLETGSLKLANGRVIEKTLYNRRTRQDEPALFVALTFERREVLDSSNIKPMNLIGVDRGENIPAVIALTDPEGCPLSRFKDSLGNPTHILRIGESYKEKQRTIQAKKEVEQRRAGGYSRKYASKAKNLADDMVRNTARDLLYYAVTQDAMLIFENLSRGFGRQGKRTFMAERQYTRMEDWLTAKLAYEGLPSKTYLSKTLAQYTSKTCSNCGFTITSADYDRVLEKLKKTATGWMTTINGKELKVEGQITYYNRYKRQNVVKDLSVELDRLSEESVNNDISSWTKGRSGEALSLLKKRFSHRPVQEKFVCLNCGFETHADEQAALNIARSWLFLRSQEYKKYQTNKTTGKNTDKRAFVETWQSFYRKKLKEVWKPAV

SEQ ID NO: 35095 - protein, 979 aa, synthetic construct
  REGION 1..979: note = engineered CasX variant
QEIKRINKIRRRLVKDSNTKKAGKTGPMKTLLVRVMTPDLRERLENLRKKPENIPQPISNTSRANLNKLLTDYTEMKKAILHVYWEEFQKDPVGLMSRVAQPASKKIDQNKLKPEMDEKGNLTTAGFACSQCGQPLFVYKLEQVSEKGKAYTNYFGRCNVAEHEKLIKLYQLKPEKDSDEAVTYSLGKFGQRALDFYSIHVTKESTHPVKPLAQIAGNRYASGPVGKALSDACMGTIASFLSKYQDIIIEHQKVVKGNQKRLESLRELAGKENLEYPSVTLPPQPHTKEGVDAYNEVIARVRMWVNLNLWQKLKLSRDDAKPLLRLKGFPSFPLVERQANEVDWWDMVCNVKKLINEKKEDGKVFWQNLAGYKRQEALRPYLSSEEDRKKGKKFARYQLGDLLLHLEKKHGEDWGKVYDEAWERIDKKVEGLSKHIKLEEERRSEDAQSKAALTDWLRAKASFVIEGLKEADKDEFCRCELKLQKWYGDLRGKPFAIEAENSILDISGFSKQYNCAFIWQKDGVKKLNLYLIINYFKGGKLRFKKIKPEAFEANRFYTVINKKSGEIVPMEVNFNFDDPNLIILPLAFGKRQGREFIWNDLLSLETGSLKLANGRVIEKTLYNRRTRQDEPALFVALTFERREVLDSSNIKPMNLIGVDRGENIPAVIALTDPEGCPLSRFKDSLGNPTHILRIGESYKEKQRTIQAKKEVEQRRAGGYSRKYASKAKNLADDMVRNTARDLLYYAVTQDAMLIFENLSRGFGRQGKRTFMAERQYTRMEDWLTAKLAYEGLPSKTYLSKTLAQYTSKTCSNCGFTITSADYDRVLEKLKKTATGWMTTINGKELKVEGQITYYNRYKRQNVVKDLSVELDRLSEESVNNDISSWTKGRSGEALSLLKKRFSHRPVQEKFVCLNCGFETHADEQAALNIARSWLFLRSQEYKKYQTNKTTGKNTDKRAFVETWQSFYRKKLKEVWKPAV

SEQ ID NO: 35096 - protein, 978 aa, synthetic construct
  REGION 1..978: note = engineered CasX variant
QEIKRINKIRRRLVKDSNTKKAGKTGPMKTLLVRVMTPDLRERLENLRKKPENIPQPISNTSRANLNKLLTDYTEMKKAILHVYWEEFQKDPVGLMSRVAQPASKKIDQNKLKPEMDEKGNLTTAGFACSQCGQPLFVYKLEQVSEKGKAYTNYFGRCNVAEHEKLILLYQLKPEKDSDEAVTYSLGKFGQRALDFYSIHVTKESTHPVKPLAQIAGNRYASPVGKALSDACMGTIASFLSKYQDIIIEHQKVVKGNQKRLESLRELAGKENLEYPSVTLPPQPHTKEGVDAYNEVIARVRMWVNLNLWQKLKLSRDDAKPLLRLKGFPSFPLVERQANEVDWWDMVCNVKKLINEKKEDGKVFWQNLAGYKRQEALRPYLSSEEDRKKGKKFARYQLGDLLLHLEKKHGEDWGKVYDEAWERIDKKVEGLSKHIKLEEERRSEDAQSKAALTDWLRAKASFVIEGLKEADKDEFCRCELKLQKWYGDLRGKPFAIEAENSILDISGFSKQYNCAFIWQKDGVKKLNLYLIINYFKGGKLRFKKIKPEAFEANRFYTVINKKSGEIVPMEVNFNFDDPNLIILPLAFGKRQGREFIWNDLLSLETGSLKLANGRVIEKTLYNRRTRQDEPALFVALTFERREVLDSSNIKPMNLIGVDRGENIPAVIALTDPEGCPLSRFKDSLGNPTHILRIGESYKEKQRTIQAKKEVEQRRAGGYSRKYASKAKNLADDMVRNTARDLLYYAVTQDAMLIFENLSRGFGRQGKRTFMAERQYTRMEDWLTAKLAYEGLPSKTYLSKTLAQYTSKTCSNCGFTITSADYDRVLEKLKKTATGWMTTINGKELKVEGQITYYNRYKRQNVVKDLSVELDRLSEESVNNDISSWTKGRSGEALSLLKKRFSHRPVQEKFVCLNCGFETHADEQAALNIARSWLFLRSQEYKKYQTNKTTGKNTDKRAFVETWQSFYRKKLKEVWKPAV

SEQ ID NO: 35097 - protein, 978 aa, synthetic construct
  REGION 1..978: note = engineered CasX variant
QEIKRINKIRRRLVKDSNTKKAGKTGPMKTLLVRVMTPDLRERLENLRKKPENIPQPISNTSRANLNKLLTDYTEMKKAILHVYWEEFQKDPVGLMSRVAQPASKKIDQNKLKPEMDEKGNLTTAGFACSQCGQPLFVYKLEQVSEKGKAYTNYFGRCNVAEHEKLILLYQLKPEKDSDEAVTYSLGKFGQRALDFYSIHVTKESTHPVKPLAQIAGNRYASYPVGKALSDACMGTIASFLSKYQDIIIEHQKVVKGNQKRLESLRELAGKENLEYPSVTLPPQPHTKEGVDAYNEVIARVRMWVNLNLWQKLKLSRDDAKPLLRLKKFPSFPLVERQANEVDWWDMVCNVKKLINEKKEDGKVFWQNLAGYKRQEALRPYLSSEEDRKKGKKFARYQLGDLLLHLEKKHGEDWGKVYDEAWERIDKKVEGLSKHIKLEEERRSEDAQSKAALTDWLRAKASFVIEGLKEADKDEFCRCELKLQKWYGDLRGKPFAIEAENSILDISGFSKQYNCAFIWQKDGVKKLNLYLIINYFKGGKLRFKKIKPEAFEANRFYTVINKKSGEIVPMEVNFNFDDPNLIILPLAFGKRQGREFIWNDLLSLETGSLKLANGRVIEKTLYNRRTRQDEPALFVALTFERREVLDSSNIKPMNLIGVDRGENIPAVIALTDPEGCPLSRFKDSLGNPTHILRIGESYKEKQRTIQAKKEVEQRRAGGYSRKYASKAKNLADDMVRNTARDLLYYAVTQDAMLIFENLSRGFGRQGKRTFMAERQYTRMEDWLTAKLAYEGLPSKTYLSKTLAQYTSKTCSNCGFTITSADYDRVLEKLKKTATGWMTTINGKELKVEGQITYYNRYKRQNVVKDLSVELDRLSEESVNNDISSWTKGRSGEALSLLKKRFSHRPVQEKFVCLNCGFETHADEQAALNIARSWLFLRSQEYKKYQTNKTTGNTDKRAFVETWQSFYRKKLKEVWKPAV

SEQ ID NO: 35098 - protein, 978 aa, synthetic construct
  REGION 1..978: note = engineered CasX variant
QEIKRINKIRRRLVKDSNTKKAGKTGPMKTLLVRVMTPDLRERLENLRKKPENIPQPISNTSRANLNKLLTDYTEMKKAILHVYWEEFQKDPVGLMSRVAQPASKKIDQNKLKPEMDEKGNLTTAGFACSQCGQPLFVYKLEQVSEKGKAYTNYFGRCNVAEHEKLILLYQLKPEKDSDEAVTYSLGKFGQRALDFYSIHVTKESTHPVKPLAQIAGNRYASHPVGKALSDACMGTIASFLSKYQDIIIEHQKVVKGNQKRLESLRELAGKENLEYPSVTLPPQPHTKEGVDAYNEVIARVRMWVNLNLWQKLKLSRDDAKPLLRLKKFPSFPLVERQANEVDWWDMVCNVKKLINEKKEDGKVFWQNLAGYKRQEALRPYLSSEEDRKKGKKFARYQLGDLLLHLEKKHGEDWGKVYDEAWERIDKKVEGLSKHIKLEEERRSEDAQSKAALTDWLRAKASFVIEGLKEADKDEFCRCELKLQKWYGDLRGKPFAIEAENSILDISGFSKQYNCAFIWQKDGVKKLNLYLIINYFKGGKLRFKKIKPEAFEANRFYTVINKKSGEIVPMEVNFNFDDPNLIILPLAFGKRQGREFIWNDLLSLETGSLKLANGRVIEKTLYNRRTRQDEPALFVALTFERREVLDSSNIKPMNLIGVDRGENIPAVIALTDPEGCPLSRFKDSLGNPTHILRIGESYKEKQRTIQAKKEVEQRRAGGYSRKYASKAKNLADDMVRNTARDLLYYAVTQDAMLIFENLSRGFGRQGKRTFMAERQYTRMEDWLTAKLAYEGLPSKTYLSKTLAQYTSKTCSNCGFTITSADYDRVLEKLKKTATGWMTTINGKELKVEGQITYYNRYKRQNVVKDLSVELDRLSEESVNNDISSWTKGRSGEALSLLKKRFSHRPVQEKFVCLNCGFETHADEQAALNIARSWLFLRSQEYKKYQTNKTTGNTDKRAFVETWQSFYRKKLKEVWKPAV

SEQ ID NO: 35099 - protein, 978 aa, synthetic construct
  REGION 1..978: note = engineered CasX variant
QEIKRINKIRRRLVKDSNTKKAGKTGPMKTLLVRVMTPDLRERLENLRKKPENIPQPISNTSRANLNKLLTDYTEMKKAILHVYWEEFQKDPVGLMSRVAQPASKKIDQNKLKPEMDEKGNLTTAGFACSQCGQPLFVYKLEQVSEKGKAYTNYFGRCNVAEHEKLILLYQLKPEKDSDEAVTYSLGKFGQRALDFYSIHVTKESTHPVKPLAQIAGNRYASSPVGKALSDACMGTIASFLSKYQDIIIEHQKVVKGNQKRLESLRELAGKENLEYPSVTLPPQPHTKEGVDAYNEVIARVRMWVNLNLWQKLKLSRDDAKPLLRLKKFPSFPLVERQANEVDWWDMVCNVKKLINEKKEDGKVFWQNLAGYKRQEALRPYLSSEEDRKKGKKFARYQLGDLLLHLEKKHGEDWGKVYDEAWERIDKKVEGLSKHIKLEEERRSEDAQSKAALTDWLRAKASFVIEGLKEADKDEFCRCELKLQKWYGDLRGKPFAIEAENSILDISGFSKQYNCAFIWQKDGVKKLNLYLIINYFKGGKLRFKKIKPEAFEANRFYTVINKKSGEIVPMEVNFNFDDPNLIILPLAFGKRQGREFIWNDLLSLETGSLKLANGRVIEKTLYNRRTRQDEPALFVALTFERREVLDSSNIKPMNLIGVDRGENIPAVIALTDPEGCPLSRFKDSLGNPTHILRIGESYKEKQRTIQAKKEVEQRRAGGYSRKYASKAKNLADDMVRNTARDLLYYAVTQDAMLIFENLSRGFGRQGKRTFMAERQYTRMEDWLTAKLAYEGLPSKTYLSKTLAQYTSKTCSNCGFTITSADYDRVLEKLKKTATGWMTTINGKELKVEGQITYYNRYKRQNVVKDLSVELDRLSEESVNNDISSWTKGRSGEALSLLKKRFSHRPVQEKFVCLNCGFETHADEQAALNIARSWLFLRSQEYKKYQTNKTTGNTDKRAFVETWQSFYRKKLKEVWKPAV

SEQ ID NO: 35100 - protein, 978 aa, synthetic construct
  REGION 1..978: note = engineered CasX variant
QEIKRINKIRRRLVKDSNTKKAGKTGPMKTLLVRVMTPDLRERLENLRKKPENIPQPISNTSRANLNKLLTDYTEMKKAILHVYWEEFQKDPVGLMSRVAQPASKKIDQNKLKPEMDEKGNLTTAGFACSQCGQPLFVYKLEQVSEKGKAYTNYFGRCNVAEHEKLILLYQLKPEKDSDEAVTYSLGKFGQRALDFYSIHVTKESTHPVKPLAQIAGNRYASTPVGKALSDACMGTIASFLSKYQDIIIEHQKVVKGNQKRLESLRELAGKENLEYPSVTLPPQPHTKEGVDAYNEVIARVRMWVNLNLWQKLKLSRDDAKPLLRLKKFPSFPLVERQANEVDWWDMVCNVKKLINEKKEDGKVFWQNLAGYKRQEALRPYLSSEEDRKKGKKFARYQLGDLLLHLEKKHGEDWGKVYDEAWERIDKKVEGLSKHIKLEEERRSEDAQSKAALTDWLRAKASFVIEGLKEADKDEFCRCELKLQKWYGDLRGKPFAIEAENSILDISGFSKQYNCAFIWQKDGVKKLNLYLIINYFKGGKLRFKKIKPEAFEANRFYTVINKKSGEIVPMEVNFNFDDPNLIILPLAFGKRQGREFIWNDLLSLETGSLKLANGRVIEKTLYNRRTRQDEPALFVALTFERREVLDSSNIKPMNLIGVDRGENIPAVIALTDPEGCPLSRFKDSLGNPTHILRIGESYKEKQRTIQAKKEVEQRRAGGYSRKYASKAKNLADDMVRNTARDLLYYAVTQDAMLIFENLSRGFGRQGKRTFMAERQYTRMEDWLTAKLAYEGLPSKTYLSKTLAQYTSKTCSNCGFTITSADYDRVLEKLKKTATGWMTTINGKELKVEGQITYYNRYKRQNVVKDLSVELDRLSEESVNNDISSWTKGRSGEALSLLKKRFSHRPVQEKFVCLNCGFETHADEQAALNIARSWLFLRSQEYKKYQTNKTTGNTDKRAFVETWQSFYRKKLKEVWKPAV

SEQ ID NO: 35101 - protein, 978 aa, synthetic construct
  REGION 1..978: note = engineered CasX variant
QEIKRINKIRRRLVKDSNTKKAGKTGPMKTLLVRVMTPDLRERLENLRKKPENIPQPISNTSRANLNKLLTDYTEMKKAILHVYWEEFQKDPVGLMSRVAQPASKKIDQNKLKPEMDEKGNLTTAGFACSQCGQPLFVYKLEQVSEKGKAYTNYFGRCNVAEHEKLILLYQLKPEKDSDEAVTYSLGKFGQRALDFYSIHVTKESTHPVKPLAQIAGNRYASAPVGKALSDACMGTIASFLSKYQDIIIEHQKVVKGNQKRLESLRELAGKENLEYPSVTLPPQPHTKEGVDAYNEVIARVRMWVNLNLWQKLKLSRDDAKPLLRLKKFPSFPLVERQANEVDWWDMVCNVKKLINEKKEDGKVFWQNLAGYKRQEALRPYLSSEEDRKKGKKFARYQLGDLLLHLEKKHGEDWGKVYDEAWERIDKKVEGLSKHIKLEEERRSEDAQSKAALTDWLRAKASFVIEGLKEADKDEFCRCELKLQKWYGDLRGKPFAIEAENSILDISGFSKQYNCAFIWQKDGVKKLNLYLIINYFKGGKLRFKKIKPEAFEANRFYTVINKKSGEIVPMEVNFNFDDPNLIILPLAFGKRQGREFIWNDLLSLETGSLKLANGRVIEKTLYNRRTRQDEPALFVALTFERREVLDSSNIKPMNLIGVDRGENIPAVIALTDPEGCPLSRFKDSLGNPTHILRIGESYKEKQRTIQAKKEVEQRRAGGYSRKYASKAKNLADDMVRNTARDLLYYAVTQDAMLIFENLSRGFGRQGKRTFMAERQYTRMEDWLTAKLAYEGLPSKTYLSKTLAQYTSKTCSNCGFTITSADYDRVLEKLKKTATGWMTTINGKELKVEGQITYYNRYKRQNVVKDLSVELDRLSEESVNNDISSWTKGRSGEALSLLKKRFSHRPVQEKFVCLNCGFETHADEQAALNIARSWLFLRSQEYKKYQTNKTTGNTDKRAFVETWQSFYRKKLKEVWKPAV

SEQ ID NO: 35102 - protein, 978 aa, synthetic construct
  REGION 1..978: note = engineered CasX variant
QEIKRINKIRRRLVKDSNTKKAGKTGPMKTLLVRVMTPDLRERLENLRKKPENIPQPISNTSRANLNKLLTDYTEMKKAILHVYWEEFQKDPVGLMSRVAQPASKKIDQNKLKPEMDEKGNLTTAGFACSQCGQPLFVYKLEQVSEKGKAYTNYFGRCNVAEHEKLILLYQLKPEKDSDEAVTYSLGKFGQRALDFYSIHVTKESTHPVKPLAQIAGNRYASVPVGKALSDACMGTIASFLSKYQDIIIEHQKVVKGNQKRLESLRELAGKENLEYPSVTLPPQPHTKEGVDAYNEVIARVRMWVNLNLWQKLKLSRDDAKPLLRLKKFPSFPLVERQANEVDWWDMVCNVKKLINEKKEDGKVFWQNLAGYKRQEALRPYLSSEEDRKKGKKFARYQLGDLLLHLEKKHGEDWGKVYDEAWERIDKKVEGLSKHIKLEEERRSEDAQSKAALTDWLRAKASFVIEGLKEADKDEFCRCELKLQKWYGDLRGKPFAIEAENSILDISGFSKQYNCAFIWQKDGVKKLNLYLIINYFKGGKLRFKKIKPEAFEANRFYTVINKKSGEIVPMEVNFNFDDPNLIILPLAFGKRQGREFIWNDLLSLETGSLKLANGRVIEKTLYNRRTRQDEPALFVALTFERREVLDSSNIKPMNLIGVDRGENIPAVIALTDPEGCPLSRFKDSLGNPTHILRIGESYKEKQRTIQAKKEVEQRRAGGYSRKYASKAKNLADDMVRNTARDLLYYAVTQDAMLIFENLSRGFGRQGKRTFMAERQYTRMEDWLTAKLAYEGLPSKTYLSKTLAQYTSKTCSNCGFTITSADYDRVLEKLKKTATGWMTTINGKELKVEGQITYYNRYKRQNVVKDLSVELDRLSEESVNNDISSWTKGRSGEALSLLKKRFSHRPVQEKFVCLNCGFETHADEQAALNIARSWLFLRSQEYKKYQTNKTTGNTDKRAFVETWQSFYRKKLKEVWKPAV

SEQ ID NO: 35103 - protein, 978 aa, synthetic construct
  REGION 1..978: note = engineered CasX variant
QEIKRINKIRRRLVKDSNTKKAGKTGPMKTLLVRVMTPDLRERLENLRKKPENIPQPISNTSRANLNKLLTDYTEMKKAILHVYWEEFQKDPVGLMSRVAQPASKKIDQNKLKPEMDEKGNLTTAGFACSQCGQPLFVYKLEQVSEKGKAYTNYFGRCNVAEHEKLIKLYQLKPEKDSDEAVTYSLGKFGQRALDFYSIHVTKESTHPVKPLAQIAGNRYASGPVGKALSDACMGTIASFLSKYQDIIIEHQKVVKGNQKRLESLRELAGKENLEYPSVTLPPQPHTKEGVDAYNEVIARVRMWVNLNLWQKLKLSRDDAKPLLRLKKFPSFPLVERQANEVDWWDMVCNVKKLINEKKEDGKVFWQNLAGYKRQEALRPYLSSEEDRKKGKKFARYQLGDLLLHLEKKHGEDWGKVYDEAWERIDKKVEGLSKHIKLEEERRSEDAQSKAALTDWLRAKASFVIEGLKEADKDEFCRCELKLQKWYGDLRGKPFAIEAENSILDISGFSKQYNCAFIWQKDGVKKLNLYLIINYFKGGKLRFKKIKPEAFEANRFYTVINKKSGEIVPMEVNFNFDDPNLIILPLAFGKRQGREFIWNDLLSLETGSLKLANGRVIEKTLYNRRTRQDEPALFVALTFERREVLDSSNIKPMNLIGVDRGENIPAVIALTDPEGCPLSRFKDSLGNPTHILRIGESYKEKQRTIQAKKEVEQRRAGGYSRKYASKAKNLADDMVRNTARDLLYYAVTQDAMLIFENLSRGFGRQGKRTFMAERQYTRMEDWLTAKLAYEGLPSKTYLSKTLAQYTSKTCSNCGFTITSADYDRVLEKLKKTATGWMTTINGKELKVEGQITYYNRYKRQNVVKDLSVELDRLSEESVNNDISSWTKGRSGEALSLLKKRFSHRPVQEKFVCLNCGFETHADEQAALNIARSWLFLRSQEYKKYQTNKTTGNTDKRAFVETWQSFYRKKLKEVWKPAV

SEQ ID NO: 35104 - protein, 977 aa, synthetic construct
  REGION 1..977: note = engineered CasX variant
QEIKRINKIRRRLVKDSNTKKAGKTGPMKTLLVRVMTPDLRERLENLRKKPENIPQPISNTSRANLNKLLTDYTEMKKAILHVYWEEFQKDPVGLMSRVAQPASKKIDQNKLKPEMDEKGNLTTAGFACSQCGQPLFVYKLEQVSEKGKAYTNYFGRCNVAEHEKLILLYQLKPEKDSDEAVTYSLGKFGQRALDFYSIHVTKESTHPVKPLAQIAGNRYASPVGKALSDACMGTIASFLSKYQDIIIEHQKVVKGNQKRLESLRELAGKENLEYPSVTLPPQPHTKEGVDAYNEVIARVRMWVNLNLWQKLKLSRDDAKPLLRLKKFPSFPLVERQANEVDWWDMVCNVKKLINEKKEDGKVFWQNLAGYKRQEALRPYLSSEEDRKKGKKFARYQLGDLLLHLEKKHGEDWGKVYDEAWERIDKKVEGLSKHIKLEEERRSEDAQSKAALTDWLRAKASFVIEGLKEADKDEFCRCELKLQKWYGDLRGKPFAIEAENSILDISGFSKQYNCAFIWQKDGVKKLNLYLIINYFKGGKLRFKKIKPEAFEANRFYTVINKKSGEIVPMEVNFNFDDPNLIILPLAFGKRQGREFIWNDLLSLETGSLKLANGRVIEKTLYNRRTRQDEPALFVALTFERREVLDSSNIKPMNLIGVDRGENIPAVIALTDPEGCPLSRFKDSLGNPTHILRIGESYKEKQRTIQAKKEVEQRRAGGYSRKYASKAKNLADDMVRNTARDLLYYAVTQDAMLIFENLSRGFGRQGKRTFMAERQYTRMEDWLTAKLAYEGLPSKTYLSKTLAQYTSKTCSNCGFTITSADYDRVLEKLKKTATGWMTTINGKELKVEGQITYYNRYKRQNVVKDLSVELDRLSEESVNNDISSWTKGRSGEALSLLKKRFSHRPVQEKFVCLNCGFETHADEQAALNIARSWLFLRSQEYKKYQTNKTTGNTDKRAFVETWQSFYRKKLKEVWKPAV

SEQ ID NO: 35105 - protein, 978 aa, synthetic construct
  REGION 1..978: note = engineered CasX variant
QEIKRINKIRRRLVKDSNTKKAGKTGPMKTLLVRVMTPDLRERLENLRKKPENIPQPISNTSRANLNKLLTDYTEMKKAILHVYWEEFQKDPVGLMSRVAQPASKKIDQNKLKPEMDEKGNLTTAGFACSQCGQPLFVYKLEQVSEKGKAYTNYFGRCNVAEHEKLILLYQLKPEKDSDEAVTYSLGKFGQRALDFYSIHVTKESTHPVKPLAQIAGNRYASYPVGKALSDACMGTIASFLSKYQDIIIEHQKVVKGNQKRLESLRELAGKENLEYPSVTLPPQPHTKEGVDAYNEVIARVRMWVNLNLWQKLKLSRDDAKPLLRLKGFPSFPLVERQANEVDWWDMVCNVKKLINEKKEDGKVFWQNLAGYKRQEALRPYLSSEEDRKKGKKFARYQLGDLLLHLEKKHGEDWGKVYDEAWERIDKKVEGLSKHIKLEEERRSEDAQSKAALTDWLRAKASFVIEGLKEADKDEFCRCELKLQKWYGDLRGKPFAIEAENSILDISGFSKQYNCAFIWQKDGVKKLNLYLIINYFKGGKLRFKKIKPEAFEANRFYTVINKKSGEIVPMEVNFNFDDPNLIILPLAFGKRQGREFIWNDLLSLETGSLKLANGRVIEKTLYNRRTRQDEPALFVALTFERREVLDSSNIKPMNLIGVDRGENIPAVIALTDPEGCPLSRFKDSLGNPTHILRIGERYKEKQRTIQAKKEVEQRRAGGYSRKYASKAKNLADDMVRNTARDLLYYAVTQDAMLIFENLSRGFGRQGKRTFMAERQYTRMEDWLTAKLAYEGLPSKTYLSKTLAQYTSKTCSNCGFTITSADYDRVLEKLKKTATGWMTTINGKELKVEGQITYYNRYKRQNVVKDLSVELDRLSEESVNNDISSWTKGRSGEALSLLKKRFSHRPVQEKFVCLNCGFETHADEQAALNIARSWLFLRSQEYKKYQTNKTTGNTDKRAFVETWQSFYRKKLKEVWKPAV

SEQ ID NO: 35106 - protein, 978 aa, synthetic construct
  REGION 1..978: note = engineered CasX variant
QEIKRINKIRRRLVKDSNTKKAGKTGPMKTLLVRVMTPDLRERLENLRKKPENIPQPISNTSRANLNKLLTDYTEMKKAILHVYWEEFQKDPVGLMSRVAQPASKKIDQNKLKPEMDEKGNLTTAGFACSQCGQPLFVYKLEQVSEKGKAYTNYFGRCNVAEHEKLILLYQLKPEKDSDEAVTYSLGKFGQRALDFYSIHVTKESTHPVKPLAQIAGNRYASHPVGKALSDACMGTIASFLSKYQDIIIEHQKVVKGNQKRLESLRELAGKENLEYPSVTLPPQPHTKEGVDAYNEVIARVRMWVNLNLWQKLKLSRDDAKPLLRLKGFPSFPLVERQANEVDWWDMVCNVKKLINEKKEDGKVFWQNLAGYKRQEALRPYLSSEEDRKKGKKFARYQLGDLLLHLEKKHGEDWGKVYDEAWERIDKKVEGLSKHIKLEEERRSEDAQSKAALTDWLRAKASFVIEGLKEADKDEFCRCELKLQKWYGDLRGKPFAIEAENSILDISGFSKQYNCAFIWQKDGVKKLNLYLIINYFKGGKLRFKKIKPEAFEANRFYTVINKKSGEIVPMEVNFNFDDPNLIILPLAFGKRQGREFIWNDLLSLETGSLKLANGRVIEKTLYNRRTRQDEPALFVALTFERREVLDSSNIKPMNLIGVDRGENIPAVIALTDPEGCPLSRFKDSLGNPTHILRIGERYKEKQRTIQAKKEVEQRRAGGYSRKYASKAKNLADDMVRNTARDLLYYAVTQDAMLIFENLSRGFGRQGKRTFMAERQYTRMEDWLTAKLAYEGLPSKTYLSKTLAQYTSKTCSNCGFTITSADYDRVLEKLKKTATGWMTTINGKELKVEGQITYYNRYKRQNVVKDLSVELDRLSEESVNNDISSWTKGRSGEALSLLKKRFSHRPVQEKFVCLNCGFETHADEQAALNIARSWLFLRSQEYKKYQTNKTTGNTDKRAFVETWQSFYRKKLKEVWKPAV

SEQ ID NO: 35107 - protein, 978 aa, synthetic construct
  REGION 1..978: note = engineered CasX variant
QEIKRINKIRRRLVKDSNTKKAGKTGPMKTLLVRVMTPDLRERLENLRKKPENIPQPISNTSRANLNKLLTDYTEMKKAILHVYWEEFQKDPVGLMSRVAQPASKKIDQNKLKPEMDEKGNLTTAGFACSQCGQPLFVYKLEQVSEKGKAYTNYFGRCNVAEHEKLILLYQLKPEKDSDEAVTYSLGKFGQRALDFYSIHVTKESTHPVKPLAQIAGNRYASSPVGKALSDACMGTIASFLSKYQDIIIEHQKVVKGNQKRLESLRELAGKENLEYPSVTLPPQPHTKEGVDAYNEVIARVRMWVNLNLWQKLKLSRDDAKPLLRLKGFPSFPLVERQANEVDWWDMVCNVKKLINEKKEDGKVFWQNLAGYKRQEALRPYLSSEEDRKKGKKFARYQLGDLLLHLEKKHGEDWGKVYDEAWERIDKKVEGLSKHIKLEEERRSEDAQSKAALTDWLRAKASFVIEGLKEADKDEFCRCELKLQKWYGDLRGKPFAIEAENSILDISGFSKQYNCAFIWQKDGVKKLNLYLIINYFKGGKLRFKKIKPEAFEANRFYTVINKKSGEIVPMEVNFNFDDPNLIILPLAFGKRQGREFIWNDLLSLETGSLKLANGRVIEKTLYNRRTRQDEPALFVALTFERREVLDSSNIKPMNLIGVDRGENIPAVIALTDPEGCPLSRFKDSLGNPTHILRIGERYKEKQRTIQAKKEVEQRRAGGYSRKYASKAKNLADDMVRNTARDLLYYAVTQDAMLIFENLSRGFGRQGKRTFMAERQYTRMEDWLTAKLAYEGLPSKTYLSKTLAQYTSKTCSNCGFTITSADYDRVLEKLKKTATGWMTTINGKELKVEGQITYYNRYKRQNVVKDLSVELDRLSEESVNNDISSWTKGRSGEALSLLKKRFSHRPVQEKFVCLNCGFETHADEQAALNIARSWLFLRSQEYKKYQTNKTTGNTDKRAFVETWQSFYRKKLKEVWKPAV

SEQ ID NO: 35108 - protein, 978 aa, synthetic construct
  REGION 1..978: note = engineered CasX variant
QEIKRINKIRRRLVKDSNTKKAGKTGPMKTLLVRVMTPDLRERLENLRKKPENIPQPISNTSRANLNKLLTDYTEMKKAILHVYWEEFQKDPVGLMSRVAQPASKKIDQNKLKPEMDEKGNLTTAGFACSQCGQPLFVYKLEQVSEKGKAYTNYFGRCNVAEHEKLILLYQLKPEKDSDEAVTYSLGKFGQRALDFYSIHVTKESTHPVKPLAQIAGNRYASTPVGKALSDACMGTIASFLSKYQDIIIEHQKVVKGNQKRLESLRELAGKENLEYPSVTLPPQPHTKEGVDAYNEVIARVRMWVNLNLWQKLKLSRDDAKPLLRLKGFPSFPLVERQANEVDWWDMVCNVKKLINEKKEDGKVFWQNLAGYKRQEALRPYLSSEEDRKKGKKFARYQLGDLLLHLEKKHGEDWGKVYDEAWERIDKKVEGLSKHIKLEEERRSEDAQSKAALTDWLRAKASFVIEGLKEADKDEFCRCELKLQKWYGDLRGKPFAIEAENSILDISGFSKQYNCAFIWQKDGVKKLNLYLIINYFKGGKLRFKKIKPEAFEANRFYTVINKKSGEIVPMEVNFNFDDPNLIILPLAFGKRQGREFIWNDLLSLETGSLKLANGRVIEKTLYNRRTRQDEPALFVALTFERREVLDSSNIKPMNLIGVDRGENIPAVIALTDPEGCPLSRFKDSLGNPTHILRIGERYKEKQRTIQAKKEVEQRRAGGYSRKYASKAKNLADDMVRNTARDLLYYAVTQDAMLIFENLSRGFGRQGKRTFMAERQYTRMEDWLTAKLAYEGLPSKTYLSKTLAQYTSKTCSNCGFTITSADYDRVLEKLKKTATGWMTTINGKELKVEGQITYYNRYKRQNVVKDLSVELDRLSEESVNNDISSWTKGRSGEALSLLKKRFSHRPVQEKFVCLNCGFETHADEQAALNIARSWLFLRSQEYKKYQTNKTTGNTDKRAFVETWQSFYRKKLKEVWKPAV

SEQ ID NO: 35109 - protein, 978 aa, synthetic construct
  REGION 1..978: note = engineered CasX variant
QEIKRINKIRRRLVKDSNTKKAGKTGPMKTLLVRVMTPDLRERLENLRKKPENIPQPISNTSRANLNKLLTDYTEMKKAILHVYWEEFQKDPVGLMSRVAQPASKKIDQNKLKPEMDEKGNLTTAGFACSQCGQPLFVYKLEQVSEKGKAYTNYFGRCNVAEHEKLILLYQLKPEKDSDEAVTYSLGKFGQRALDFYSIHVTKESTHPVKPLAQIAGNRYASAPVGKALSDACMGTIASFLSKYQDIIIEHQKVVKGNQKRLESLRELAGKENLEYPSVTLPPQPHTKEGVDAYNEVIARVRMWVNLNLWQKLKLSRDDAKPLLRLKGFPSFPLVERQANEVDWWDMVCNVKKLINEKKEDGKVFWQNLAGYKRQEALRPYLSSEEDRKKGKKFARYQLGDLLLHLEKKHGEDWGKVYDEAWERIDKKVEGLSKHIKLEEERRSEDAQSKAALTDWLRAKASFVIEGLKEADKDEFCRCELKLQKWYGDLRGKPFAIEAENSILDISGFSKQYNCAFIWQKDGVKKLNLYLIINYFKGGKLRFKKIKPEAFEANRFYTVINKKSGEIVPMEVNFNFDDPNLIILPLAFGKRQGREFIWNDLLSLETGSLKLANGRVIEKTLYNRRTRQDEPALFVALTFERREVLDSSNIKPMNLIGVDRGENIPAVIALTDPEGCPLSRFKDSLGNPTHILRIGERYKEKQRTIQAKKEVEQRRAGGYSRKYASKAKNLADDMVRNTARDLLYYAVTQDAMLIFENLSRGFGRQGKRTFMAERQYTRMEDWLTAKLAYEGLPSKTYLSKTLAQYTSKTCSNCGFTITSADYDRVLEKLKKTATGWMTTINGKELKVEGQITYYNRYKRQNVVKDLSVELDRLSEESVNNDISSWTKGRSGEALSLLKKRFSHRPVQEKFVCLNCGFETHADEQAALNIARSWLFLRSQEYKKYQTNKTTGNTDKRAFVETWQSFYRKKLKEVWKPAV

SEQ ID NO: 35110 - protein, 978 aa, synthetic construct
  REGION 1..978: note = engineered CasX variant
QEIKRINKIRRRLVKDSNTKKAGKTGPMKTLLVRVMTPDLRERLENLRKKPENIPQPISNTSRANLNKLLTDYTEMKKAILHVYWEEFQKDPVGLMSRVAQPASKKIDQNKLKPEMDEKGNLTTAGFACSQCGQPLFVYKLEQVSEKGKAYTNYFGRCNVAEHEKLILLYQLKPEKDSDEAVTYSLGKFGQRALDFYSIHVTKESTHPVKPLAQIAGNRYASVPVGKALSDACMGTIASFLSKYQDIIIEHQKVVKGNQKRLESLRELAGKENLEYPSVTLPPQPHTKEGVDAYNEVIARVRMWVNLNLWQKLKLSRDDAKPLLRLKGFPSFPLVERQANEVDWWDMVCNVKKLINEKKEDGKVFWQNLAGYKRQEALRPYLSSEEDRKKGKKFARYQLGDLLLHLEKKHGEDWGKVYDEAWERIDKKVEGLSKHIKLEEERRSEDAQSKAALTDWLRAKASFVIEGLKEADKDEFCRCELKLQKWYGDLRGKPFAIEAENSILDISGFSKQYNCAFIWQKDGVKKLNLYLIINYFKGGKLRFKKIKPEAFEANRFYTVINKKSGEIVPMEVNFNFDDPNLIILPLAFGKRQGREFIWNDLLSLETGSLKLANGRVIEKTLYNRRTRQDEPALFVALTFERREVLDSSNIKPMNLIGVDRGENIPAVIALTDPEGCPLSRFKDSLGNPTHILRIGERYKEKQRTIQAKKEVEQRRAGGYSRKYASKAKNLADDMVRNTARDLLYYAVTQDAMLIFENLSRGFGRQGKRTFMAERQYTRMEDWLTAKLAYEGLPSKTYLSKTLAQYTSKTCSNCGFTITSADYDRVLEKLKKTATGWMTTINGKELKVEGQITYYNRYKRQNVVKDLSVELDRLSEESVNNDISSWTKGRSGEALSLLKKRFSHRPVQEKFVCLNCGFETHADEQAALNIARSWLFLRSQEYKKYQTNKTTGNTDKRAFVETWQSFYRKKLKEVWKPAV

SEQ ID NO: 35111 - protein, 978 aa, synthetic construct
  REGION 1..978: note = engineered CasX variant
QEIKRINKIRRRLVKDSNTKKAGKTGPMKTLLVRVMTPDLRERLENLRKKPENIPQPISNTSRANLNKLLTDYTEMKKAILHVYWEEFQKDPVGLMSRVAQPASKKIDQNKLKPEMDEKGNLTTAGFACSQCGQPLFVYKLEQVSEKGKAYTNYFGRCNVAEHEKLIKLYQLKPEKDSDEAVTYSLGKFGQRALDFYSIHVTKESTHPVKPLAQIAGNRYASGPVGKALSDACMGTIASFLSKYQDIIIEHQKVVKGNQKRLESLRELAGKENLEYPSVTLPPQPHTKEGVDAYNEVIARVRMWVNLNLWQKLKLSRDDAKPLLRLKGFPSFPLVERQANEVDWWDMVCNVKKLINEKKEDGKVFWQNLAGYKRQEALRPYLSSEEDRKKGKKFARYQLGDLLLHLEKKHGEDWGKVYDEAWERIDKKVEGLSKHIKLEEERRSEDAQSKAALTDWLRAKASFVIEGLKEADKDEFCRCELKLQKWYGDLRGKPFAIEAENSILDISGFSKQYNCAFIWQKDGVKKLNLYLIINYFKGGKLRFKKIKPEAFEANRFYTVINKKSGEIVPMEVNFNFDDPNLIILPLAFGKRQGREFIWNDLLSLETGSLKLANGRVIEKTLYNRRTRQDEPALFVALTFERREVLDSSNIKPMNLIGVDRGENIPAVIALTDPEGCPLSRFKDSLGNPTHILRIGERYKEKQRTIQAKKEVEQRRAGGYSRKYASKAKNLADDMVRNTARDLLYYAVTQDAMLIFENLSRGFGRQGKRTFMAERQYTRMEDWLTAKLAYEGLPSKTYLSKTLAQYTSKTCSNCGFTITSADYDRVLEKLKKTATGWMTTINGKELKVEGQITYYNRYKRQNVVKDLSVELDRLSEESVNNDISSWTKGRSGEALSLLKKRFSHRPVQEKFVCLNCGFETHADEQAALNIARSWLFLRSQEYKKYQTNKTTGNTDKRAFVETWQSFYRKKLKEVWKPAV

SEQ ID NO: 35112 - protein, 977 aa, synthetic construct
  REGION 1..977: note = engineered CasX variant
QEIKRINKIRRRLVKDSNTKKAGKTGPMKTLLVRVMTPDLRERLENLRKKPENIPQPISNTSRANLNKLLTDYTEMKKAILHVYWEEFQKDPVGLMSRVAQPASKKIDQNKLKPEMDEKGNLTTAGFACSQCGQPLFVYKLEQVSEKGKAYTNYFGRCNVAEHEKLILLYQLKPEKDSDEAVTYSLGKFGQRALDFYSIHVTKESTHPVKPLAQIAGNRYASPVGKALSDACMGTIASFLSKYQDIIIEHQKVVKGNQKRLESLRELAGKENLEYPSVTLPPQPHTKEGVDAYNEVIARVRMWVNLNLWQKLKLSRDDAKPLLRLKGFPSFPLVERQANEVDWWDMVCNVKKLINEKKEDGKVFWQNLAGYKRQEALRPYLSSEEDRKKGKKFARYQLGDLLLHLEKKHGEDWGKVYDEAWERIDKKVEGLSKHIKLEEERRSEDAQSKAALTDWLRAKASFVIEGLKEADKDEFCRCELKLQKWYGDLRGKPFAIEAENSILDISGFSKQYNCAFIWQKDGVKKLNLYLIINYFKGGKLRFKKIKPEAFEANRFYTVINKKSGEIVPMEVNFNFDDPNLIILPLAFGKRQGREFIWNDLLSLETGSLKLANGRVIEKTLYNRRTRQDEPALFVALTFERREVLDSSNIKPMNLIGVDRGENIPAVIALTDPEGCPLSRFKDSLGNPTHILRIGERYKEKQRTIQAKKEVEQRRAGGYSRKYASKAKNLADDMVRNTARDLLYYAVTQDAMLIFENLSRGFGRQGKRTFMAERQYTRMEDWLTAKLAYEGLPSKTYLSKTLAQYTSKTCSNCGFTITSADYDRVLEKLKKTATGWMTTINGKELKVEGQITYYNRYKRQNVVKDLSVELDRLSEESVNNDISSWTKGRSGEALSLLKKRFSHRPVQEKFVCLNCGFETHADEQAALNIARSWLFLRSQEYKKYQTNKTTGNTDKRAFVETWQSFYRKKLKEVWKPAV

SEQ ID NO: 35113 - protein, 978 aa, synthetic construct
  REGION 1..978: note = engineered CasX variant
QEIKRINKIRRRLVKDSNTKKAGKTGPMKTLLVRVMTPDLRERLENLRKKPENIPQPISNTSRANLNKLLTDYTEMKKAILHVYWEEFQKDPVGLMSRVAQPASKKIDQNKLKPEMDEKGNLTTAGFACSQCGQPLFVYKLEQVSEKGKAYTNYFGRCNVAEHEKLILLYQLKPEKDSDEAVTYSLGKFGQRALDFYSIHVTKESTHPVKPLAQIAGNRYASYPVGKALSDACMGTIASFLSKYQDIIIEHQKVVKGNQKRLESLRELAGKENLEYPSVTLPPQPHTKEGVDAYNEVIARVRMWVNLNLWQKLKLSRDDAKPLLRLKGFPSFPLVERQANEVDWWDMVCNVKKLINEKKEDGKVFWQNLAGYKRQEALRPYLSSEEDRKKGKKFARYQLGDLLLHLEKKHGEDWGKVYDEAWERIDKKVEGLSKHIKLEEERRSEDAQSKAALTDWLRAKASFVIEGLKEADKDEFCRCELKLQKWYGDLRGKPFAIEAENSILDISGFSKQYNCAFIWQKDGVKKLNLYLIINYFKGGKLRFKKIKPEAFEANRFYTVINKKSGEIVPMEVNFNFDDPNLIILPLAFGKRQGREFIWNDLLSLETGSLQLANGRVIEKTLYNRRTRQDEPALFVALTFERREVLDSSNIKPMNLIGVDRGENIPAVIALTDPEGCPLSRFKDSLGNPTHILRIGESYKEKQRTIQAKKEVEQRRAGGYSRKYASKAKNLADDMVRNTARDLLYYAVTQDAMLIFENLSRGFGRQGKRTFMAERQYTRMEDWLTAKLAYEGLPSKTYLSKTLAQYTSKTCSNCGFTITSADYDRVLEKLKKTATGWMTTINGKELKVEGQITYYNRYKRQNVVKDLSVELDRLSEESVNNDISSWTKGRSGEALSLLKKRFSHRPVQEKFVCLNCGFETHADEQAALNIARSWLFLRSQEYKKYQTNKTTGNTDKRAFVETWQSFYRKKLKEVWKPAV

SEQ ID NO: 35114 - protein, 978 aa, synthetic construct
  REGION 1..978: note = engineered CasX variant
QEIKRINKIRRRLVKDSNTKKAGKTGPMKTLLVRVMTPDLRERLENLRKKPENIPQPISNTSRANLNKLLTDYTEMKKAILHVYWEEFQKDPVGLMSRVAQPASKKIDQNKLKPEMDEKGNLTTAGFACSQCGQPLFVYKLEQVSEKGKAYTNYFGRCNVAEHEKLILLYQLKPEKDSDEAVTYSLGKFGQRALDFYSIHVTKESTHPVKPLAQIAGNRYASHPVGKALSDACMGTIASFLSKYQDIIIEHQKVVKGNQKRLESLRELAGKENLEYPSVTLPPQPHTKEGVDAYNEVIARVRMWVNLNLWQKLKLSRDDAKPLLRLKGFPSFPLVERQANEVDWWDMVCNVKKLINEKKEDGKVFWQNLAGYKRQEALRPYLSSEEDRKKGKKFARYQLGDLLLHLEKKHGEDWGKVYDEAWERIDKKVEGLSKHIKLEEERRSEDAQSKAALTDWLRAKASFVIEGLKEADKDEFCRCELKLQKWYGDLRGKPFAIEAENSILDISGFSKQYNCAFIWQKDGVKKLNLYLIINYFKGGKLRFKKIKPEAFEANRFYTVINKKSGEIVPMEVNFNFDDPNLIILPLAFGKRQGREFIWNDLLSLETGSLQLANGRVIEKTLYNRRTRQDEPALFVALTFERREVLDSSNIKPMNLIGVDRGENIPAVIALTDPEGCPLSRFKDSLGNPTHILRIGESYKEKQRTIQAKKEVEQRRAGGYSRKYASKAKNLADDMVRNTARDLLYYAVTQDAMLIFENLSRGFGRQGKRTFMAERQYTRMEDWLTAKLAYEGLPSKTYLSKTLAQYTSKTCSNCGFTITSADYDRVLEKLKKTATGWMTTINGKELKVEGQITYYNRYKRQNVVKDLSVELDRLSEESVNNDISSWTKGRSGEALSLLKKRFSHRPVQEKFVCLNCGFETHADEQAALNIARSWLFLRSQEYKKYQTNKTTGNTDKRAFVETWQSFYRKKLKEVWKPAV

SEQ ID NO: 35115 - protein, 978 aa, synthetic construct
  REGION 1..978: note = engineered CasX variant
QEIKRINKIRRRLVKDSNTKKAGKTGPMKTLLVRVMTPDLRERLENLRKKPENIPQPISNTSRANLNKLLTDYTEMKKAILHVYWEEFQKDPVGLMSRVAQPASKKIDQNKLKPEMDEKGNLTTAGFACSQCGQPLFVYKLEQVSEKGKAYTNYFGRCNVAEHEKLILLYQLKPEKDSDEAVTYSLGKFGQRALDFYSIHVTKESTHPVKPLAQIAGNRYASSPVGKALSDACMGTIASFLSKYQDIIIEHQKVVKGNQKRLESLRELAGKENLEYPSVTLPPQPHTKEGVDAYNEVIARVRMWVNLNLWQKLKLSRDDAKPLLRLKGFPSFPLVERQANEVDWWDMVCNVKKLINEKKEDGKVFWQNLAGYKRQEALRPYLSSEEDRKKGKKFARYQLGDLLLHLEKKHGEDWGKVYDEAWERIDKKVEGLSKHIKLEEERRSEDAQSKAALTDWLRAKASFVIEGLKEADKDEFCRCELKLQKWYGDLRGKPFAIEAENSILDISGFSKQYNCAFIWQKDGVKKLNLYLIINYFKGGKLRFKKIKPEAFEANRFYTVINKKSGEIVPMEVNFNFDDPNLIILPLAFGKRQGREFIWNDLLSLETGSLQLANGRVIEKTLYNRRTRQDEPALFVALTFERREVLDSSNIKPMNLIGVDRGENIPAVIALTDPEGCPLSRFKDSLGNPTHILRIGESYKEKQRTIQAKKEVEQRRAGGYSRKYASKAKNLADDMVRNTARDLLYYAVTQDAMLIFENLSRGFGRQGKRTFMAERQYTRMEDWLTAKLAYEGLPSKTYLSKTLAQYTSKTCSNCGFTITSADYDRVLEKLKKTATGWMTTINGKELKVEGQITYYNRYKRQNVVKDLSVELDRLSEESVNNDISSWTKGRSGEALSLLKKRFSHRPVQEKFVCLNCGFETHADEQAALNIARSWLFLRSQEYKKYQTNKTTGNTDKRAFVETWQSFYRKKLKEVWKPAV

SEQ ID NO: 35116 - protein, 978 aa, synthetic construct
  REGION 1..978: note = engineered CasX variant
QEIKRINKIRRRLVKDSNTKKAGKTGPMKTLLVRVMTPDLRERLENLRKKPENIPQPISNTSRANLNKLLTDYTEMKKAILHVYWEEFQKDPVGLMSRVAQPASKKIDQNKLKPEMDEKGNLTTAGFACSQCGQPLFVYKLEQVSEKGKAYTNYFGRCNVAEHEKLILLYQLKPEKDSDEAVTYSLGKFGQRALDFYSIHVTKESTHPVKPLAQIAGNRYASTPVGKALSDACMGTIASFLSKYQDIIIEHQKVVKGNQKRLESLRELAGKENLEYPSVTLPPQPHTKEGVDAYNEVIARVRMWVNLNLWQKLKLSRDDAKPLLRLKGFPSFPLVERQANEVDWWDMVCNVKKLINEKKEDGKVFWQNLAGYKRQEALRPYLSSEEDRKKGKKFARYQLGDLLLHLEKKHGEDWGKVYDEAWERIDKKVEGLSKHIKLEEERRSEDAQSKAALTDWLRAKASFVIEGLKEADKDEFCRCELKLQKWYGDLRGKPFAIEAENSILDISGFSKQYNCAFIWQKDGVKKLNLYLIINYFKGGKLRFKKIKPEAFEANRFYTVINKKSGEIVPMEVNFNFDDPNLIILPLAFGKRQGREFIWNDLLSLETGSLQLANGRVIEKTLYNRRTRQDEPALFVALTFERREVLDSSNIKPMNLIGVDRGENIPAVIALTDPEGCPLSRFKDSLGNPTHILRIGESYKEKQRTIQAKKEVEQRRAGGYSRKYASKAKNLADDMVRNTARDLLYYAVTQDAMLIFENLSRGFGRQGKRTFMAERQYTRMEDWLTAKLAYEGLPSKTYLSKTLAQYTSKTCSNCGFTITSADYDRVLEKLKKTATGWMTTINGKELKVEGQITYYNRYKRQNVVKDLSVELDRLSEESVNNDISSWTKGRSGEALSLLKKRFSHRPVQEKFVCLNCGFETHADEQAALNIARSWLFLRSQEYKKYQTNKTTGNTDKRAFVETWQSFYRKKLKEVWKPAV

SEQ ID NO: 35117 - protein, 978 aa, synthetic construct
  REGION 1..978: note = engineered CasX variant
QEIKRINKIRRRLVKDSNTKKAGKTGPMKTLLVRVMTPDLRERLENLRKKPENIPQPISNTSRANLNKLLTDYTEMKKAILHVYWEEFQKDPVGLMSRVAQPASKKIDQNKLKPEMDEKGNLTTAGFACSQCGQPLFVYKLEQVSEKGKAYTNYFGRCNVAEHEKLILLYQLKPEKDSDEAVTYSLGKFGQRALDFYSIHVTKESTHPVKPLAQIAGNRYASAPVGKALSDACMGTIASFLSKYQDIIIEHQKVVKGNQKRLESLRELAGKENLEYPSVTLPPQPHTKEGVDAYNEVIARVRMWVNLNLWQKLKLSRDDAKPLLRLKGFPSFPLVERQANEVDWWDMVCNVKKLINEKKEDGKVFWQNLAGYKRQEALRPYLSSEEDRKKGKKFARYQLGDLLLHLEKKHGEDWGKVYDEAWERIDKKVEGLSKHIKLEEERRSEDAQSKAALTDWLRAKASFVIEGLKEADKDEFCRCELKLQKWYGDLRGKPFAIEAENSILDISGFSKQYNCAFIWQKDGVKKLNLYLIINYFKGGKLRFKKIKPEAFEANRFYTVINKKSGEIVPMEVNFNFDDPNLIILPLAFGKRQGREFIWNDLLSLETGSLQLANGRVIEKTLYNRRTRQDEPALFVALTFERREVLDSSNIKPMNLIGVDRGENIPAVIALTDPEGCPLSRFKDSLGNPTHILRIGESYKEKQRTIQAKKEVEQRRAGGYSRKYASKAKNLADDMVRNTARDLLYYAVTQDAMLIFENLSRGFGRQGKRTFMAERQYTRMEDWLTAKLAYEGLPSKTYLSKTLAQYTSKTCSNCGFTITSADYDRVLEKLKKTATGWMTTINGKELKVEGQITYYNRYKRQNVVKDLSVELDRLSEESVNNDISSWTKGRSGEALSLLKKRFSHRPVQEKFVCLNCGFETHADEQAALNIARSWLFLRSQEYKKYQTNKTTGNTDKRAFVETWQSFYRKKLKEVWKPAV

SEQ ID NO: 35118 - protein, 978 aa, synthetic construct
  REGION 1..978: note = engineered CasX variant
QEIKRINKIRRRLVKDSNTKKAGKTGPMKTLLVRVMTPDLRERLENLRKKPENIPQPISNTSRANLNKLLTDYTEMKKAILHVYWEEFQKDPVGLMSRVAQPASKKIDQNKLKPEMDEKGNLTTAGFACSQCGQPLFVYKLEQVSEKGKAYTNYFGRCNVAEHEKLILLYQLKPEKDSDEAVTYSLGKFGQRALDFYSIHVTKESTHPVKPLAQIAGNRYASVPVGKALSDACMGTIASFLSKYQDIIIEHQKVVKGNQKRLESLRELAGKENLEYPSVTLPPQPHTKEGVDAYNEVIARVRMWVNLNLWQKLKLSRDDAKPLLRLKGFPSFPLVERQANEVDWWDMVCNVKKLINEKKEDGKVFWQNLAGYKRQEALRPYLSSEEDRKKGKKFARYQLGDLLLHLEKKHGEDWGKVYDEAWERIDKKVEGLSKHIKLEEERRSEDAQSKAALTDWLRAKASFVIEGLKEADKDEFCRCELKLQKWYGDLRGKPFAIEAENSILDISGFSKQYNCAFIWQKDGVKKLNLYLIINYFKGGKLRFKKIKPEAFEANRFYTVINKKSGEIVPMEVNFNFDDPNLIILPLAFGKRQGREFIWNDLLSLETGSLQLANGRVIEKTLYNRRTRQDEPALFVALTFERREVLDSSNIKPMNLIGVDRGENIPAVIALTDPEGCPLSRFKDSLGNPTHILRIGESYKEKQRTIQAKKEVEQRRAGGYSRKYASKAKNLADDMVRNTARDLLYYAVTQDAMLIFENLSRGFGRQGKRTFMAERQYTRMEDWLTAKLAYEGLPSKTYLSKTLAQYTSKTCSNCGFTITSADYDRVLEKLKKTATGWMTTINGKELKVEGQITYYNRYKRQNVVKDLSVELDRLSEESVNNDISSWTKGRSGEALSLLKKRFSHRPVQEKFVCLNCGFETHADEQAALNIARSWLFLRSQEYKKYQTNKTTGNTDKRAFVETWQSFYRKKLKEVWKPAV

SEQ ID NO: 35119 - protein, 978 aa, synthetic construct
  REGION 1..978: note = engineered CasX variant
QEIKRINKIRRRLVKDSNTKKAGKTGPMKTLLVRVMTPDLRERLENLRKKPENIPQPISNTSRANLNKLLTDYTEMKKAILHVYWEEFQKDPVGLMSRVAQPASKKIDQNKLKPEMDEKGNLTTAGFACSQCGQPLFVYKLEQVSEKGKAYTNYFGRCNVAEHEKLIKLYQLKPEKDSDEAVTYSLGKFGQRALDFYSIHVTKESTHPVKPLAQIAGNRYASGPVGKALSDACMGTIASFLSKYQDIIIEHQKVVKGNQKRLESLRELAGKENLEYPSVTLPPQPHTKEGVDAYNEVIARVRMWVNLNLWQKLKLSRDDAKPLLRLKGFPSFPLVERQANEVDWWDMVCNVKKLINEKKEDGKVFWQNLAGYKRQEALRPYLSSEEDRKKGKKFARYQLGDLLLHLEKKHGEDWGKVYDEAWERIDKKVEGLSKHIKLEEERRSEDAQSKAALTDWLRAKASFVIEGLKEADKDEFCRCELKLQKWYGDLRGKPFAIEAENSILDISGFSKQYNCAFIWQKDGVKKLNLYLIINYFKGGKLRFKKIKPEAFEANRFYTVINKKSGEIVPMEVNFNFDDPNLIILPLAFGKRQGREFIWNDLLSLETGSLQLANGRVIEKTLYNRRTRQDEPALFVALTFERREVLDSSNIKPMNLIGVDRGENIPAVIALTDPEGCPLSRFKDSLGNPTHILRIGESYKEKQRTIQAKKEVEQRRAGGYSRKYASKAKNLADDMVRNTARDLLYYAVTQDAMLIFENLSRGFGRQGKRTFMAERQYTRMEDWLTAKLAYEGLPSKTYLSKTLAQYTSKTCSNCGFTITSADYDRVLEKLKKTATGWMTTINGKELKVEGQITYYNRYKRQNVVKDLSVELDRLSEESVNNDISSWTKGRSGEALSLLKKRFSHRPVQEKFVCLNCGFETHADEQAALNIARSWLFLRSQEYKKYQTNKTTGNTDKRAFVETWQSFYRKKLKEVWKPAV

SEQ ID NO: 35120 - protein, 977 aa, synthetic construct
  REGION 1..977: note = engineered CasX variant
QEIKRINKIRRRLVKDSNTKKAGKTGPMKTLLVRVMTPDLRERLENLRKKPENIPQPISNTSRANLNKLLTDYTEMKKAILHVYWEEFQKDPVGLMSRVAQPASKKIDQNKLKPEMDEKGNLTTAGFACSQCGQPLFVYKLEQVSEKGKAYTNYFGRCNVAEHEKLILLYQLKPEKDSDEAVTYSLGKFGQRALDFYSIHVTKESTHPVKPLAQIAGNRYASPVGKALSDACMGTIASFLSKYQDIIIEHQKVVKGNQKRLESLRELAGKENLEYPSVTLPPQPHTKEGVDAYNEVIARVRMWVNLNLWQKLKLSRDDAKPLLRLKGFPSFPLVERQANEVDWWDMVCNVKKLINEKKEDGKVFWQNLAGYKRQEALRPYLSSEEDRKKGKKFARYQLGDLLLHLEKKHGEDWGKVYDEAWERIDKKVEGLSKHIKLEEERRSEDAQSKAALTDWLRAKASFVIEGLKEADKDEFCRCELKLQKWYGDLRGKPFAIEAENSILDISGFSKQYNCAFIWQKDGVKKLNLYLIINYFKGGKLRFKKIKPEAFEANRFYTVINKKSGEIVPMEVNFNFDDPNLIILPLAFGKRQGREFIWNDLLSLETGSLQLANGRVIEKTLYNRRTRQDEPALFVALTFERREVLDSSNIKPMNLIGVDRGENIPAVIALTDPEGCPLSRFKDSLGNPTHILRIGESYKEKQRTIQAKKEVEQRRAGGYSRKYASKAKNLADDMVRNTARDLLYYAVTQDAMLIFENLSRGFGRQGKRTFMAERQYTRMEDWLTAKLAYEGLPSKTYLSKTLAQYTSKTCSNCGFTITSADYDRVLEKLKKTATGWMTTINGKELKVEGQITYYNRYKRQNVVKDLSVELDRLSEESVNNDISSWTKGRSGEALSLLKKRFSHRPVQEKFVCLNCGFETHADEQAALNIARSWLFLRSQEYKKYQTNKTTGNTDKRAFVETWQSFYRKKLKEVWKPAV

SEQ ID NO: 35121 - protein, 979 aa, synthetic construct
  REGION 1..979: note = engineered CasX variant
QEIKRINKIRRRLVKDSNTKKAGKTGPMKTLLVRVMTPDLRERLENLRKKPENIPQPISNTSRANLNKLLTDYTEMKKAILHVYWEEFQKDPVGLMSRVAQPASKKIDQNKLKPEMDEKGNLTTAGFACSQCGQPLFVYKLEQVSEKGKAYTNYFGRCNVAEHEKLILLSDQLKPEKDSDEAVTYSLGKFGQRALDFYSIHVTKESTHPVKPLAQIAGNRYASYPVGKALSDACMGTIASFLSKYQDIIIEHQKVVKGNQKRLESLRELAGKENLEYPSVTLPPQPHTKEGVDAYNEVIARVRMWVNLNLWQKLKLSRDDAKPLLRLKGFPSFPLVERQANEVDWWDMVCNVKKLINEKKEDGKVFWQNLAGYKRQEALRPYLSSEEDRKKGKKFARYQLGDLLLHLEKKHGEDWGKVYDEAWERIDKKVEGLSKHIKLEEERRSEDAQSKAALTDWLRAKASFVIEGLKEADKDEFCRCELKLQKWYGDLRGKPFAIEAENSILDISGFSKQYNCAFIWQKDGVKKLNLYLIINYFKGGKLRFKKIKPEAFEANRFYTVINKKSGEIVPMEVNFNFDDPNLIILPLAFGKRQGREFIWNDLLSLETGSLKLANGRVIEKTLYNRRTRQDEPALFVALTFERREVLDSSNIKPMNLIGVDRGENIPAVIALTDPEGCPLSRFKDSLGNPTHILRIGESYKEKQRTIQAKKEVEQRRAGGYSRKYASKAKNLADDMVRNTARDLLYYAVTQDAMLIFENLSRGFGRQGKRTFMAERQYTRMEDWLTAKLAYEGLPSKTYLSKTLAQYTSKTCSNCGFTITSADYDRVLEKLKKTATGWMTTINGKELKVEGQITYYNRYKRQNVVKDLSVELDRLSEESVNNDISSWTKGRSGEALSLLKKRFSHRPVQEKFVCLNCGFETHADEQAALNIARSWLFLRSQEYKKYQTNKTTGNTDKRAFVETWQSFYRKKLKEVWKPAV

SEQ ID NO: 35122 - protein, 979 aa, synthetic construct
  REGION 1..979: note = engineered CasX variant
QEIKRINKIRRRLVKDSNTKKAGKTGPMKTLLVRVMTPDLRERLENLRKKPENIPQPISNTSRANLNKLLTDYTEMKKAILHVYWEEFQKDPVGLMSRVAQPASKKIDQNKLKPEMDEKGNLTTAGFACSQCGQPLFVYKLEQVSEKGKAYTNYFGRCNVAEHEKLILLSDQLKPEKDSDEAVTYSLGKFGQRALDFYSIHVTKESTHPVKPLAQIAGNRYASHPVGKALSDACMGTIASFLSKYQDIIIEHQKVVKGNQKRLESLRELAGKENLEYPSVTLPPQPHTKEGVDAYNEVIARVRMWVNLNLWQKLKLSRDDAKPLLRLKGFPSFPLVERQANEVDWWDMVCNVKKLINEKKEDGKVFWQNLAGYKRQEALRPYLSSEEDRKKGKKFARYQLGDLLLHLEKKHGEDWGKVYDEAWERIDKKVEGLSKHIKLEEERRSEDAQSKAALTDWLRAKASFVIEGLKEADKDEFCRCELKLQKWYGDLRGKPFAIEAENSILDISGFSKQYNCAFIWQKDGVKKLNLYLIINYFKGGKLRFKKIKPEAFEANRFYTVINKKSGEIVPMEVNFNFDDPNLIILPLAFGKRQGREFIWNDLLSLETGSLKLANGRVIEKTLYNRRTRQDEPALFVALTFERREVLDSSNIKPMNLIGVDRGENIPAVIALTDPEGCPLSRFKDSLGNPTHILRIGESYKEKQRTIQAKKEVEQRRAGGYSRKYASKAKNLADDMVRNTARDLLYYAVTQDAMLIFENLSRGFGRQGKRTFMAERQYTRMEDWLTAKLAYEGLPSKTYLSKTLAQYTSKTCSNCGFTITSADYDRVLEKLKKTATGWMTTINGKELKVEGQITYYNRYKRQNVVKDLSVELDRLSEESVNNDISSWTKGRSGEALSLLKKRFSHRPVQEKFVCLNCGFETHADEQAALNIARSWLFLRSQEYKKYQTNKTTGNTDKRAFVETWQSFYRKKLKEVWKPAV

SEQ ID NO: 35123 - protein, 979 aa, synthetic construct
  REGION 1..979: note = engineered CasX variant
QEIKRINKIRRRLVKDSNTKKAGKTGPMKTLLVRVMTPDLRERLENLRKKPENIPQPISNTSRANLNKLLTDYTEMKKAILHVYWEEFQKDPVGLMSRVAQPASKKIDQNKLKPEMDEKGNLTTAGFACSQCGQPLFVYKLEQVSEKGKAYTNYFGRCNVAEHEKLILLSDQLKPEKDSDEAVTYSLGKFGQRALDFYSIHVTKESTHPVKPLAQIAGNRYASSPVGKALSDACMGTIASFLSKYQDIIIEHQKVVKGNQKRLESLRELAGKENLEYPSVTLPPQPHTKEGVDAYNEVIARVRMWVNLNLWQKLKLSRDDAKPLLRLKGFPSFPLVERQANEVDWWDMVCNVKKLINEKKEDGKVFWQNLAGYKRQEALRPYLSSEEDRKKGKKFARYQLGDLLLHLEKKHGEDWGKVYDEAWERIDKKVEGLSKHIKLEEERRSEDAQSKAALTDWLRAKASFVIEGLKEADKDEFCRCELKLQKWYGDLRGKPFAIEAENSILDISGFSKQYNCAFIWQKDGVKKLNLYLIINYFKGGKLRFKKIKPEAFEANRFYTVINKKSGEIVPMEVNFNFDDPNLIILPLAFGKRQGREFIWNDLLSLETGSLKLANGRVIEKTLYNRRTRQDEPALFVALTFERREVLDSSNIKPMNLIGVDRGENIPAVIALTDPEGCPLSRFKDSLGNPTHILRIGESYKEKQRTIQAKKEVEQRRAGGYSRKYASKAKNLADDMVRNTARDLLYYAVTQDAMLIFENLSRGFGRQGKRTFMAERQYTRMEDWLTAKLAYEGLPSKTYLSKTLAQYTSKTCSNCGFTITSADYDRVLEKLKKTATGWMTTINGKELKVEGQITYYNRYKRQNVVKDLSVELDRLSEESVNNDISSWTKGRSGEALSLLKKRFSHRPVQEKFVCLNCGFETHADEQAALNIARSWLFLRSQEYKKYQTNKTTGNTDKRAFVETWQSFYRKKLKEVWKPAV

SEQ ID NO: 35124 - protein, 979 aa, synthetic construct
  REGION 1..979: note = engineered CasX variant
QEIKRINKIRRRLVKDSNTKKAGKTGPMKTLLVRVMTPDLRERLENLRKKPENIPQPISNTSRANLNKLLTDYTEMKKAILHVYWEEFQKDPVGLMSRVAQPASKKIDQNKLKPEMDEKGNLTTAGFACSQCGQPLFVYKLEQVSEKGKAYTNYFGRCNVAEHEKLILLSDQLKPEKDSDEAVTYSLGKFGQRALDFYSIHVTKESTHPVKPLAQIAGNRYASTPVGKALSDACMGTIASFLSKYQDIIIEHQKVVKGNQKRLESLRELAGKENLEYPSVTLPPQPHTKEGVDAYNEVIARVRMWVNLNLWQKLKLSRDDAKPLLRLKGFPSFPLVERQANEVDWWDMVCNVKKLINEKKEDGKVFWQNLAGYKRQEALRPYLSSEEDRKKGKKFARYQLGDLLLHLEKKHGEDWGKVYDEAWERIDKKVEGLSKHIKLEEERRSEDAQSKAALTDWLRAKASFVIEGLKEADKDEFCRCELKLQKWYGDLRGKPFAIEAENSILDISGFSKQYNCAFIWQKDGVKKLNLYLIINYFKGGKLRFKKIKPEAFEANRFYTVINKKSGEIVPMEVNFNFDDPNLIILPLAFGKRQGREFIWNDLLSLETGSLKLANGRVIEKTLYNRRTRQDEPALFVALTFERREVLDSSNIKPMNLIGVDRGENIPAVIALTDPEGCPLSRFKDSLGNPTHILRIGESYKEKQRTIQAKKEVEQRRAGGYSRKYASKAKNLADDMVRNTARDLLYYAVTQDAMLIFENLSRGFGRQGKRTFMAERQYTRMEDWLTAKLAYEGLPSKTYLSKTLAQYTSKTCSNCGFTITSADYDRVLEKLKKTATGWMTTINGKELKVEGQITYYNRYKRQNVVKDLSVELDRLSEESVNNDISSWTKGRSGEALSLLKKRFSHRPVQEKFVCLNCGFETHADEQAALNIARSWLFLRSQEYKKYQTNKTTGNTDKRAFVETWQSFYRKKLKEVWKPAV

SEQ ID NO: 35125 - protein, 979 aa, synthetic construct
  REGION 1..979: note = engineered CasX variant
QEIKRINKIRRRLVKDSNTKKAGKTGPMKTLLVRVMTPDLRERLENLRKKPENIPQPISNTSRANLNKLLTDYTEMKKAILHVYWEEFQKDPVGLMSRVAQPASKKIDQNKLKPEMDEKGNLTTAGFACSQCGQPLFVYKLEQVSEKGKAYTNYFGRCNVAEHEKLILLSDQLKPEKDSDEAVTYSLGKFGQRALDFYSIHVTKESTHPVKPLAQIAGNRYASAPVGKALSDACMGTIASFLSKYQDIIIEHQKVVKGNQKRLESLRELAGKENLEYPSVTLPPQPHTKEGVDAYNEVIARVRMWVNLNLWQKLKLSRDDAKPLLRLKGFPSFPLVERQANEVDWWDMVCNVKKLINEKKEDGKVFWQNLAGYKRQEALRPYLSSEEDRKKGKKFARYQLGDLLLHLEKKHGEDWGKVYDEAWERIDKKVEGLSKHIKLEEERRSEDAQSKAALTDWLRAKASFVIEGLKEADKDEFCRCELKLQKWYGDLRGKPFAIEAENSILDISGFSKQYNCAFIWQKDGVKKLNLYLIINYFKGGKLRFKKIKPEAFEANRFYTVINKKSGEIVPMEVNFNFDDPNLIILPLAFGKRQGREFIWNDLLSLETGSLKLANGRVIEKTLYNRRTRQDEPALFVALTFERREVLDSSNIKPMNLIGVDRGENIPAVIALTDPEGCPLSRFKDSLGNPTHILRIGESYKEKQRTIQAKKEVEQRRAGGYSRKYASKAKNLADDMVRNTARDLLYYAVTQDAMLIFENLSRGFGRQGKRTFMAERQYTRMEDWLTAKLAYEGLPSKTYLSKTLAQYTSKTCSNCGFTITSADYDRVLEKLKKTATGWMTTINGKELKVEGQITYYNRYKRQNVVKDLSVELDRLSEESVNNDISSWTKGRSGEALSLLKKRFSHRPVQEKFVCLNCGFETHADEQAALNIARSWLFLRSQEYKKYQTNKTTGNTDKRAFVETWQSFYRKKLKEVWKPAV

SEQ ID NO: 35126 - protein, 979 aa, synthetic construct
  REGION 1..979: note = engineered CasX variant
QEIKRINKIRRRLVKDSNTKKAGKTGPMKTLLVRVMTPDLRERLENLRKKPENIPQPISNTSRANLNKLLTDYTEMKKAILHVYWEEFQKDPVGLMSRVAQPASKKIDQNKLKPEMDEKGNLTTAGFACSQCGQPLFVYKLEQVSEKGKAYTNYFGRCNVAEHEKLILLSDQLKPEKDSDEAVTYSLGKFGQRALDFYSIHVTKESTHPVKPLAQIAGNRYASVPVGKALSDACMGTIASFLSKYQDIIIEHQKVVKGNQKRLESLRELAGKENLEYPSVTLPPQPHTKEGVDAYNEVIARVRMWVNLNLWQKLKLSRDDAKPLLRLKGFPSFPLVERQANEVDWWDMVCNVKKLINEKKEDGKVFWQNLAGYKRQEALRPYLSSEEDRKKGKKFARYQLGDLLLHLEKKHGEDWGKVYDEAWERIDKKVEGLSKHIKLEEERRSEDAQSKAALTDWLRAKASFVIEGLKEADKDEFCRCELKLQKWYGDLRGKPFAIEAENSILDISGFSKQYNCAFIWQKDGVKKLNLYLIINYFKGGKLRFKKIKPEAFEANRFYTVINKKSGEIVPMEVNFNFDDPNLIILPLAFGKRQGREFIWNDLLSLETGSLKLANGRVIEKTLYNRRTRQDEPALFVALTFERREVLDSSNIKPMNLIGVDRGENIPAVIALTDPEGCPLSRFKDSLGNPTHILRIGESYKEKQRTIQAKKEVEQRRAGGYSRKYASKAKNLADDMVRNTARDLLYYAVTQDAMLIFENLSRGFGRQGKRTFMAERQYTRMEDWLTAKLAYEGLPSKTYLSKTLAQYTSKTCSNCGFTITSADYDRVLEKLKKTATGWMTTINGKELKVEGQITYYNRYKRQNVVKDLSVELDRLSEESVNNDISSWTKGRSGEALSLLKKRFSHRPVQEKFVCLNCGFETHADEQAALNIARSWLFLRSQEYKKYQTNKTTGNTDKRAFVETWQSFYRKKLKEVWKPAV

SEQ ID NO: 35127 - protein, 979 aa, synthetic construct
  REGION 1..979: note = engineered CasX variant
QEIKRINKIRRRLVKDSNTKKAGKTGPMKTLLVRVMTPDLRERLENLRKKPENIPQPISNTSRANLNKLLTDYTEMKKAILHVYWEEFQKDPVGLMSRVAQPASKKIDQNKLKPEMDEKGNLTTAGFACSQCGQPLFVYKLEQVSEKGKAYTNYFGRCNVAEHEKLIKLSDQLKPEKDSDEAVTYSLGKFGQRALDFYSIHVTKESTHPVKPLAQIAGNRYASGPVGKALSDACMGTIASFLSKYQDIIIEHQKVVKGNQKRLESLRELAGKENLEYPSVTLPPQPHTKEGVDAYNEVIARVRMWVNLNLWQKLKLSRDDAKPLLRLKGFPSFPLVERQANEVDWWDMVCNVKKLINEKKEDGKVFWQNLAGYKRQEALRPYLSSEEDRKKGKKFARYQLGDLLLHLEKKHGEDWGKVYDEAWERIDKKVEGLSKHIKLEEERRSEDAQSKAALTDWLRAKASFVIEGLKEADKDEFCRCELKLQKWYGDLRGKPFAIEAENSILDISGFSKQYNCAFIWQKDGVKKLNLYLIINYFKGGKLRFKKIKPEAFEANRFYTVINKKSGEIVPMEVNFNFDDPNLIILPLAFGKRQGREFIWNDLLSLETGSLKLANGRVIEKTLYNRRTRQDEPALFVALTFERREVLDSSNIKPMNLIGVDRGENIPAVIALTDPEGCPLSRFKDSLGNPTHILRIGESYKEKQRTIQAKKEVEQRRAGGYSRKYASKAKNLADDMVRNTARDLLYYAVTQDAMLIFENLSRGFGRQGKRTFMAERQYTRMEDWLTAKLAYEGLPSKTYLSKTLAQYTSKTCSNCGFTITSADYDRVLEKLKKTATGWMTTINGKELKVEGQITYYNRYKRQNVVKDLSVELDRLSEESVNNDISSWTKGRSGEALSLLKKRFSHRPVQEKFVCLNCGFETHADEQAALNIARSWLFLRSQEYKKYQTNKTTGNTDKRAFVETWQSFYRKKLKEVWKPAV

SEQ ID NO: 35128 - protein, 978 aa, synthetic construct
  REGION 1..978: note = engineered CasX variant
QEIKRINKIRRRLVKDSNTKKAGKTGPMKTLLVRVMTPDLRERLENLRKKPENIPQPISNTSRANLNKLLTDYTEMKKAILHVYWEEFQKDPVGLMSRVAQPASKKIDQNKLKPEMDEKGNLTTAGFACSQCGQPLFVYKLEQVSEKGKAYTNYFGRCNVAEHEKLILLSDQLKPEKDSDEAVTYSLGKFGQRALDFYSIHVTKESTHPVKPLAQIAGNRYASPVGKALSDACMGTIASFLSKYQDIIIEHQKVVKGNQKRLESLRELAGKENLEYPSVTLPPQPHTKEGVDAYNEVIARVRMWVNLNLWQKLKLSRDDAKPLLRLKGFPSFPLVERQANEVDWWDMVCNVKKLINEKKEDGKVFWQNLAGYKRQEALRPYLSSEEDRKKGKKFARYQLGDLLLHLEKKHGEDWGKVYDEAWERIDKKVEGLSKHIKLEEERRSEDAQSKAALTDWLRAKASFVIEGLKEADKDEFCRCELKLQKWYGDLRGKPFAIEAENSILDISGFSKQYNCAFIWQKDGVKKLNLYLIINYFKGGKLRFKKIKPEAFEANRFYTVINKKSGEIVPMEVNFNFDDPNLIILPLAFGKRQGREFIWNDLLSLETGSLKLANGRVIEKTLYNRRTRQDEPALFVALTFERREVLDSSNIKPMNLIGVDRGENIPAVIALTDPEGCPLSRFKDSLGNPTHILRIGESYKEKQRTIQAKKEVEQRRAGGYSRKYASKAKNLADDMVRNTARDLLYYAVTQDAMLIFENLSRGFGRQGKRTFMAERQYTRMEDWLTAKLAYEGLPSKTYLSKTLAQYTSKTCSNCGFTITSADYDRVLEKLKKTATGWMTTINGKELKVEGQITYYNRYKRQNVVKDLSVELDRLSEESVNNDISSWTKGRSGEALSLLKKRFSHRPVQEKFVCLNCGFETHADEQAALNIARSWLFLRSQEYKKYQTNKTTGNTDKRAFVETWQSFYRKKLKEVWKPAV

SEQ ID NO: 35129 - protein, 979 aa, synthetic construct
  REGION 1..979: note = engineered CasX variant
QEIKRINKIRRRLVKDSNTKKAGKTGPMKTLLVRVMTPDLRERLENLRKKPENIPQPISNTSRANLNKLLTDYTEMKKAILHVYWEEFQKDPVGLMSRVAQPASKKIDQNKLKPEMDEKGNLTTAGFACSQCGQPLFVYKLEQVSEKGKAYTNYFGRCNVAEHEKLILLSYQLKPEKDSDEAVTYSLGKFGQRALDFYSIHVTKESTHPVKPLAQIAGNRYASYPVGKALSDACMGTIASFLSKYQDIIIEHQKVVKGNQKRLESLRELAGKENLEYPSVTLPPQPHTKEGVDAYNEVIARVRMWVNLNLWQKLKLSRDDAKPLLRLKGFPSFPLVERQANEVDWWDMVCNVKKLINEKKEDGKVFWQNLAGYKRQEALRPYLSSEEDRKKGKKFARYQLGDLLLHLEKKHGEDWGKVYDEAWERIDKKVEGLSKHIKLEEERRSEDAQSKAALTDWLRAKASFVIEGLKEADKDEFCRCELKLQKWYGDLRGKPFAIEAENSILDISGFSKQYNCAFIWQKDGVKKLNLYLIINYFKGGKLRFKKIKPEAFEANRFYTVINKKSGEIVPMEVNFNFDDPNLIILPLAFGKRQGREFIWNDLLSLETGSLKLANGRVIEKTLYNRRTRQDEPALFVALTFERREVLDSSNIKPMNLIGVDRGENIPAVIALTDPEGCPLSRFKDSLGNPTHILRIGESYKEKQRTIQAKKEVEQRRAGGYSRKYASKAKNLADDMVRNTARDLLYYAVTQDAMLIFENLSRGFGRQGKRTFMAERQYTRMEDWLTAKLAYEGLPSKTYLSKTLAQYTSKTCSNCGFTITSADYDRVLEKLKKTATGWMTTINGKELKVEGQITYYNRYKRQNVVKDLSVELDRLSEESVNNDISSWTKGRSGEALSLLKKRFSHRPVQEKFVCLNCGFETHADEQAALNIARSWLFLRSQEYKKYQTNKTTGNTDKRAFVETWQSFYRKKLKEVWKPAV

SEQ ID NO: 35130 - protein, 979 aa, synthetic construct
  REGION 1..979: note = engineered CasX variant
QEIKRINKIRRRLVKDSNTKKAGKTGPMKTLLVRVMTPDLRERLENLRKKPENIPQPISNTSRANLNKLLTDYTEMKKAILHVYWEEFQKDPVGLMSRVAQPASKKIDQNKLKPEMDEKGNLTTAGFACSQCGQPLFVYKLEQVSEKGKAYTNYFGRCNVAEHEKLILLSYQLKPEKDSDEAVTYSLGKFGQRALDFYSIHVTKESTHPVKPLAQIAGNRYASHPVGKALSDACMGTIASFLSKYQDIIIEHQKVVKGNQKRLESLRELAGKENLEYPSVTLPPQPHTKEGVDAYNEVIARVRMWVNLNLWQKLKLSRDDAKPLLRLKGFPSFPLVERQANEVDWWDMVCNVKKLINEKKEDGKVFWQNLAGYKRQEALRPYLSSEEDRKKGKKFARYQLGDLLLHLEKKHGEDWGKVYDEAWERIDKKVEGLSKHIKLEEERRSEDAQSKAALTDWLRAKASFVIEGLKEADKDEFCRCELKLQKWYGDLRGKPFAIEAENSILDISGFSKQYNCAFIWQKDGVKKLNLYLIINYFKGGKLRFKKIKPEAFEANRFYTVINKKSGEIVPMEVNFNFDDPNLIILPLAFGKRQGREFIWNDLLSLETGSLKLANGRVIEKTLYNRRTRQDEPALFVALTFERREVLDSSNIKPMNLIGVDRGENIPAVIALTDPEGCPLSRFKDSLGNPTHILRIGESYKEKQRTIQAKKEVEQRRAGGYSRKYASKAKNLADDMVRNTARDLLYYAVTQDAMLIFENLSRGFGRQGKRTFMAERQYTRMEDWLTAKLAYEGLPSKTYLSKTLAQYTSKTCSNCGFTITSADYDRVLEKLKKTATGWMTTINGKELKVEGQITYYNRYKRQNVVKDLSVELDRLSEESVNNDISSWTKGRSGEALSLLKKRFSHRPVQEKFVCLNCGFETHADEQAALNIARSWLFLRSQEYKKYQTNKTTGNTDKRAFVETWQSFYRKKLKEVWKPAV

SEQ ID NO: 35131 - protein, 979 aa, synthetic construct
  REGION 1..979: note = engineered CasX variant
QEIKRINKIRRRLVKDSNTKKAGKTGPMKTLLVRVMTPDLRERLENLRKKPENIPQPISNTSRANLNKLLTDYTEMKKAILHVYWEEFQKDPVGLMSRVAQPASKKIDQNKLKPEMDEKGNLTTAGFACSQCGQPLFVYKLEQVSEKGKAYTNYFGRCNVAEHEKLILLSYQLKPEKDSDEAVTYSLGKFGQRALDFYSIHVTKESTHPVKPLAQIAGNRYASSPVGKALSDACMGTIASFLSKYQDIIIEHQKVVKGNQKRLESLRELAGKENLEYPSVTLPPQPHTKEGVDAYNEVIARVRMWVNLNLWQKLKLSRDDAKPLLRLKGFPSFPLVERQANEVDWWDMVCNVKKLINEKKEDGKVFWQNLAGYKRQEALRPYLSSEEDRKKGKKFARYQLGDLLLHLEKKHGEDWGKVYDEAWERIDKKVEGLSKHIKLEEERRSEDAQSKAALTDWLRAKASFVIEGLKEADKDEFCRCELKLQKWYGDLRGKPFAIEAENSILDISGFSKQYNCAFIWQKDGVKKLNLYLIINYFKGGKLRFKKIKPEAFEANRFYTVINKKSGEIVPMEVNFNFDDPNLIILPLAFGKRQGREFIWNDLLSLETGSLKLANGRVIEKTLYNRRTRQDEPALFVALTFERREVLDSSNIKPMNLIGVDRGENIPAVIALTDPEGCPLSRFKDSLGNPTHILRIGESYKEKQRTIQAKKEVEQRRAGGYSRKYASKAKNLADDMVRNTARDLLYYAVTQDAMLIFENLSRGFGRQGKRTFMAERQYTRMEDWLTAKLAYEGLPSKTYLSKTLAQYTSKTCSNCGFTITSADYDRVLEKLKKTATGWMTTINGKELKVEGQITYYNRYKRQNVVKDLSVELDRLSEESVNNDISSWTKGRSGEALSLLKKRFSHRPVQEKFVCLNCGFETHADEQAALNIARSWLFLRSQEYKKYQTNKTTGNTDKRAFVETWQSFYRKKLKEVWKPAV

SEQ ID NO: 35132 - protein, 979 aa, synthetic construct
  REGION 1..979: note = engineered CasX variant
QEIKRINKIRRRLVKDSNTKKAGKTGPMKTLLVRVMTPDLRERLENLRKKPENIPQPISNTSRANLNKLLTDYTEMKKAILHVYWEEFQKDPVGLMSRVAQPASKKIDQNKLKPEMDEKGNLTTAGFACSQCGQPLFVYKLEQVSEKGKAYTNYFGRCNVAEHEKLILLSYQLKPEKDSDEAVTYSLGKFGQRALDFYSIHVTKESTHPVKPLAQIAGNRYASTPVGKALSDACMGTIASFLSKYQDIIIEHQKVVKGNQKRLESLRELAGKENLEYPSVTLPPQPHTKEGVDAYNEVIARVRMWVNLNLWQKLKLSRDDAKPLLRLKGFPSFPLVERQANEVDWWDMVCNVKKLINEKKEDGKVFWQNLAGYKRQEALRPYLSSEEDRKKGKKFARYQLGDLLLHLEKKHGEDWGKVYDEAWERIDKKVEGLSKHIKLEEERRSEDAQSKAALTDWLRAKASFVIEGLKEADKDEFCRCELKLQKWYGDLRGKPFAIEAENSILDISGFSKQYNCAFIWQKDGVKKLNLYLIINYFKGGKLRFKKIKPEAFEANRFYTVINKKSGEIVPMEVNFNFDDPNLIILPLAFGKRQGREFIWNDLLSLETGSLKLANGRVIEKTLYNRRTRQDEPALFVALTFERREVLDSSNIKPMNLIGVDRGENIPAVIALTDPEGCPLSRFKDSLGNPTHILRIGESYKEKQRTIQAKKEVEQRRAGGYSRKYASKAKNLADDMVRNTARDLLYYAVTQDAMLIFENLSRGFGRQGKRTFMAERQYTRMEDWLTAKLAYEGLPSKTYLSKTLAQYTSKTCSNCGFTITSADYDRVLEKLKKTATGWMTTINGKELKVEGQITYYNRYKRQNVVKDLSVELDRLSEESVNNDISSWTKGRSGEALSLLKKRFSHRPVQEKFVCLNCGFETHADEQAALNIARSWLFLRSQEYKKYQTNKTTGNTDKRAFVETWQSFYRKKLKEVWKPAV

SEQ ID NO: 35133 - protein, 979 aa, synthetic construct
  REGION 1..979: note = engineered CasX variant
QEIKRINKIRRRLVKDSNTKKAGKTGPMKTLLVRVMTPDLRERLENLRKKPENIPQPISNTSRANLNKLLTDYTEMKKAILHVYWEEFQKDPVGLMSRVAQPASKKIDQNKLKPEMDEKGNLTTAGFACSQCGQPLFVYKLEQVSEKGKAYTNYFGRCNVAEHEKLILLSYQLKPEKDSDEAVTYSLGKFGQRALDFYSIHVTKESTHPVKPLAQIAGNRYASAPVGKALSDACMGTIASFLSKYQDIIIEHQKVVKGNQKRLESLRELAGKENLEYPSVTLPPQPHTKEGVDAYNEVIARVRMWVNLNLWQKLKLSRDDAKPLLRLKGFPSFPLVERQANEVDWWDMVCNVKKLINEKKEDGKVFWQNLAGYKRQEALRPYLSSEEDRKKGKKFARYQLGDLLLHLEKKHGEDWGKVYDEAWERIDKKVEGLSKHIKLEEERRSEDAQSKAALTDWLRAKASFVIEGLKEADKDEFCRCELKLQKWYGDLRGKPFAIEAENSILDISGFSKQYNCAFIWQKDGVKKLNLYLIINYFKGGKLRFKKIKPEAFEANRFYTVINKKSGEIVPMEVNFNFDDPNLIILPLAFGKRQGREFIWNDLLSLETGSLKLANGRVIEKTLYNRRTRQDEPALFVALTFERREVLDSSNIKPMNLIGVDRGENIPAVIALTDPEGCPLSRFKDSLGNPTHILRIGESYKEKQRTIQAKKEVEQRRAGGYSRKYASKAKNLADDMVRNTARDLLYYAVTQDAMLIFENLSRGFGRQGKRTFMAERQYTRMEDWLTAKLAYEGLPSKTYLSKTLAQYTSKTCSNCGFTITSADYDRVLEKLKKTATGWMTTINGKELKVEGQITYYNRYKRQNVVKDLSVELDRLSEESVNNDISSWTKGRSGEALSLLKKRFSHRPVQEKFVCLNCGFETHADEQAALNIARSWLFLRSQEYKKYQTNKTTGNTDKRAFVETWQSFYRKKLKEVWKPAV

SEQ ID NO: 35134 - protein, 979 aa, synthetic construct
  REGION 1..979: note = engineered CasX variant
QEIKRINKIRRRLVKDSNTKKAGKTGPMKTLLVRVMTPDLRERLENLRKKPENIPQPISNTSRANLNKLLTDYTEMKKAILHVYWEEFQKDPVGLMSRVAQPASKKIDQNKLKPEMDEKGNLTTAGFACSQCGQPLFVYKLEQVSEKGKAYTNYFGRCNVAEHEKLILLSYQLKPEKDSDEAVTYSLGKFGQRALDFYSIHVTKESTHPVKPLAQIAGNRYASVPVGKALSDACMGTIASFLSKYQDIIIEHQKVVKGNQKRLESLRELAGKENLEYPSVTLPPQPHTKEGVDAYNEVIARVRMWVNLNLWQKLKLSRDDAKPLLRLKGFPSFPLVERQANEVDWWDMVCNVKKLINEKKEDGKVFWQNLAGYKRQEALRPYLSSEEDRKKGKKFARYQLGDLLLHLEKKHGEDWGKVYDEAWERIDKKVEGLSKHIKLEEERRSEDAQSKAALTDWLRAKASFVIEGLKEADKDEFCRCELKLQKWYGDLRGKPFAIEAENSILDISGFSKQYNCAFIWQKDGVKKLNLYLIINYFKGGKLRFKKIKPEAFEANRFYTVINKKSGEIVPMEVNFNFDDPNLIILPLAFGKRQGREFIWNDLLSLETGSLKLANGRVIEKTLYNRRTRQDEPALFVALTFERREVLDSSNIKPMNLIGVDRGENIPAVIALTDPEGCPLSRFKDSLGNPTHILRIGESYKEKQRTIQAKKEVEQRRAGGYSRKYASKAKNLADDMVRNTARDLLYYAVTQDAMLIFENLSRGFGRQGKRTFMAERQYTRMEDWLTAKLAYEGLPSKTYLSKTLAQYTSKTCSNCGFTITSADYDRVLEKLKKTATGWMTTINGKELKVEGQITYYNRYKRQNVVKDLSVELDRLSEESVNNDISSWTKGRSGEALSLLKKRFSHRPVQEKFVCLNCGFETHADEQAALNIARSWLFLRSQEYKKYQTNKTTGNTDKRAFVETWQSFYRKKLKEVWKPAV

SEQ ID NO: 35135 - protein, 979 aa, synthetic construct
  REGION 1..979: note = engineered CasX variant
QEIKRINKIRRRLVKDSNTKKAGKTGPMKTLLVRVMTPDLRERLENLRKKPENIPQPISNTSRANLNKLLTDYTEMKKAILHVYWEEFQKDPVGLMSRVAQPASKKIDQNKLKPEMDEKGNLTTAGFACSQCGQPLFVYKLEQVSEKGKAYTNYFGRCNVAEHEKLIKLSYQLKPEKDSDEAVTYSLGKFGQRALDFYSIHVTKESTHPVKPLAQIAGNRYASGPVGKALSDACMGTIASFLSKYQDIIIEHQKVVKGNQKRLESLRELAGKENLEYPSVTLPPQPHTKEGVDAYNEVIARVRMWVNLNLWQKLKLSRDDAKPLLRLKGFPSFPLVERQANEVDWWDMVCNVKKLINEKKEDGKVFWQNLAGYKRQEALRPYLSSEEDRKKGKKFARYQLGDLLLHLEKKHGEDWGKVYDEAWERIDKKVEGLSKHIKLEEERRSEDAQSKAALTDWLRAKASFVIEGLKEADKDEFCRCELKLQKWYGDLRGKPFAIEAENSILDISGFSKQYNCAFIWQKDGVKKLNLYLIINYFKGGKLRFKKIKPEAFEANRFYTVINKKSGEIVPMEVNFNFDDPNLIILPLAFGKRQGREFIWNDLLSLETGSLKLANGRVIEKTLYNRRTRQDEPALFVALTFERREVLDSSNIKPMNLIGVDRGENIPAVIALTDPEGCPLSRFKDSLGNPTHILRIGESYKEKQRTIQAKKEVEQRRAGGYSRKYASKAKNLADDMVRNTARDLLYYAVTQDAMLIFENLSRGFGRQGKRTFMAERQYTRMEDWLTAKLAYEGLPSKTYLSKTLAQYTSKTCSNCGFTITSADYDRVLEKLKKTATGWMTTINGKELKVEGQITYYNRYKRQNVVKDLSVELDRLSEESVNNDISSWTKGRSGEALSLLKKRFSHRPVQEKFVCLNCGFETHADEQAALNIARSWLFLRSQEYKKYQTNKTTGNTDKRAFVETWQSFYRKKLKEVWKPAV

SEQ ID NO: 35136 - protein, 978 aa, synthetic construct
  REGION 1..978: note = engineered CasX variant
QEIKRINKIRRRLVKDSNTKKAGKTGPMKTLLVRVMTPDLRERLENLRKKPENIPQPISNTSRANLNKLLTDYTEMKKAILHVYWEEFQKDPVGLMSRVAQPASKKIDQNKLKPEMDEKGNLTTAGFACSQCGQPLFVYKLEQVSEKGKAYTNYFGRCNVAEHEKLILLSYQLKPEKDSDEAVTYSLGKFGQRALDFYSIHVTKESTHPVKPLAQIAGNRYASPVGKALSDACMGTIASFLSKYQDIIIEHQKVVKGNQKRLESLRELAGKENLEYPSVTLPPQPHTKEGVDAYNEVIARVRMWVNLNLWQKLKLSRDDAKPLLRLKGFPSFPLVERQANEVDWWDMVCNVKKLINEKKEDGKVFWQNLAGYKRQEALRPYLSSEEDRKKGKKFARYQLGDLLLHLEKKHGEDWGKVYDEAWERIDKKVEGLSKHIKLEEERRSEDAQSKAALTDWLRAKASFVIEGLKEADKDEFCRCELKLQKWYGDLRGKPFAIEAENSILDISGFSKQYNCAFIWQKDGVKKLNLYLIINYFKGGKLRFKKIKPEAFEANRFYTVINKKSGEIVPMEVNFNFDDPNLIILPLAFGKRQGREFIWNDLLSLETGSLKLANGRVIEKTLYNRRTRQDEPALFVALTFERREVLDSSNIKPMNLIGVDRGENIPAVIALTDPEGCPLSRFKDSLGNPTHILRIGESYKEKQRTIQAKKEVEQRRAGGYSRKYASKAKNLADDMVRNTARDLLYYAVTQDAMLIFENLSRGFGRQGKRTFMAERQYTRMEDWLTAKLAYEGLPSKTYLSKTLAQYTSKTCSNCGFTITSADYDRVLEKLKKTATGWMTTINGKELKVEGQITYYNRYKRQNVVKDLSVELDRLSEESVNNDISSWTKGRSGEALSLLKKRFSHRPVQEKFVCLNCGFETHADEQAALNIARSWLFLRSQEYKKYQTNKTTGNTDKRAFVETWQSFYRKKLKEVWKPAV

SEQ ID NO: 35137 - protein, 978 aa, synthetic construct
  REGION 1..978: note = engineered CasX variant
QEIKRINKIRRRLVKDSNTKKAGKTGPMKTLLVRVMTPDLRERLENLRKKPENIPQPISNTSRANLNKLLTDYTEMKKAILHVYWEEFQKDPVGLMSRVAQPASKKIDQNKLKPEMDEKGNLTTAGFACSQCGQPLFVYKLEQVSEKGKAYTNYFGRCNVAEHEKLILLSQLKPEKDSDEAVTYSLGKFGQRALDFYSIHVTKESTHPVKPLAQIAGNRYASYPVGKALSDACMGTIASFLSKYQDIIIEHQKVVKGNQKRLESLRELAGKENLEYPSVTLPPQPHTKEGVDAYNEVIARVRMWVNLNLWQKLKLSRDDAKPLLRLKGFPSFPLVERQANEVDWWDMVCNVKKLINEKKEDGKVFWQNLAGYKRQEALRPYLSSEEDRKKGKKFARYQLGDLLLHLEKKHGEDWGKVYDEAWERIDKKVEGLSKHIKLEEERRSEDAQSKAALTDWLRAKASFVIEGLKEADKDEFCRCELKLQKWYGDLRGKPFAIEAENSILDISGFSKQYNCAFIWQKDGVKKLNLYLIINYFKGGKLRFKKIKPEAFEANRFYTVINKKSGEIVPMEVNFNFDDPNLIILPLAFGKRQGREFIWNDLLSLETGSLKLANGRVIEKTLYNRRTRQDEPALFVALTFERREVLDSSNIKPMNLIGVDRGENIPAVIALTDPEGCPLSRFKDSLGNPTHILRIGESYKEKQRTIQAKKEVEQRRAGGYSRKYASKAKNLADDMVRNTARDLLYYAVTQDAMLIFENLSRGFGRQGKRTFMAERQYTRMEDWLTAKLAYEGLPSKTYLSKTLAQYTSKTCSNCGFTITSADYDRVLEKLKKTATGWMTTINGKELKVEGQITYYNRYKRQNVVKDLSVELDRLSEESVNNDISSWTKGRSGEALSLLKKRFSHRPVQEKFVCLNCGFETHADEQAALNIARSWLFLRSQEYKKYQTNKTTGNTDKRAFVETWQSFYRKKLKEVWKPAV

SEQ ID NO: 35138 - protein, 978 aa, synthetic construct
  REGION 1..978: note = engineered CasX variant
QEIKRINKIRRRLVKDSNTKKAGKTGPMKTLLVRVMTPDLRERLENLRKKPENIPQPISNTSRANLNKLLTDYTEMKKAILHVYWEEFQKDPVGLMSRVAQPASKKIDQNKLKPEMDEKGNLTTAGFACSQCGQPLFVYKLEQVSEKGKAYTNYFGRCNVAEHEKLILLSQLKPEKDSDEAVTYSLGKFGQRALDFYSIHVTKESTHPVKPLAQIAGNRYASHPVGKALSDACMGTIASFLSKYQDIIIEHQKVVKGNQKRLESLRELAGKENLEYPSVTLPPQPHTKEGVDAYNEVIARVRMWVNLNLWQKLKLSRDDAKPLLRLKGFPSFPLVERQANEVDWWDMVCNVKKLINEKKEDGKVFWQNLAGYKRQEALRPYLSSEEDRKKGKKFARYQLGDLLLHLEKKHGEDWGKVYDEAWERIDKKVEGLSKHIKLEEERRSEDAQSKAALTDWLRAKASFVIEGLKEADKDEFCRCELKLQKWYGDLRGKPFAIEAENSILDISGFSKQYNCAFIWQKDGVKKLNLYLIINYFKGGKLRFKKIKPEAFEANRFYTVINKKSGEIVPMEVNFNFDDPNLIILPLAFGKRQGREFIWNDLLSLETGSLKLANGRVIEKTLYNRRTRQDEPALFVALTFERREVLDSSNIKPMNLIGVDRGENIPAVIALTDPEGCPLSRFKDSLGNPTHILRIGESYKEKQRTIQAKKEVEQRRAGGYSRKYASKAKNLADDMVRNTARDLLYYAVTQDAMLIFENLSRGFGRQGKRTFMAERQYTRMEDWLTAKLAYEGLPSKTYLSKTLAQYTSKTCSNCGFTITSADYDRVLEKLKKTATGWMTTINGKELKVEGQITYYNRYKRQNVVKDLSVELDRLSEESVNNDISSWTKGRSGEALSLLKKRFSHRPVQEKFVCLNCGFETHADEQAALNIARSWLFLRSQEYKKYQTNKTTGNTDKRAFVETWQSFYRKKLKEVWKPAV

SEQ ID NO: 35139 - protein, 978 aa, synthetic construct
  REGION 1..978: note = engineered CasX variant
QEIKRINKIRRRLVKDSNTKKAGKTGPMKTLLVRVMTPDLRERLENLRKKPENIPQPISNTSRANLNKLLTDYTEMKKAILHVYWEEFQKDPVGLMSRVAQPASKKIDQNKLKPEMDEKGNLTTAGFACSQCGQPLFVYKLEQVSEKGKAYTNYFGRCNVAEHEKLILLSQLKPEKDSDEAVTYSLGKFGQRALDFYSIHVTKESTHPVKPLAQIAGNRYASTPVGKALSDACMGTIASFLSKYQDIIIEHQKVVKGNQKRLESLRELAGKENLEYPSVTLPPQPHTKEGVDAYNEVIARVRMWVNLNLWQKLKLSRDDAKPLLRLKGFPSFPLVERQANEVDWWDMVCNVKKLINEKKEDGKVFWQNLAGYKRQEALRPYLSSEEDRKKGKKFARYQLGDLLLHLEKKHGEDWGKVYDEAWERIDKKVEGLSKHIKLEEERRSEDAQSKAALTDWLRAKASFVIEGLKEADKDEFCRCELKLQKWYGDLRGKPFAIEAENSILDISGFSKQYNCAFIWQKDGVKKLNLYLIINYFKGGKLRFKKIKPEAFEANRFYTVINKKSGEIVPMEVNFNFDDPNLIILPLAFGKRQGREFIWNDLLSLETGSLKLANGRVIEKTLYNRRTRQDEPALFVALTFERREVLDSSNIKPMNLIGVDRGENIPAVIALTDPEGCPLSRFKDSLGNPTHILRIGESYKEKQRTIQAKKEVEQRRAGGYSRKYASKAKNLADDMVRNTARDLLYYAVTQDAMLIFENLSRGFGRQGKRTFMAERQYTRMEDWLTAKLAYEGLPSKTYLSKTLAQYTSKTCSNCGFTITSADYDRVLEKLKKTATGWMTTINGKELKVEGQITYYNRYKRQNVVKDLSVELDRLSEESVNNDISSWTKGRSGEALSLLKKRFSHRPVQEKFVCLNCGFETHADEQAALNIARSWLFLRSQEYKKYQTNKTTGNTDKRAFVETWQSFYRKKLKEVWKPAV

SEQ ID NO: 35140 - protein, 978 aa, synthetic construct
  REGION 1..978: note = engineered CasX variant
QEIKRINKIRRRLVKDSNTKKAGKTGPMKTLLVRVMTPDLRERLENLRKKPENIPQPISNTSRANLNKLLTDYTEMKKAILHVYWEEFQKDPVGLMSRVAQPASKKIDQNKLKPEMDEKGNLTTAGFACSQCGQPLFVYKLEQVSEKGKAYTNYFGRCNVAEHEKLILLSQLKPEKDSDEAVTYSLGKFGQRALDFYSIHVTKESTHPVKPLAQIAGNRYASAPVGKALSDACMGTIASFLSKYQDIIIEHQKVVKGNQKRLESLRELAGKENLEYPSVTLPPQPHTKEGVDAYNEVIARVRMWVNLNLWQKLKLSRDDAKPLLRLKGFPSFPLVERQANEVDWWDMVCNVKKLINEKKEDGKVFWQNLAGYKRQEALRPYLSSEEDRKKGKKFARYQLGDLLLHLEKKHGEDWGKVYDEAWERIDKKVEGLSKHIKLEEERRSEDAQSKAALTDWLRAKASFVIEGLKEADKDEFCRCELKLQKWYGDLRGKPFAIEAENSILDISGFSKQYNCAFIWQKDGVKKLNLYLIINYFKGGKLRFKKIKPEAFEANRFYTVINKKSGEIVPMEVNFNFDDPNLIILPLAFGKRQGREFIWNDLLSLETGSLKLANGRVIEKTLYNRRTRQDEPALFVALTFERREVLDSSNIKPMNLIGVDRGENIPAVIALTDPEGCPLSRFKDSLGNPTHILRIGESYKEKQRTIQAKKEVEQRRAGGYSRKYASKAKNLADDMVRNTARDLLYYAVTQDAMLIFENLSRGFGRQGKRTFMAERQYTRMEDWLTAKLAYEGLPSKTYLSKTLAQYTSKTCSNCGFTITSADYDRVLEKLKKTATGWMTTINGKELKVEGQITYYNRYKRQNVVKDLSVELDRLSEESVNNDISSWTKGRSGEALSLLKKRFSHRPVQEKFVCLNCGFETHADEQAALNIARSWLFLRSQEYKKYQTNKTTGNTDKRAFVETWQSFYRKKLKEVWKPAV

SEQ ID NO: 35141 - protein, 978 aa, synthetic construct
  REGION 1..978: note = engineered CasX variant
QEIKRINKIRRRLVKDSNTKKAGKTGPMKTLLVRVMTPDLRERLENLRKKPENIPQPISNTSRANLNKLLTDYTEMKKAILHVYWEEFQKDPVGLMSRVAQPASKKIDQNKLKPEMDEKGNLTTAGFACSQCGQPLFVYKLEQVSEKGKAYTNYFGRCNVAEHEKLILLSQLKPEKDSDEAVTYSLGKFGQRALDFYSIHVTKESTHPVKPLAQIAGNRYASVPVGKALSDACMGTIASFLSKYQDIIIEHQKVVKGNQKRLESLRELAGKENLEYPSVTLPPQPHTKEGVDAYNEVIARVRMWVNLNLWQKLKLSRDDAKPLLRLKGFPSFPLVERQANEVDWWDMVCNVKKLINEKKEDGKVFWQNLAGYKRQEALRPYLSSEEDRKKGKKFARYQLGDLLLHLEKKHGEDWGKVYDEAWERIDKKVEGLSKHIKLEEERRSEDAQSKAALTDWLRAKASFVIEGLKEADKDEFCRCELKLQKWYGDLRGKPFAIEAENSILDISGFSKQYNCAFIWQKDGVKKLNLYLIINYFKGGKLRFKKIKPEAFEANRFYTVINKKSGEIVPMEVNFNFDDPNLIILPLAFGKRQGREFIWNDLLSLETGSLKLANGRVIEKTLYNRRTRQDEPALFVALTFERREVLDSSNIKPMNLIGVDRGENIPAVIALTDPEGCPLSRFKDSLGNPTHILRIGESYKEKQRTIQAKKEVEQRRAGGYSRKYASKAKNLADDMVRNTARDLLYYAVTQDAMLIFENLSRGFGRQGKRTFMAERQYTRMEDWLTAKLAYEGLPSKTYLSKTLAQYTSKTCSNCGFTITSADYDRVLEKLKKTATGWMTTINGKELKVEGQITYYNRYKRQNVVKDLSVELDRLSEESVNNDISSWTKGRSGEALSLLKKRFSHRPVQEKFVCLNCGFETHADEQAALNIARSWLFLRSQEYKKYQTNKTTGNTDKRAFVETWQSFYRKKLKEVWKPAV

SEQ ID NO: 35142 - protein, 978 aa, synthetic construct
  REGION 1..978: note = engineered CasX variant
QEIKRINKIRRRLVKDSNTKKAGKTGPMKTLLVRVMTPDLRERLENLRKKPENIPQPISNTSRANLNKLLTDYTEMKKAILHVYWEEFQKDPVGLMSRVAQPASKKIDQNKLKPEMDEKGNLTTAGFACSQCGQPLFVYKLEQVSEKGKAYTNYFGRCNVAEHEKLILLSQLKPEKDSDEAVTYSLGKFGQRALDFYSIHVTKESTHPVKPLAQIAGNRYASYPVGKALSDACMGTIASFLSKYQDIIIEHQKVVKGNQKRLESLRELAGKENLEYPSVTLPPQPHTSEGVDAYNEVIARVRMWVNLNLWQKLKLSRDDAKPLLRLKGFPSFPLVERQANEVDWWDMVCNVKKLINEKKEDGKVFWQNLAGYKRQEALRPYLSSEEDRKKGKKFARYQLGDLLLHLEKKHGEDWGKVYDEAWERIDKKVEGLSKHIKLEEERRSEDAQSKAALTDWLRAKASFVIEGLKEADKDEFCRCELKLQKWYGDLRGKPFAIEAENSILDISGFSKQYNCAFIWQKDGVKKLNLYLIINYFKGGKLRFKKIKPEAFEANRFYTVINKKSGEIVPMEVNFNFDDPNLIILPLAFGKRQGREFIWNDLLSLETGSLKLANGRVIEKTLYNRRTRQDEPALFVALTFERREVLDSSNIKPMNLIGVDRGENIPAVIALTDPEGCPLSRFKDSLGNPTHILRIGESYKEKQRTIQAKKEVEQRRAGGYSRKYASKAKNLADDMVRNTARDLLYYAVTQDAMLIFENLSRGFGRQGKRTFMAERQYTRMEDWLTAKLAYEGLPSKTYLSKTLAQYTSKTCSNCGFTITSADYDRVLEKLKKTATGWMTTINGKELKVEGQITYYNRYKRQNVVKDLSVELDRLSEESVNNDISSWTKGRSGEALSLLKKRFSHRPVQEKFVCLNCGFETHADEQAALNIARSWLFLRSQEYKKYQTNKTTGNTDKRAFVETWQSFYRKKLKEVWKPAV

SEQ ID NO: 35143 - protein, 978 aa, synthetic construct
  REGION 1..978: note = engineered CasX variant
QEIKRINKIRRRLVKDSNTKKAGKTGPMKTLLVRVMTPDLRERLENLRKKPENIPQPISNTSRANLNKLLTDYTEMKKAILHVYWEEFQKDPVGLMSRVAQPASKKIDQNKLKPEMDEKGNLTTAGFACSQCGQPLFVYKLEQVSEKGKAYTNYFGRCNVAEHEKLILLSQLKPEKDSDEAVTYSLGKFGQRALDFYSIHVTKESTHPVKPLAQIAGNRYASHPVGKALSDACMGTIASFLSKYQDIIIEHQKVVKGNQKRLESLRELAGKENLEYPSVTLPPQPHTSEGVDAYNEVIARVRMWVNLNLWQKLKLSRDDAKPLLRLKGFPSFPLVERQANEVDWWDMVCNVKKLINEKKEDGKVFWQNLAGYKRQEALRPYLSSEEDRKKGKKFARYQLGDLLLHLEKKHGEDWGKVYDEAWERIDKKVEGLSKHIKLEEERRSEDAQSKAALTDWLRAKASFVIEGLKEADKDEFCRCELKLQKWYGDLRGKPFAIEAENSILDISGFSKQYNCAFIWQKDGVKKLNLYLIINYFKGGKLRFKKIKPEAFEANRFYTVINKKSGEIVPMEVNFNFDDPNLIILPLAFGKRQGREFIWNDLLSLETGSLKLANGRVIEKTLYNRRTRQDEPALFVALTFERREVLDSSNIKPMNLIGVDRGENIPAVIALTDPEGCPLSRFKDSLGNPTHILRIGESYKEKQRTIQAKKEVEQRRAGGYSRKYASKAKNLADDMVRNTARDLLYYAVTQDAMLIFENLSRGFGRQGKRTFMAERQYTRMEDWLTAKLAYEGLPSKTYLSKTLAQYTSKTCSNCGFTITSADYDRVLEKLKKTATGWMTTINGKELKVEGQITYYNRYKRQNVVKDLSVELDRLSEESVNNDISSWTKGRSGEALSLLKKRFSHRPVQEKFVCLNCGFETHADEQAALNIARSWLFLRSQEYKKYQTNKTTGNTDKRAFVETWQSFYRKKLKEVWKPAV

SEQ ID NO: 35144 - protein, 978 aa, synthetic construct
  REGION 1..978: note = engineered CasX variant
QEIKRINKIRRRLVKDSNTKKAGKTGPMKTLLVRVMTPDLRERLENLRKKPENIPQPISNTSRANLNKLLTDYTEMKKAILHVYWEEFQKDPVGLMSRVAQPASKKIDQNKLKPEMDEKGNLTTAGFACSQCGQPLFVYKLEQVSEKGKAYTNYFGRCNVAEHEKLILLSQLKPEKDSDEAVTYSLGKFGQRALDFYSIHVTKESTHPVKPLAQIAGNRYASSPVGKALSDACMGTIASFLSKYQDIIIEHQKVVKGNQKRLESLRELAGKENLEYPSVTLPPQPHTSEGVDAYNEVIARVRMWVNLNLWQKLKLSRDDAKPLLRLKGFPSFPLVERQANEVDWWDMVCNVKKLINEKKEDGKVFWQNLAGYKRQEALRPYLSSEEDRKKGKKFARYQLGDLLLHLEKKHGEDWGKVYDEAWERIDKKVEGLSKHIKLEEERRSEDAQSKAALTDWLRAKASFVIEGLKEADKDEFCRCELKLQKWYGDLRGKPFAIEAENSILDISGFSKQYNCAFIWQKDGVKKLNLYLIINYFKGGKLRFKKIKPEAFEANRFYTVINKKSGEIVPMEVNFNFDDPNLIILPLAFGKRQGREFIWNDLLSLETGSLKLANGRVIEKTLYNRRTRQDEPALFVALTFERREVLDSSNIKPMNLIGVDRGENIPAVIALTDPEGCPLSRFKDSLGNPTHILRIGESYKEKQRTIQAKKEVEQRRAGGYSRKYASKAKNLADDMVRNTARDLLYYAVTQDAMLIFENLSRGFGRQGKRTFMAERQYTRMEDWLTAKLAYEGLPSKTYLSKTLAQYTSKTCSNCGFTITSADYDRVLEKLKKTATGWMTTINGKELKVEGQITYYNRYKRQNVVKDLSVELDRLSEESVNNDISSWTKGRSGEALSLLKKRFSHRPVQEKFVCLNCGFETHADEQAALNIARSWLFLRSQEYKKYQTNKTTGNTDKRAFVETWQSFYRKKLKEVWKPAV

SEQ ID NO: 35145 - protein, 978 aa, synthetic construct
  REGION 1..978: note = engineered CasX variant
QEIKRINKIRRRLVKDSNTKKAGKTGPMKTLLVRVMTPDLRERLENLRKKPENIPQPISNTSRANLNKLLTDYTEMKKAILHVYWEEFQKDPVGLMSRVAQPASKKIDQNKLKPEMDEKGNLTTAGFACSQCGQPLFVYKLEQVSEKGKAYTNYFGRCNVAEHEKLILLSQLKPEKDSDEAVTYSLGKFGQRALDFYSIHVTKESTHPVKPLAQIAGNRYASTPVGKALSDACMGTIASFLSKYQDIIIEHQKVVKGNQKRLESLRELAGKENLEYPSVTLPPQPHTSEGVDAYNEVIARVRMWVNLNLWQKLKLSRDDAKPLLRLKGFPSFPLVERQANEVDWWDMVCNVKKLINEKKEDGKVFWQNLAGYKRQEALRPYLSSEEDRKKGKKFARYQLGDLLLHLEKKHGEDWGKVYDEAWERIDKKVEGLSKHIKLEEERRSEDAQSKAALTDWLRAKASFVIEGLKEADKDEFCRCELKLQKWYGDLRGKPFAIEAENSILDISGFSKQYNCAFIWQKDGVKKLNLYLIINYFKGGKLRFKKIKPEAFEANRFYTVINKKSGEIVPMEVNFNFDDPNLIILPLAFGKRQGREFIWNDLLSLETGSLKLANGRVIEKTLYNRRTRQDEPALFVALTFERREVLDSSNIKPMNLIGVDRGENIPAVIALTDPEGCPLSRFKDSLGNPTHILRIGESYKEKQRTIQAKKEVEQRRAGGYSRKYASKAKNLADDMVRNTARDLLYYAVTQDAMLIFENLSRGFGRQGKRTFMAERQYTRMEDWLTAKLAYEGLPSKTYLSKTLAQYTSKTCSNCGFTITSADYDRVLEKLKKTATGWMTTINGKELKVEGQITYYNRYKRQNVVKDLSVELDRLSEESVNNDISSWTKGRSGEALSLLKKRFSHRPVQEKFVCLNCGFETHADEQAALNIARSWLFLRSQEYKKYQTNKTTGNTDKRAFVETWQSFYRKKLKEVWKPAV

SEQ ID NO: 35146 - protein, 978 aa, synthetic construct
  REGION 1..978: note = engineered CasX variant
QEIKRINKIRRRLVKDSNTKKAGKTGPMKTLLVRVMTPDLRERLENLRKKPENIPQPISNTSRANLNKLLTDYTEMKKAILHVYWEEFQKDPVGLMSRVAQPASKKIDQNKLKPEMDEKGNLTTAGFACSQCGQPLFVYKLEQVSEKGKAYTNYFGRCNVAEHEKLILLSQLKPEKDSDEAVTYSLGKFGQRALDFYSIHVTKESTHPVKPLAQIAGNRYASAPVGKALSDACMGTIASFLSKYQDIIIEHQKVVKGNQKRLESLRELAGKENLEYPSVTLPPQPHTSEGVDAYNEVIARVRMWVNLNLWQKLKLSRDDAKPLLRLKGFPSFPLVERQANEVDWWDMVCNVKKLINEKKEDGKVFWQNLAGYKRQEALRPYLSSEEDRKKGKKFARYQLGDLLLHLEKKHGEDWGKVYDEAWERIDKKVEGLSKHIKLEEERRSEDAQSKAALTDWLRAKASFVIEGLKEADKDEFCRCELKLQKWYGDLRGKPFAIEAENSILDISGFSKQYNCAFIWQKDGVKKLNLYLIINYFKGGKLRFKKIKPEAFEANRFYTVINKKSGEIVPMEVNFNFDDPNLIILPLAFGKRQGREFIWNDLLSLETGSLKLANGRVIEKTLYNRRTRQDEPALFVALTFERREVLDSSNIKPMNLIGVDRGENIPAVIALTDPEGCPLSRFKDSLGNPTHILRIGESYKEKQRTIQAKKEVEQRRAGGYSRKYASKAKNLADDMVRNTARDLLYYAVTQDAMLIFENLSRGFGRQGKRTFMAERQYTRMEDWLTAKLAYEGLPSKTYLSKTLAQYTSKTCSNCGFTITSADYDRVLEKLKKTATGWMTTINGKELKVEGQITYYNRYKRQNVVKDLSVELDRLSEESVNNDISSWTKGRSGEALSLLKKRFSHRPVQEKFVCLNCGFETHADEQAALNIARSWLFLRSQEYKKYQTNKTTGNTDKRAFVETWQSFYRKKLKEVWKPAV

SEQ ID NO: 35147 - protein, 978 aa, synthetic construct
  REGION 1..978: note = engineered CasX variant
QEIKRINKIRRRLVKDSNTKKAGKTGPMKTLLVRVMTPDLRERLENLRKKPENIPQPISNTSRANLNKLLTDYTEMKKAILHVYWEEFQKDPVGLMSRVAQPASKKIDQNKLKPEMDEKGNLTTAGFACSQCGQPLFVYKLEQVSEKGKAYTNYFGRCNVAEHEKLILLSQLKPEKDSDEAVTYSLGKFGQRALDFYSIHVTKESTHPVKPLAQIAGNRYASVPVGKALSDACMGTIASFLSKYQDIIIEHQKVVKGNQKRLESLRELAGKENLEYPSVTLPPQPHTSEGVDAYNEVIARVRMWVNLNLWQKLKLSRDDAKPLLRLKGFPSFPLVERQANEVDWWDMVCNVKKLINEKKEDGKVFWQNLAGYKRQEALRPYLSSEEDRKKGKKFARYQLGDLLLHLEKKHGEDWGKVYDEAWERIDKKVEGLSKHIKLEEERRSEDAQSKAALTDWLRAKASFVIEGLKEADKDEFCRCELKLQKWYGDLRGKPFAIEAENSILDISGFSKQYNCAFIWQKDGVKKLNLYLIINYFKGGKLRFKKIKPEAFEANRFYTVINKKSGEIVPMEVNFNFDDPNLIILPLAFGKRQGREFIWNDLLSLETGSLKLANGRVIEKTLYNRRTRQDEPALFVALTFERREVLDSSNIKPMNLIGVDRGENIPAVIALTDPEGCPLSRFKDSLGNPTHILRIGESYKEKQRTIQAKKEVEQRRAGGYSRKYASKAKNLADDMVRNTARDLLYYAVTQDAMLIFENLSRGFGRQGKRTFMAERQYTRMEDWLTAKLAYEGLPSKTYLSKTLAQYTSKTCSNCGFTITSADYDRVLEKLKKTATGWMTTINGKELKVEGQITYYNRYKRQNVVKDLSVELDRLSEESVNNDISSWTKGRSGEALSLLKKRFSHRPVQEKFVCLNCGFETHADEQAALNIARSWLFLRSQEYKKYQTNKTTGNTDKRAFVETWQSFYRKKLKEVWKPAV

SEQ ID NO: 35148 - protein, 978 aa, synthetic construct
  REGION 1..978: note = engineered CasX variant
QEIKRINKIRRRLVKDSNTKKAGKTGPMKTLLVRVMTPDLRERLENLRKKPENIPQPISNTSRANLNKLLTDYTEMKKAILHVYWEEFQKDPVGLMSRVAQPASKKIDQNKLKPEMDEKGNLTTAGFACSQCGQPLFVYKLEQVSEKGKAYTNYFGRCNVAEHEKLIKLSQLKPEKDSDEAVTYSLGKFGQRALDFYSIHVTKESTHPVKPLAQIAGNRYASGPVGKALSDACMGTIASFLSKYQDIIIEHQKVVKGNQKRLESLRELAGKENLEYPSVTLPPQPHTSEGVDAYNEVIARVRMWVNLNLWQKLKLSRDDAKPLLRLKGFPSFPLVERQANEVDWWDMVCNVKKLINEKKEDGKVFWQNLAGYKRQEALRPYLSSEEDRKKGKKFARYQLGDLLLHLEKKHGEDWGKVYDEAWERIDKKVEGLSKHIKLEEERRSEDAQSKAALTDWLRAKASFVIEGLKEADKDEFCRCELKLQKWYGDLRGKPFAIEAENSILDISGFSKQYNCAFIWQKDGVKKLNLYLIINYFKGGKLRFKKIKPEAFEANRFYTVINKKSGEIVPMEVNFNFDDPNLIILPLAFGKRQGREFIWNDLLSLETGSLKLANGRVIEKTLYNRRTRQDEPALFVALTFERREVLDSSNIKPMNLIGVDRGENIPAVIALTDPEGCPLSRFKDSLGNPTHILRIGESYKEKQRTIQAKKEVEQRRAGGYSRKYASKAKNLADDMVRNTARDLLYYAVTQDAMLIFENLSRGFGRQGKRTFMAERQYTRMEDWLTAKLAYEGLPSKTYLSKTLAQYTSKTCSNCGFTITSADYDRVLEKLKKTATGWMTTINGKELKVEGQITYYNRYKRQNVVKDLSVELDRLSEESVNNDISSWTKGRSGEALSLLKKRFSHRPVQEKFVCLNCGFETHADEQAALNIARSWLFLRSQEYKKYQTNKTTGNTDKRAFVETWQSFYRKKLKEVWKPAV

SEQ ID NO: 35149 - protein, 977 aa, synthetic construct
  REGION 1..977: note = engineered CasX variant
QEIKRINKIRRRLVKDSNTKKAGKTGPMKTLLVRVMTPDLRERLENLRKKPENIPQPISNTSRANLNKLLTDYTEMKKAILHVYWEEFQKDPVGLMSRVAQPASKKIDQNKLKPEMDEKGNLTTAGFACSQCGQPLFVYKLEQVSEKGKAYTNYFGRCNVAEHEKLILLSQLKPEKDSDEAVTYSLGKFGQRALDFYSIHVTKESTHPVKPLAQIAGNRYASPVGKALSDACMGTIASFLSKYQDIIIEHQKVVKGNQKRLESLRELAGKENLEYPSVTLPPQPHTSEGVDAYNEVIARVRMWVNLNLWQKLKLSRDDAKPLLRLKGFPSFPLVERQANEVDWWDMVCNVKKLINEKKEDGKVFWQNLAGYKRQEALRPYLSSEEDRKKGKKFARYQLGDLLLHLEKKHGEDWGKVYDEAWERIDKKVEGLSKHIKLEEERRSEDAQSKAALTDWLRAKASFVIEGLKEADKDEFCRCELKLQKWYGDLRGKPFAIEAENSILDISGFSKQYNCAFIWQKDGVKKLNLYLIINYFKGGKLRFKKIKPEAFEANRFYTVINKKSGEIVPMEVNFNFDDPNLIILPLAFGKRQGREFIWNDLLSLETGSLKLANGRVIEKTLYNRRTRQDEPALFVALTFERREVLDSSNIKPMNLIGVDRGENIPAVIALTDPEGCPLSRFKDSLGNPTHILRIGESYKEKQRTIQAKKEVEQRRAGGYSRKYASKAKNLADDMVRNTARDLLYYAVTQDAMLIFENLSRGFGRQGKRTFMAERQYTRMEDWLTAKLAYEGLPSKTYLSKTLAQYTSKTCSNCGFTITSADYDRVLEKLKKTATGWMTTINGKELKVEGQITYYNRYKRQNVVKDLSVELDRLSEESVNNDISSWTKGRSGEALSLLKKRFSHRPVQEKFVCLNCGFETHADEQAALNIARSWLFLRSQEYKKYQTNKTTGNTDKRAFVETWQSFYRKKLKEVWKPAV

SEQ ID NO: 35150 - protein, 978 aa, synthetic construct
  REGION 1..978: note = engineered CasX variant
QEIKRINKIRRRLVKDSNTKKAGKTGPMKTLLVRVMTPDLRERLENLRKKPENIPQPISNTSRANLNKLLTDYTEMKKAILHVYWEEFQKDPVGLMSRVAQPASKKIDQNKLKPEMDEKGNLTTAGFACSQCGQPLFVYKLEQVSEKGKAYTNYFGRCNVAEHEKLILLSQLKPEKDSDEAVTYSLGKFGQRALDFYSIHVTKESTHPVKPLAQIAGNRYASYPVGKALSDACMGTIASFLSKYQDIIIEHQKVVKGNQKRLESLRELAGKENLEYPSVTLPPQPHTKEGLDAYNEVIARVRMWVNLNLWQKLKLSRDDAKPLLRLKGFPSFPLVERQANEVDWWDMVCNVKKLINEKKEDGKVFWQNLAGYKRQEALRPYLSSEEDRKKGKKFARYQLGDLLLHLEKKHGEDWGKVYDEAWERIDKKVEGLSKHIKLEEERRSEDAQSKAALTDWLRAKASFVIEGLKEADKDEFCRCELKLQKWYGDLRGKPFAIEAENSILDISGFSKQYNCAFIWQKDGVKKLNLYLIINYFKGGKLRFKKIKPEAFEANRFYTVINKKSGEIVPMEVNFNFDDPNLIILPLAFGKRQGREFIWNDLLSLETGSLKLANGRVIEKTLYNRRTRQDEPALFVALTFERREVLDSSNIKPMNLIGVDRGENIPAVIALTDPEGCPLSRFKDSLGNPTHILRIGESYKEKQRTIQAKKEVEQRRAGGYSRKYASKAKNLADDMVRNTARDLLYYAVTQDAMLIFENLSRGFGRQGKRTFMAERQYTRMEDWLTAKLAYEGLPSKTYLSKTLAQYTSKTCSNCGFTITSADYDRVLEKLKKTATGWMTTINGKELKVEGQITYYNRYKRQNVVKDLSVELDRLSEESVNNDISSWTKGRSGEALSLLKKRFSHRPVQEKFVCLNCGFETHADEQAALNIARSWLFLRSQEYKKYQTNKTTGNTDKRAFVETWQSFYRKKLKEVWKPAV

SEQ ID NO: 35151 - protein, 978 aa, synthetic construct
  REGION 1..978: note = engineered CasX variant
QEIKRINKIRRRLVKDSNTKKAGKTGPMKTLLVRVMTPDLRERLENLRKKPENIPQPISNTSRANLNKLLTDYTEMKKAILHVYWEEFQKDPVGLMSRVAQPASKKIDQNKLKPEMDEKGNLTTAGFACSQCGQPLFVYKLEQVSEKGKAYTNYFGRCNVAEHEKLILLSQLKPEKDSDEAVTYSLGKFGQRALDFYSIHVTKESTHPVKPLAQIAGNRYASHPVGKALSDACMGTIASFLSKYQDIIIEHQKVVKGNQKRLESLRELAGKENLEYPSVTLPPQPHTKEGLDAYNEVIARVRMWVNLNLWQKLKLSRDDAKPLLRLKGFPSFPLVERQANEVDWWDMVCNVKKLINEKKEDGKVFWQNLAGYKRQEALRPYLSSEEDRKKGKKFARYQLGDLLLHLEKKHGEDWGKVYDEAWERIDKKVEGLSKHIKLEEERRSEDAQSKAALTDWLRAKASFVIEGLKEADKDEFCRCELKLQKWYGDLRGKPFAIEAENSILDISGFSKQYNCAFIWQKDGVKKLNLYLIINYFKGGKLRFKKIKPEAFEANRFYTVINKKSGEIVPMEVNFNFDDPNLIILPLAFGKRQGREFIWNDLLSLETGSLKLANGRVIEKTLYNRRTRQDEPALFVALTFERREVLDSSNIKPMNLIGVDRGENIPAVIALTDPEGCPLSRFKDSLGNPTHILRIGESYKEKQRTIQAKKEVEQRRAGGYSRKYASKAKNLADDMVRNTARDLLYYAVTQDAMLIFENLSRGFGRQGKRTFMAERQYTRMEDWLTAKLAYEGLPSKTYLSKTLAQYTSKTCSNCGFTITSADYDRVLEKLKKTATGWMTTINGKELKVEGQITYYNRYKRQNVVKDLSVELDRLSEESVNNDISSWTKGRSGEALSLLKKRFSHRPVQEKFVCLNCGFETHADEQAALNIARSWLFLRSQEYKKYQTNKTTGNTDKRAFVETWQSFYRKKLKEVWKPAV

SEQ ID NO: 35152 - protein, 978 aa, synthetic construct
  REGION 1..978: note = engineered CasX variant
QEIKRINKIRRRLVKDSNTKKAGKTGPMKTLLVRVMTPDLRERLENLRKKPENIPQPISNTSRANLNKLLTDYTEMKKAILHVYWEEFQKDPVGLMSRVAQPASKKIDQNKLKPEMDEKGNLTTAGFACSQCGQPLFVYKLEQVSEKGKAYTNYFGRCNVAEHEKLILLSQLKPEKDSDEAVTYSLGKFGQRALDFYSIHVTKESTHPVKPLAQIAGNRYASSPVGKALSDACMGTIASFLSKYQDIIIEHQKVVKGNQKRLESLRELAGKENLEYPSVTLPPQPHTKEGLDAYNEVIARVRMWVNLNLWQKLKLSRDDAKPLLRLKGFPSFPLVERQANEVDWWDMVCNVKKLINEKKEDGKVFWQNLAGYKRQEALRPYLSSEEDRKKGKKFARYQLGDLLLHLEKKHGEDWGKVYDEAWERIDKKVEGLSKHIKLEEERRSEDAQSKAALTDWLRAKASFVIEGLKEADKDEFCRCELKLQKWYGDLRGKPFAIEAENSILDISGFSKQYNCAFIWQKDGVKKLNLYLIINYFKGGKLRFKKIKPEAFEANRFYTVINKKSGEIVPMEVNFNFDDPNLIILPLAFGKRQGREFIWNDLLSLETGSLKLANGRVIEKTLYNRRTRQDEPALFVALTFERREVLDSSNIKPMNLIGVDRGENIPAVIALTDPEGCPLSRFKDSLGNPTHILRIGESYKEKQRTIQAKKEVEQRRAGGYSRKYASKAKNLADDMVRNTARDLLYYAVTQDAMLIFENLSRGFGRQGKRTFMAERQYTRMEDWLTAKLAYEGLPSKTYLSKTLAQYTSKTCSNCGFTITSADYDRVLEKLKKTATGWMTTINGKELKVEGQITYYNRYKRQNVVKDLSVELDRLSEESVNNDISSWTKGRSGEALSLLKKRFSHRPVQEKFVCLNCGFETHADEQAALNIARSWLFLRSQEYKKYQTNKTTGNTDKRAFVETWQSFYRKKLKEVWKPAV

SEQ ID NO: 35153 - protein, 978 aa, synthetic construct
  REGION 1..978: note = engineered CasX variant
QEIKRINKIRRRLVKDSNTKKAGKTGPMKTLLVRVMTPDLRERLENLRKKPENIPQPISNTSRANLNKLLTDYTEMKKAILHVYWEEFQKDPVGLMSRVAQPASKKIDQNKLKPEMDEKGNLTTAGFACSQCGQPLFVYKLEQVSEKGKAYTNYFGRCNVAEHEKLILLSQLKPEKDSDEAVTYSLGKFGQRALDFYSIHVTKESTHPVKPLAQIAGNRYASTPVGKALSDACMGTIASFLSKYQDIIIEHQKVVKGNQKRLESLRELAGKENLEYPSVTLPPQPHTKEGLDAYNEVIARVRMWVNLNLWQKLKLSRDDAKPLLRLKGFPSFPLVERQANEVDWWDMVCNVKKLINEKKEDGKVFWQNLAGYKRQEALRPYLSSEEDRKKGKKFARYQLGDLLLHLEKKHGEDWGKVYDEAWERIDKKVEGLSKHIKLEEERRSEDAQSKAALTDWLRAKASFVIEGLKEADKDEFCRCELKLQKWYGDLRGKPFAIEAENSILDISGFSKQYNCAFIWQKDGVKKLNLYLIINYFKGGKLRFKKIKPEAFEANRFYTVINKKSGEIVPMEVNFNFDDPNLIILPLAFGKRQGREFIWNDLLSLETGSLKLANGRVIEKTLYNRRTRQDEPALFVALTFERREVLDSSNIKPMNLIGVDRGENIPAVIALTDPEGCPLSRFKDSLGNPTHILRIGESYKEKQRTIQAKKEVEQRRAGGYSRKYASKAKNLADDMVRNTARDLLYYAVTQDAMLIFENLSRGFGRQGKRTFMAERQYTRMEDWLTAKLAYEGLPSKTYLSKTLAQYTSKTCSNCGFTITSADYDRVLEKLKKTATGWMTTINGKELKVEGQITYYNRYKRQNVVKDLSVELDRLSEESVNNDISSWTKGRSGEALSLLKKRFSHRPVQEKFVCLNCGFETHADEQAALNIARSWLFLRSQEYKKYQTNKTTGNTDKRAFVETWQSFYRKKLKEVWKPAV

SEQ ID NO: 35154 - protein, 978 aa, synthetic construct
  REGION 1..978: note = engineered CasX variant
QEIKRINKIRRRLVKDSNTKKAGKTGPMKTLLVRVMTPDLRERLENLRKKPENIPQPISNTSRANLNKLLTDYTEMKKAILHVYWEEFQKDPVGLMSRVAQPASKKIDQNKLKPEMDEKGNLTTAGFACSQCGQPLFVYKLEQVSEKGKAYTNYFGRCNVAEHEKLILLSQLKPEKDSDEAVTYSLGKFGQRALDFYSIHVTKESTHPVKPLAQIAGNRYASAPVGKALSDACMGTIASFLSKYQDIIIEHQKVVKGNQKRLESLRELAGKENLEYPSVTLPPQPHTKEGLDAYNEVIARVRMWVNLNLWQKLKLSRDDAKPLLRLKGFPSFPLVERQANEVDWWDMVCNVKKLINEKKEDGKVFWQNLAGYKRQEALRPYLSSEEDRKKGKKFARYQLGDLLLHLEKKHGEDWGKVYDEAWERIDKKVEGLSKHIKLEEERRSEDAQSKAALTDWLRAKASFVIEGLKEADKDEFCRCELKLQKWYGDLRGKPFAIEAENSILDISGFSKQYNCAFIWQKDGVKKLNLYLIINYFKGGKLRFKKIKPEAFEANRFYTVINKKSGEIVPMEVNFNFDDPNLIILPLAFGKRQGREFIWNDLLSLETGSLKLANGRVIEKTLYNRRTRQDEPALFVALTFERREVLDSSNIKPMNLIGVDRGENIPAVIALTDPEGCPLSRFKDSLGNPTHILRIGESYKEKQRTIQAKKEVEQRRAGGYSRKYASKAKNLADDMVRNTARDLLYYAVTQDAMLIFENLSRGFGRQGKRTFMAERQYTRMEDWLTAKLAYEGLPSKTYLSKTLAQYTSKTCSNCGFTITSADYDRVLEKLKKTATGWMTTINGKELKVEGQITYYNRYKRQNVVKDLSVELDRLSEESVNNDISSWTKGRSGEALSLLKKRFSHRPVQEKFVCLNCGFETHADEQAALNIARSWLFLRSQEYKKYQTNKTTGNTDKRAFVETWQSFYRKKLKEVWKPAV

SEQ ID NO: 35155 - protein, 978 aa, synthetic construct
  REGION 1..978: note = engineered CasX variant
QEIKRINKIRRRLVKDSNTKKAGKTGPMKTLLVRVMTPDLRERLENLRKKPENIPQPISNTSRANLNKLLTDYTEMKKAILHVYWEEFQKDPVGLMSRVAQPASKKIDQNKLKPEMDEKGNLTTAGFACSQCGQPLFVYKLEQVSEKGKAYTNYFGRCNVAEHEKLILLSQLKPEKDSDEAVTYSLGKFGQRALDFYSIHVTKESTHPVKPLAQIAGNRYASVPVGKALSDACMGTIASFLSKYQDIIIEHQKVVKGNQKRLESLRELAGKENLEYPSVTLPPQPHTKEGLDAYNEVIARVRMWVNLNLWQKLKLSRDDAKPLLRLKGFPSFPLVERQANEVDWWDMVCNVKKLINEKKEDGKVFWQNLAGYKRQEALRPYLSSEEDRKKGKKFARYQLGDLLLHLEKKHGEDWGKVYDEAWERIDKKVEGLSKHIKLEEERRSEDAQSKAALTDWLRAKASFVIEGLKEADKDEFCRCELKLQKWYGDLRGKPFAIEAENSILDISGFSKQYNCAFIWQKDGVKKLNLYLIINYFKGGKLRFKKIKPEAFEANRFYTVINKKSGEIVPMEVNFNFDDPNLIILPLAFGKRQGREFIWNDLLSLETGSLKLANGRVIEKTLYNRRTRQDEPALFVALTFERREVLDSSNIKPMNLIGVDRGENIPAVIALTDPEGCPLSRFKDSLGNPTHILRIGESYKEKQRTIQAKKEVEQRRAGGYSRKYASKAKNLADDMVRNTARDLLYYAVTQDAMLIFENLSRGFGRQGKRTFMAERQYTRMEDWLTAKLAYEGLPSKTYLSKTLAQYTSKTCSNCGFTITSADYDRVLEKLKKTATGWMTTINGKELKVEGQITYYNRYKRQNVVKDLSVELDRLSEESVNNDISSWTKGRSGEALSLLKKRFSHRPVQEKFVCLNCGFETHADEQAALNIARSWLFLRSQEYKKYQTNKTTGNTDKRAFVETWQSFYRKKLKEVWKPAV

SEQ ID NO: 35156 - protein, 978 aa, synthetic construct
  REGION 1..978: note = engineered CasX variant
QEIKRINKIRRRLVKDSNTKKAGKTGPMKTLLVRVMTPDLRERLENLRKKPENIPQPISNTSRANLNKLLTDYTEMKKAILHVYWEEFQKDPVGLMSRVAQPASKKIDQNKLKPEMDEKGNLTTAGFACSQCGQPLFVYKLEQVSEKGKAYTNYFGRCNVAEHEKLIKLSQLKPEKDSDEAVTYSLGKFGQRALDFYSIHVTKESTHPVKPLAQIAGNRYASGPVGKALSDACMGTIASFLSKYQDIIIEHQKVVKGNQKRLESLRELAGKENLEYPSVTLPPQPHTKEGLDAYNEVIARVRMWVNLNLWQKLKLSRDDAKPLLRLKGFPSFPLVERQANEVDWWDMVCNVKKLINEKKEDGKVFWQNLAGYKRQEALRPYLSSEEDRKKGKKFARYQLGDLLLHLEKKHGEDWGKVYDEAWERIDKKVEGLSKHIKLEEERRSEDAQSKAALTDWLRAKASFVIEGLKEADKDEFCRCELKLQKWYGDLRGKPFAIEAENSILDISGFSKQYNCAFIWQKDGVKKLNLYLIINYFKGGKLRFKKIKPEAFEANRFYTVINKKSGEIVPMEVNFNFDDPNLIILPLAFGKRQGREFIWNDLLSLETGSLKLANGRVIEKTLYNRRTRQDEPALFVALTFERREVLDSSNIKPMNLIGVDRGENIPAVIALTDPEGCPLSRFKDSLGNPTHILRIGESYKEKQRTIQAKKEVEQRRAGGYSRKYASKAKNLADDMVRNTARDLLYYAVTQDAMLIFENLSRGFGRQGKRTFMAERQYTRMEDWLTAKLAYEGLPSKTYLSKTLAQYTSKTCSNCGFTITSADYDRVLEKLKKTATGWMTTINGKELKVEGQITYYNRYKRQNVVKDLSVELDRLSEESVNNDISSWTKGRSGEALSLLKKRFSHRPVQEKFVCLNCGFETHADEQAALNIARSWLFLRSQEYKKYQTNKTTGNTDKRAFVETWQSFYRKKLKEVWKPAV

SEQ ID NO: 35157 - protein, 977 aa, synthetic construct
  REGION 1..977: note = engineered CasX variant
QEIKRINKIRRRLVKDSNTKKAGKTGPMKTLLVRVMTPDLRERLENLRKKPENIPQPISNTSRANLNKLLTDYTEMKKAILHVYWEEFQKDPVGLMSRVAQPASKKIDQNKLKPEMDEKGNLTTAGFACSQCGQPLFVYKLEQVSEKGKAYTNYFGRCNVAEHEKLILLSQLKPEKDSDEAVTYSLGKFGQRALDFYSIHVTKESTHPVKPLAQIAGNRYASPVGKALSDACMGTIASFLSKYQDIIIEHQKVVKGNQKRLESLRELAGKENLEYPSVTLPPQPHTKEGLDAYNEVIARVRMWVNLNLWQKLKLSRDDAKPLLRLKGFPSFPLVERQANEVDWWDMVCNVKKLINEKKEDGKVFWQNLAGYKRQEALRPYLSSEEDRKKGKKFARYQLGDLLLHLEKKHGEDWGKVYDEAWERIDKKVEGLSKHIKLEEERRSEDAQSKAALTDWLRAKASFVIEGLKEADKDEFCRCELKLQKWYGDLRGKPFAIEAENSILDISGFSKQYNCAFIWQKDGVKKLNLYLIINYFKGGKLRFKKIKPEAFEANRFYTVINKKSGEIVPMEVNFNFDDPNLIILPLAFGKRQGREFIWNDLLSLETGSLKLANGRVIEKTLYNRRTRQDEPALFVALTFERREVLDSSNIKPMNLIGVDRGENIPAVIALTDPEGCPLSRFKDSLGNPTHILRIGESYKEKQRTIQAKKEVEQRRAGGYSRKYASKAKNLADDMVRNTARDLLYYAVTQDAMLIFENLSRGFGRQGKRTFMAERQYTRMEDWLTAKLAYEGLPSKTYLSKTLAQYTSKTCSNCGFTITSADYDRVLEKLKKTATGWMTTINGKELKVEGQITYYNRYKRQNVVKDLSVELDRLSEESVNNDISSWTKGRSGEALSLLKKRFSHRPVQEKFVCLNCGFETHADEQAALNIARSWLFLRSQEYKKYQTNKTTGNTDKRAFVETWQSFYRKKLKEVWKPAV

SEQ ID NO: 35158 - protein, 978 aa, synthetic construct
  REGION 1..978: note = engineered CasX variant
QEIKRINKIRRRLVKDSNTKKAGKTGPMKTLLVRVMTPDLRERLENLRKKPENIPQPISNTSRANLNKLLTDYTEMKKAILHVYWEEFQKDPVGLMSRVAQPASKKIDQNKLKPEMDEKGNLTTAGFACSQCGQPLFVYKLEQVSEKGKAYTNYFGRCNVAEHEKLILLSQLKPEKDSDEAVTYSLGKFGQRALDFYSIHVTKESTHPVKPLAQIAGNRYASYPVGKALSDACMGTIASFLSKYQDIIIEHQKVVKGNQKRLESLRELAGKENLEYPSVTLPPQPHTKEGVDAYNEVIARVRTWVNLNLWQKLKLSRDDAKPLLRLKGFPSFPLVERQANEVDWWDMVCNVKKLINEKKEDGKVFWQNLAGYKRQEALRPYLSSEEDRKKGKKFARYQLGDLLLHLEKKHGEDWGKVYDEAWERIDKKVEGLSKHIKLEEERRSEDAQSKAALTDWLRAKASFVIEGLKEADKDEFCRCELKLQKWYGDLRGKPFAIEAENSILDISGFSKQYNCAFIWQKDGVKKLNLYLIINYFKGGKLRFKKIKPEAFEANRFYTVINKKSGEIVPMEVNFNFDDPNLIILPLAFGKRQGREFIWNDLLSLETGSLKLANGRVIEKTLYNRRTRQDEPALFVALTFERREVLDSSNIKPMNLIGVDRGENIPAVIALTDPEGCPLSRFKDSLGNPTHILRIGESYKEKQRTIQAKKEVEQRRAGGYSRKYASKAKNLADDMVRNTARDLLYYAVTQDAMLIFENLSRGFGRQGKRTFMAERQYTRMEDWLTAKLAYEGLPSKTYLSKTLAQYTSKTCSNCGFTITSADYDRVLEKLKKTATGWMTTINGKELKVEGQITYYNRYKRQNVVKDLSVELDRLSEESVNNDISSWTKGRSGEALSLLKKRFSHRPVQEKFVCLNCGFETHADEQAALNIARSWLFLRSQEYKKYQTNKTTGNTDKRAFVETWQSFYRKKLKEVWKPAV

SEQ ID NO: 35159 - protein, 978 aa, synthetic construct
  REGION 1..978: note = engineered CasX variant
QEIKRINKIRRRLVKDSNTKKAGKTGPMKTLLVRVMTPDLRERLENLRKKPENIPQPISNTSRANLNKLLTDYTEMKKAILHVYWEEFQKDPVGLMSRVAQPASKKIDQNKLKPEMDEKGNLTTAGFACSQCGQPLFVYKLEQVSEKGKAYTNYFGRCNVAEHEKLILLSQLKPEKDSDEAVTYSLGKFGQRALDFYSIHVTKESTHPVKPLAQIAGNRYASHPVGKALSDACMGTIASFLSKYQDIIIEHQKVVKGNQKRLESLRELAGKENLEYPSVTLPPQPHTKEGVDAYNEVIARVRTWVNLNLWQKLKLSRDDAKPLLRLKGFPSFPLVERQANEVDWWDMVCNVKKLINEKKEDGKVFWQNLAGYKRQEALRPYLSSEEDRKKGKKFARYQLGDLLLHLEKKHGEDWGKVYDEAWERIDKKVEGLSKHIKLEEERRSEDAQSKAALTDWLRAKASFVIEGLKEADKDEFCRCELKLQKWYGDLRGKPFAIEAENSILDISGFSKQYNCAFIWQKDGVKKLNLYLIINYFKGGKLRFKKIKPEAFEANRFYTVINKKSGEIVPMEVNFNFDDPNLIILPLAFGKRQGREFIWNDLLSLETGSLKLANGRVIEKTLYNRRTRQDEPALFVALTFERREVLDSSNIKPMNLIGVDRGENIPAVIALTDPEGCPLSRFKDSLGNPTHILRIGESYKEKQRTIQAKKEVEQRRAGGYSRKYASKAKNLADDMVRNTARDLLYYAVTQDAMLIFENLSRGFGRQGKRTFMAERQYTRMEDWLTAKLAYEGLPSKTYLSKTLAQYTSKTCSNCGFTITSADYDRVLEKLKKTATGWMTTINGKELKVEGQITYYNRYKRQNVVKDLSVELDRLSEESVNNDISSWTKGRSGEALSLLKKRFSHRPVQEKFVCLNCGFETHADEQAALNIARSWLFLRSQEYKKYQTNKTTGNTDKRAFVETWQSFYRKKLKEVWKPAV

SEQ ID NO: 35160 - protein, 978 aa, synthetic construct
  REGION 1..978: note = engineered CasX variant
QEIKRINKIRRRLVKDSNTKKAGKTGPMKTLLVRVMTPDLRERLENLRKKPENIPQPISNTSRANLNKLLTDYTEMKKAILHVYWEEFQKDPVGLMSRVAQPASKKIDQNKLKPEMDEKGNLTTAGFACSQCGQPLFVYKLEQVSEKGKAYTNYFGRCNVAEHEKLILLSQLKPEKDSDEAVTYSLGKFGQRALDFYSIHVTKESTHPVKPLAQIAGNRYASSPVGKALSDACMGTIASFLSKYQDIIIEHQKVVKGNQKRLESLRELAGKENLEYPSVTLPPQPHTKEGVDAYNEVIARVRTWVNLNLWQKLKLSRDDAKPLLRLKGFPSFPLVERQANEVDWWDMVCNVKKLINEKKEDGKVFWQNLAGYKRQEALRPYLSSEEDRKKGKKFARYQLGDLLLHLEKKHGEDWGKVYDEAWERIDKKVEGLSKHIKLEEERRSEDAQSKAALTDWLRAKASFVIEGLKEADKDEFCRCELKLQKWYGDLRGKPFAIEAENSILDISGFSKQYNCAFIWQKDGVKKLNLYLIINYFKGGKLRFKKIKPEAFEANRFYTVINKKSGEIVPMEVNFNFDDPNLIILPLAFGKRQGREFIWNDLLSLETGSLKLANGRVIEKTLYNRRTRQDEPALFVALTFERREVLDSSNIKPMNLIGVDRGENIPAVIALTDPEGCPLSRFKDSLGNPTHILRIGESYKEKQRTIQAKKEVEQRRAGGYSRKYASKAKNLADDMVRNTARDLLYYAVTQDAMLIFENLSRGFGRQGKRTFMAERQYTRMEDWLTAKLAYEGLPSKTYLSKTLAQYTSKTCSNCGFTITSADYDRVLEKLKKTATGWMTTINGKELKVEGQITYYNRYKRQNVVKDLSVELDRLSEESVNNDISSWTKGRSGEALSLLKKRFSHRPVQEKFVCLNCGFETHADEQAALNIARSWLFLRSQEYKKYQTNKTTGNTDKRAFVETWQSFYRKKLKEVWKPAV

SEQ ID NO: 35161 - protein, 978 aa, synthetic construct
  REGION 1..978: note = engineered CasX variant
QEIKRINKIRRRLVKDSNTKKAGKTGPMKTLLVRVMTPDLRERLENLRKKPENIPQPISNTSRANLNKLLTDYTEMKKAILHVYWEEFQKDPVGLMSRVAQPASKKIDQNKLKPEMDEKGNLTTAGFACSQCGQPLFVYKLEQVSEKGKAYTNYFGRCNVAEHEKLILLSQLKPEKDSDEAVTYSLGKFGQRALDFYSIHVTKESTHPVKPLAQIAGNRYASTPVGKALSDACMGTIASFLSKYQDIIIEHQKVVKGNQKRLESLRELAGKENLEYPSVTLPPQPHTKEGVDAYNEVIARVRTWVNLNLWQKLKLSRDDAKPLLRLKGFPSFPLVERQANEVDWWDMVCNVKKLINEKKEDGKVFWQNLAGYKRQEALRPYLSSEEDRKKGKKFARYQLGDLLLHLEKKHGEDWGKVYDEAWERIDKKVEGLSKHIKLEEERRSEDAQSKAALTDWLRAKASFVIEGLKEADKDEFCRCELKLQKWYGDLRGKPFAIEAENSILDISGFSKQYNCAFIWQKDGVKKLNLYLIINYFKGGKLRFKKIKPEAFEANRFYTVINKKSGEIVPMEVNFNFDDPNLIILPLAFGKRQGREFIWNDLLSLETGSLKLANGRVIEKTLYNRRTRQDEPALFVALTFERREVLDSSNIKPMNLIGVDRGENIPAVIALTDPEGCPLSRFKDSLGNPTHILRIGESYKEKQRTIQAKKEVEQRRAGGYSRKYASKAKNLADDMVRNTARDLLYYAVTQDAMLIFENLSRGFGRQGKRTFMAERQYTRMEDWLTAKLAYEGLPSKTYLSKTLAQYTSKTCSNCGFTITSADYDRVLEKLKKTATGWMTTINGKELKVEGQITYYNRYKRQNVVKDLSVELDRLSEESVNNDISSWTKGRSGEALSLLKKRFSHRPVQEKFVCLNCGFETHADEQAALNIARSWLFLRSQEYKKYQTNKTTGNTDKRAFVETWQSFYRKKLKEVWKPAV

SEQ ID NO: 35162 - protein, 978 aa, synthetic construct
  REGION 1..978: note = engineered CasX variant
QEIKRINKIRRRLVKDSNTKKAGKTGPMKTLLVRVMTPDLRERLENLRKKPENIPQPISNTSRANLNKLLTDYTEMKKAILHVYWEEFQKDPVGLMSRVAQPASKKIDQNKLKPEMDEKGNLTTAGFACSQCGQPLFVYKLEQVSEKGKAYTNYFGRCNVAEHEKLILLSQLKPEKDSDEAVTYSLGKFGQRALDFYSIHVTKESTHPVKPLAQIAGNRYASAPVGKALSDACMGTIASFLSKYQDIIIEHQKVVKGNQKRLESLRELAGKENLEYPSVTLPPQPHTKEGVDAYNEVIARVRTWVNLNLWQKLKLSRDDAKPLLRLKGFPSFPLVERQANEVDWWDMVCNVKKLINEKKEDGKVFWQNLAGYKRQEALRPYLSSEEDRKKGKKFARYQLGDLLLHLEKKHGEDWGKVYDEAWERIDKKVEGLSKHIKLEEERRSEDAQSKAALTDWLRAKASFVIEGLKEADKDEFCRCELKLQKWYGDLRGKPFAIEAENSILDISGFSKQYNCAFIWQKDGVKKLNLYLIINYFKGGKLRFKKIKPEAFEANRFYTVINKKSGEIVPMEVNFNFDDPNLIILPLAFGKRQGREFIWNDLLSLETGSLKLANGRVIEKTLYNRRTRQDEPALFVALTFERREVLDSSNIKPMNLIGVDRGENIPAVIALTDPEGCPLSRFKDSLGNPTHILRIGESYKEKQRTIQAKKEVEQRRAGGYSRKYASKAKNLADDMVRNTARDLLYYAVTQDAMLIFENLSRGFGRQGKRTFMAERQYTRMEDWLTAKLAYEGLPSKTYLSKTLAQYTSKTCSNCGFTITSADYDRVLEKLKKTATGWMTTINGKELKVEGQITYYNRYKRQNVVKDLSVELDRLSEESVNNDISSWTKGRSGEALSLLKKRFSHRPVQEKFVCLNCGFETHADEQAALNIARSWLFLRSQEYKKYQTNKTTGNTDKRAFVETWQSFYRKKLKEVWKPAV

SEQ ID NO: 35163 - protein, 978 aa, synthetic construct
  REGION 1..978: note = engineered CasX variant
QEIKRINKIRRRLVKDSNTKKAGKTGPMKTLLVRVMTPDLRERLENLRKKPENIPQPISNTSRANLNKLLTDYTEMKKAILHVYWEEFQKDPVGLMSRVAQPASKKIDQNKLKPEMDEKGNLTTAGFACSQCGQPLFVYKLEQVSEKGKAYTNYFGRCNVAEHEKLILLSQLKPEKDSDEAVTYSLGKFGQRALDFYSIHVTKESTHPVKPLAQIAGNRYASVPVGKALSDACMGTIASFLSKYQDIIIEHQKVVKGNQKRLESLRELAGKENLEYPSVTLPPQPHTKEGVDAYNEVIARVRTWVNLNLWQKLKLSRDDAKPLLRLKGFPSFPLVERQANEVDWWDMVCNVKKLINEKKEDGKVFWQNLAGYKRQEALRPYLSSEEDRKKGKKFARYQLGDLLLHLEKKHGEDWGKVYDEAWERIDKKVEGLSKHIKLEEERRSEDAQSKAALTDWLRAKASFVIEGLKEADKDEFCRCELKLQKWYGDLRGKPFAIEAENSILDISGFSKQYNCAFIWQKDGVKKLNLYLIINYFKGGKLRFKKIKPEAFEANRFYTVINKKSGEIVPMEVNFNFDDPNLIILPLAFGKRQGREFIWNDLLSLETGSLKLANGRVIEKTLYNRRTRQDEPALFVALTFERREVLDSSNIKPMNLIGVDRGENIPAVIALTDPEGCPLSRFKDSLGNPTHILRIGESYKEKQRTIQAKKEVEQRRAGGYSRKYASKAKNLADDMVRNTARDLLYYAVTQDAMLIFENLSRGFGRQGKRTFMAERQYTRMEDWLTAKLAYEGLPSKTYLSKTLAQYTSKTCSNCGFTITSADYDRVLEKLKKTATGWMTTINGKELKVEGQITYYNRYKRQNVVKDLSVELDRLSEESVNNDISSWTKGRSGEALSLLKKRFSHRPVQEKFVCLNCGFETHADEQAALNIARSWLFLRSQEYKKYQTNKTTGNTDKRAFVETWQSFYRKKLKEVWKPAV

SEQ ID NO: 35164 - protein, 978 aa, synthetic construct
  REGION 1..978: note = engineered CasX variant
QEIKRINKIRRRLVKDSNTKKAGKTGPMKTLLVRVMTPDLRERLENLRKKPENIPQPISNTSRANLNKLLTDYTEMKKAILHVYWEEFQKDPVGLMSRVAQPASKKIDQNKLKPEMDEKGNLTTAGFACSQCGQPLFVYKLEQVSEKGKAYTNYFGRCNVAEHEKLIKLSQLKPEKDSDEAVTYSLGKFGQRALDFYSIHVTKESTHPVKPLAQIAGNRYASGPVGKALSDACMGTIASFLSKYQDIIIEHQKVVKGNQKRLESLRELAGKENLEYPSVTLPPQPHTKEGVDAYNEVIARVRTWVNLNLWQKLKLSRDDAKPLLRLKGFPSFPLVERQANEVDWWDMVCNVKKLINEKKEDGKVFWQNLAGYKRQEALRPYLSSEEDRKKGKKFARYQLGDLLLHLEKKHGEDWGKVYDEAWERIDKKVEGLSKHIKLEEERRSEDAQSKAALTDWLRAKASFVIEGLKEADKDEFCRCELKLQKWYGDLRGKPFAIEAENSILDISGFSKQYNCAFIWQKDGVKKLNLYLIINYFKGGKLRFKKIKPEAFEANRFYTVINKKSGEIVPMEVNFNFDDPNLIILPLAFGKRQGREFIWNDLLSLETGSLKLANGRVIEKTLYNRRTRQDEPALFVALTFERREVLDSSNIKPMNLIGVDRGENIPAVIALTDPEGCPLSRFKDSLGNPTHILRIGESYKEKQRTIQAKKEVEQRRAGGYSRKYASKAKNLADDMVRNTARDLLYYAVTQDAMLIFENLSRGFGRQGKRTFMAERQYTRMEDWLTAKLAYEGLPSKTYLSKTLAQYTSKTCSNCGFTITSADYDRVLEKLKKTATGWMTTINGKELKVEGQITYYNRYKRQNVVKDLSVELDRLSEESVNNDISSWTKGRSGEALSLLKKRFSHRPVQEKFVCLNCGFETHADEQAALNIARSWLFLRSQEYKKYQTNKTTGNTDKRAFVETWQSFYRKKLKEVWKPAV

SEQ ID NO: 35165 - protein, 977 aa, synthetic construct
  REGION 1..977: note = engineered CasX variant
QEIKRINKIRRRLVKDSNTKKAGKTGPMKTLLVRVMTPDLRERLENLRKKPENIPQPISNTSRANLNKLLTDYTEMKKAILHVYWEEFQKDPVGLMSRVAQPASKKIDQNKLKPEMDEKGNLTTAGFACSQCGQPLFVYKLEQVSEKGKAYTNYFGRCNVAEHEKLILLSQLKPEKDSDEAVTYSLGKFGQRALDFYSIHVTKESTHPVKPLAQIAGNRYASPVGKALSDACMGTIASFLSKYQDIIIEHQKVVKGNQKRLESLRELAGKENLEYPSVTLPPQPHTKEGVDAYNEVIARVRTWVNLNLWQKLKLSRDDAKPLLRLKGFPSFPLVERQANEVDWWDMVCNVKKLINEKKEDGKVFWQNLAGYKRQEALRPYLSSEEDRKKGKKFARYQLGDLLLHLEKKHGEDWGKVYDEAWERIDKKVEGLSKHIKLEEERRSEDAQSKAALTDWLRAKASFVIEGLKEADKDEFCRCELKLQKWYGDLRGKPFAIEAENSILDISGFSKQYNCAFIWQKDGVKKLNLYLIINYFKGGKLRFKKIKPEAFEANRFYTVINKKSGEIVPMEVNFNFDDPNLIILPLAFGKRQGREFIWNDLLSLETGSLKLANGRVIEKTLYNRRTRQDEPALFVALTFERREVLDSSNIKPMNLIGVDRGENIPAVIALTDPEGCPLSRFKDSLGNPTHILRIGESYKEKQRTIQAKKEVEQRRAGGYSRKYASKAKNLADDMVRNTARDLLYYAVTQDAMLIFENLSRGFGRQGKRTFMAERQYTRMEDWLTAKLAYEGLPSKTYLSKTLAQYTSKTCSNCGFTITSADYDRVLEKLKKTATGWMTTINGKELKVEGQITYYNRYKRQNVVKDLSVELDRLSEESVNNDISSWTKGRSGEALSLLKKRFSHRPVQEKFVCLNCGFETHADEQAALNIARSWLFLRSQEYKKYQTNKTTGNTDKRAFVETWQSFYRKKLKEVWKPAV

SEQ ID NO: 35166 - protein, 978 aa, synthetic construct
  REGION 1..978: note = engineered CasX variant
QEIKRINKIRRRLVKDSNTKKAGKTGPMKTLLVRVMTPDLRERLENLRKKPENIPQPISNTSRANLNKLLTDYTEMKKAILHVYWEEFQKDPVGLMSRVAQPASKKIDQNKLKPEMDEKGNLTTAGFACSQCGQPLFVYKLEQVSEKGKAYTNYFGRCNVAEHEKLILLSQLKPEKDSDEAVTYSLGKFGQRALDFYSIHVTKESTHPVKPLAQIAGNRYASYPVGKALSDACMGTIASFLSKYQDIIIEHQKVVKGNQKRLESLRELAGKENLEYPSVTLPPQPHTKEGVDAYNEVIARVRWWVNLNLWQKLKLSRDDAKPLLRLKGFPSFPLVERQANEVDWWDMVCNVKKLINEKKEDGKVFWQNLAGYKRQEALRPYLSSEEDRKKGKKFARYQLGDLLLHLEKKHGEDWGKVYDEAWERIDKKVEGLSKHIKLEEERRSEDAQSKAALTDWLRAKASFVIEGLKEADKDEFCRCELKLQKWYGDLRGKPFAIEAENSILDISGFSKQYNCAFIWQKDGVKKLNLYLIINYFKGGKLRFKKIKPEAFEANRFYTVINKKSGEIVPMEVNFNFDDPNLIILPLAFGKRQGREFIWNDLLSLETGSLKLANGRVIEKTLYNRRTRQDEPALFVALTFERREVLDSSNIKPMNLIGVDRGENIPAVIALTDPEGCPLSRFKDSLGNPTHILRIGESYKEKQRTIQAKKEVEQRRAGGYSRKYASKAKNLADDMVRNTARDLLYYAVTQDAMLIFENLSRGFGRQGKRTFMAERQYTRMEDWLTAKLAYEGLPSKTYLSKTLAQYTSKTCSNCGFTITSADYDRVLEKLKKTATGWMTTINGKELKVEGQITYYNRYKRQNVVKDLSVELDRLSEESVNNDISSWTKGRSGEALSLLKKRFSHRPVQEKFVCLNCGFETHADEQAALNIARSWLFLRSQEYKKYQTNKTTGNTDKRAFVETWQSFYRKKLKEVWKPAV

SEQ ID NO: 35167 - protein, 978 aa, synthetic construct
  REGION 1..978: note = engineered CasX variant
QEIKRINKIRRRLVKDSNTKKAGKTGPMKTLLVRVMTPDLRERLENLRKKPENIPQPISNTSRANLNKLLTDYTEMKKAILHVYWEEFQKDPVGLMSRVAQPASKKIDQNKLKPEMDEKGNLTTAGFACSQCGQPLFVYKLEQVSEKGKAYTNYFGRCNVAEHEKLILLSQLKPEKDSDEAVTYSLGKFGQRALDFYSIHVTKESTHPVKPLAQIAGNRYASHPVGKALSDACMGTIASFLSKYQDIIIEHQKVVKGNQKRLESLRELAGKENLEYPSVTLPPQPHTKEGVDAYNEVIARVRWWVNLNLWQKLKLSRDDAKPLLRLKGFPSFPLVERQANEVDWWDMVCNVKKLINEKKEDGKVFWQNLAGYKRQEALRPYLSSEEDRKKGKKFARYQLGDLLLHLEKKHGEDWGKVYDEAWERIDKKVEGLSKHIKLEEERRSEDAQSKAALTDWLRAKASFVIEGLKEADKDEFCRCELKLQKWYGDLRGKPFAIEAENSILDISGFSKQYNCAFIWQKDGVKKLNLYLIINYFKGGKLRFKKIKPEAFEANRFYTVINKKSGEIVPMEVNFNFDDPNLIILPLAFGKRQGREFIWNDLLSLETGSLKLANGRVIEKTLYNRRTRQDEPALFVALTFERREVLDSSNIKPMNLIGVDRGENIPAVIALTDPEGCPLSRFKDSLGNPTHILRIGESYKEKQRTIQAKKEVEQRRAGGYSRKYASKAKNLADDMVRNTARDLLYYAVTQDAMLIFENLSRGFGRQGKRTFMAERQYTRMEDWLTAKLAYEGLPSKTYLSKTLAQYTSKTCSNCGFTITSADYDRVLEKLKKTATGWMTTINGKELKVEGQITYYNRYKRQNVVKDLSVELDRLSEESVNNDISSWTKGRSGEALSLLKKRFSHRPVQEKFVCLNCGFETHADEQAALNIARSWLFLRSQEYKKYQTNKTTGNTDKRAFVETWQSFYRKKLKEVWKPAV

SEQ ID NO: 35168 - protein, 978 aa, synthetic construct
  REGION 1..978: note = engineered CasX variant
QEIKRINKIRRRLVKDSNTKKAGKTGPMKTLLVRVMTPDLRERLENLRKKPENIPQPISNTSRANLNKLLTDYTEMKKAILHVYWEEFQKDPVGLMSRVAQPASKKIDQNKLKPEMDEKGNLTTAGFACSQCGQPLFVYKLEQVSEKGKAYTNYFGRCNVAEHEKLILLSQLKPEKDSDEAVTYSLGKFGQRALDFYSIHVTKESTHPVKPLAQIAGNRYASSPVGKALSDACMGTIASFLSKYQDIIIEHQKVVKGNQKRLESLRELAGKENLEYPSVTLPPQPHTKEGVDAYNEVIARVRWWVNLNLWQKLKLSRDDAKPLLRLKGFPSFPLVERQANEVDWWDMVCNVKKLINEKKEDGKVFWQNLAGYKRQEALRPYLSSEEDRKKGKKFARYQLGDLLLHLEKKHGEDWGKVYDEAWERIDKKVEGLSKHIKLEEERRSEDAQSKAALTDWLRAKASFVIEGLKEADKDEFCRCELKLQKWYGDLRGKPFAIEAENSILDISGFSKQYNCAFIWQKDGVKKLNLYLIINYFKGGKLRFKKIKPEAFEANRFYTVINKKSGEIVPMEVNFNFDDPNLIILPLAFGKRQGREFIWNDLLSLETGSLKLANGRVIEKTLYNRRTRQDEPALFVALTFERREVLDSSNIKPMNLIGVDRGENIPAVIALTDPEGCPLSRFKDSLGNPTHILRIGESYKEKQRTIQAKKEVEQRRAGGYSRKYASKAKNLADDMVRNTARDLLYYAVTQDAMLIFENLSRGFGRQGKRTFMAERQYTRMEDWLTAKLAYEGLPSKTYLSKTLAQYTSKTCSNCGFTITSADYDRVLEKLKKTATGWMTTINGKELKVEGQITYYNRYKRQNVVKDLSVELDRLSEESVNNDISSWTKGRSGEALSLLKKRFSHRPVQEKFVCLNCGFETHADEQAALNIARSWLFLRSQEYKKYQTNKTTGNTDKRAFVETWQSFYRKKLKEVWKPAV

SEQ ID NO: 35169 - protein, 978 aa, synthetic construct
  REGION 1..978: note = engineered CasX variant
QEIKRINKIRRRLVKDSNTKKAGKTGPMKTLLVRVMTPDLRERLENLRKKPENIPQPISNTSRANLNKLLTDYTEMKKAILHVYWEEFQKDPVGLMSRVAQPASKKIDQNKLKPEMDEKGNLTTAGFACSQCGQPLFVYKLEQVSEKGKAYTNYFGRCNVAEHEKLILLSQLKPEKDSDEAVTYSLGKFGQRALDFYSIHVTKESTHPVKPLAQIAGNRYASTPVGKALSDACMGTIASFLSKYQDIIIEHQKVVKGNQKRLESLRELAGKENLEYPSVTLPPQPHTKEGVDAYNEVIARVRWWVNLNLWQKLKLSRDDAKPLLRLKGFPSFPLVERQANEVDWWDMVCNVKKLINEKKEDGKVFWQNLAGYKRQEALRPYLSSEEDRKKGKKFARYQLGDLLLHLEKKHGEDWGKVYDEAWERIDKKVEGLSKHIKLEEERRSEDAQSKAALTDWLRAKASFVIEGLKEADKDEFCRCELKLQKWYGDLRGKPFAIEAENSILDISGFSKQYNCAFIWQKDGVKKLNLYLIINYFKGGKLRFKKIKPEAFEANRFYTVINKKSGEIVPMEVNFNFDDPNLIILPLAFGKRQGREFIWNDLLSLETGSLKLANGRVIEKTLYNRRTRQDEPALFVALTFERREVLDSSNIKPMNLIGVDRGENIPAVIALTDPEGCPLSRFKDSLGNPTHILRIGESYKEKQRTIQAKKEVEQRRAGGYSRKYASKAKNLADDMVRNTARDLLYYAVTQDAMLIFENLSRGFGRQGKRTFMAERQYTRMEDWLTAKLAYEGLPSKTYLSKTLAQYTSKTCSNCGFTITSADYDRVLEKLKKTATGWMTTINGKELKVEGQITYYNRYKRQNVVKDLSVELDRLSEESVNNDISSWTKGRSGEALSLLKKRFSHRPVQEKFVCLNCGFETHADEQAALNIARSWLFLRSQEYKKYQTNKTTGNTDKRAFVETWQSFYRKKLKEVWKPAV

SEQ ID NO: 35170 - protein, 978 aa, synthetic construct
  REGION 1..978: note = engineered CasX variant
QEIKRINKIRRRLVKDSNTKKAGKTGPMKTLLVRVMTPDLRERLENLRKKPENIPQPISNTSRANLNKLLTDYTEMKKAILHVYWEEFQKDPVGLMSRVAQPASKKIDQNKLKPEMDEKGNLTTAGFACSQCGQPLFVYKLEQVSEKGKAYTNYFGRCNVAEHEKLILLSQLKPEKDSDEAVTYSLGKFGQRALDFYSIHVTKESTHPVKPLAQIAGNRYASAPVGKALSDACMGTIASFLSKYQDIIIEHQKVVKGNQKRLESLRELAGKENLEYPSVTLPPQPHTKEGVDAYNEVIARVRWWVNLNLWQKLKLSRDDAKPLLRLKGFPSFPLVERQANEVDWWDMVCNVKKLINEKKEDGKVFWQNLAGYKRQEALRPYLSSEEDRKKGKKFARYQLGDLLLHLEKKHGEDWGKVYDEAWERIDKKVEGLSKHIKLEEERRSEDAQSKAALTDWLRAKASFVIEGLKEADKDEFCRCELKLQKWYGDLRGKPFAIEAENSILDISGFSKQYNCAFIWQKDGVKKLNLYLIINYFKGGKLRFKKIKPEAFEANRFYTVINKKSGEIVPMEVNFNFDDPNLIILPLAFGKRQGREFIWNDLLSLETGSLKLANGRVIEKTLYNRRTRQDEPALFVALTFERREVLDSSNIKPMNLIGVDRGENIPAVIALTDPEGCPLSRFKDSLGNPTHILRIGESYKEKQRTIQAKKEVEQRRAGGYSRKYASKAKNLADDMVRNTARDLLYYAVTQDAMLIFENLSRGFGRQGKRTFMAERQYTRMEDWLTAKLAYEGLPSKTYLSKTLAQYTSKTCSNCGFTITSADYDRVLEKLKKTATGWMTTINGKELKVEGQITYYNRYKRQNVVKDLSVELDRLSEESVNNDISSWTKGRSGEALSLLKKRFSHRPVQEKFVCLNCGFETHADEQAALNIARSWLFLRSQEYKKYQTNKTTGNTDKRAFVETWQSFYRKKLKEVWKPAV

SEQ ID NO: 35171 - protein, 978 aa, synthetic construct
  REGION 1..978: note = engineered CasX variant
QEIKRINKIRRRLVKDSNTKKAGKTGPMKTLLVRVMTPDLRERLENLRKKPENIPQPISNTSRANLNKLLTDYTEMKKAILHVYWEEFQKDPVGLMSRVAQPASKKIDQNKLKPEMDEKGNLTTAGFACSQCGQPLFVYKLEQVSEKGKAYTNYFGRCNVAEHEKLILLSQLKPEKDSDEAVTYSLGKFGQRALDFYSIHVTKESTHPVKPLAQIAGNRYASVPVGKALSDACMGTIASFLSKYQDIIIEHQKVVKGNQKRLESLRELAGKENLEYPSVTLPPQPHTKEGVDAYNEVIARVRWWVNLNLWQKLKLSRDDAKPLLRLKGFPSFPLVERQANEVDWWDMVCNVKKLINEKKEDGKVFWQNLAGYKRQEALRPYLSSEEDRKKGKKFARYQLGDLLLHLEKKHGEDWGKVYDEAWERIDKKVEGLSKHIKLEEERRSEDAQSKAALTDWLRAKASFVIEGLKEADKDEFCRCELKLQKWYGDLRGKPFAIEAENSILDISGFSKQYNCAFIWQKDGVKKLNLYLIINYFKGGKLRFKKIKPEAFEANRFYTVINKKSGEIVPMEVNFNFDDPNLIILPLAFGKRQGREFIWNDLLSLETGSLKLANGRVIEKTLYNRRTRQDEPALFVALTFERREVLDSSNIKPMNLIGVDRGENIPAVIALTDPEGCPLSRFKDSLGNPTHILRIGESYKEKQRTIQAKKEVEQRRAGGYSRKYASKAKNLADDMVRNTARDLLYYAVTQDAMLIFENLSRGFGRQGKRTFMAERQYTRMEDWLTAKLAYEGLPSKTYLSKTLAQYTSKTCSNCGFTITSADYDRVLEKLKKTATGWMTTINGKELKVEGQITYYNRYKRQNVVKDLSVELDRLSEESVNNDISSWTKGRSGEALSLLKKRFSHRPVQEKFVCLNCGFETHADEQAALNIARSWLFLRSQEYKKYQTNKTTGNTDKRAFVETWQSFYRKKLKEVWKPAV

SEQ ID NO: 35172 - protein, 978 aa, synthetic construct
  REGION 1..978: note = engineered CasX variant
QEIKRINKIRRRLVKDSNTKKAGKTGPMKTLLVRVMTPDLRERLENLRKKPENIPQPISNTSRANLNKLLTDYTEMKKAILHVYWEEFQKDPVGLMSRVAQPASKKIDQNKLKPEMDEKGNLTTAGFACSQCGQPLFVYKLEQVSEKGKAYTNYFGRCNVAEHEKLIKLSQLKPEKDSDEAVTYSLGKFGQRALDFYSIHVTKESTHPVKPLAQIAGNRYASGPVGKALSDACMGTIASFLSKYQDIIIEHQKVVKGNQKRLESLRELAGKENLEYPSVTLPPQPHTKEGVDAYNEVIARVRWWVNLNLWQKLKLSRDDAKPLLRLKGFPSFPLVERQANEVDWWDMVCNVKKLINEKKEDGKVFWQNLAGYKRQEALRPYLSSEEDRKKGKKFARYQLGDLLLHLEKKHGEDWGKVYDEAWERIDKKVEGLSKHIKLEEERRSEDAQSKAALTDWLRAKASFVIEGLKEADKDEFCRCELKLQKWYGDLRGKPFAIEAENSILDISGFSKQYNCAFIWQKDGVKKLNLYLIINYFKGGKLRFKKIKPEAFEANRFYTVINKKSGEIVPMEVNFNFDDPNLIILPLAFGKRQGREFIWNDLLSLETGSLKLANGRVIEKTLYNRRTRQDEPALFVALTFERREVLDSSNIKPMNLIGVDRGENIPAVIALTDPEGCPLSRFKDSLGNPTHILRIGESYKEKQRTIQAKKEVEQRRAGGYSRKYASKAKNLADDMVRNTARDLLYYAVTQDAMLIFENLSRGFGRQGKRTFMAERQYTRMEDWLTAKLAYEGLPSKTYLSKTLAQYTSKTCSNCGFTITSADYDRVLEKLKKTATGWMTTINGKELKVEGQITYYNRYKRQNVVKDLSVELDRLSEESVNNDISSWTKGRSGEALSLLKKRFSHRPVQEKFVCLNCGFETHADEQAALNIARSWLFLRSQEYKKYQTNKTTGNTDKRAFVETWQSFYRKKLKEVWKPAV

SEQ ID NO: 35173 - protein, 977 aa, synthetic construct
  REGION 1..977: note = engineered CasX variant
QEIKRINKIRRRLVKDSNTKKAGKTGPMKTLLVRVMTPDLRERLENLRKKPENIPQPISNTSRANLNKLLTDYTEMKKAILHVYWEEFQKDPVGLMSRVAQPASKKIDQNKLKPEMDEKGNLTTAGFACSQCGQPLFVYKLEQVSEKGKAYTNYFGRCNVAEHEKLILLSQLKPEKDSDEAVTYSLGKFGQRALDFYSIHVTKESTHPVKPLAQIAGNRYASPVGKALSDACMGTIASFLSKYQDIIIEHQKVVKGNQKRLESLRELAGKENLEYPSVTLPPQPHTKEGVDAYNEVIARVRWWVNLNLWQKLKLSRDDAKPLLRLKGFPSFPLVERQANEVDWWDMVCNVKKLINEKKEDGKVFWQNLAGYKRQEALRPYLSSEEDRKKGKKFARYQLGDLLLHLEKKHGEDWGKVYDEAWERIDKKVEGLSKHIKLEEERRSEDAQSKAALTDWLRAKASFVIEGLKEADKDEFCRCELKLQKWYGDLRGKPFAIEAENSILDISGFSKQYNCAFIWQKDGVKKLNLYLIINYFKGGKLRFKKIKPEAFEANRFYTVINKKSGEIVPMEVNFNFDDPNLIILPLAFGKRQGREFIWNDLLSLETGSLKLANGRVIEKTLYNRRTRQDEPALFVALTFERREVLDSSNIKPMNLIGVDRGENIPAVIALTDPEGCPLSRFKDSLGNPTHILRIGESYKEKQRTIQAKKEVEQRRAGGYSRKYASKAKNLADDMVRNTARDLLYYAVTQDAMLIFENLSRGFGRQGKRTFMAERQYTRMEDWLTAKLAYEGLPSKTYLSKTLAQYTSKTCSNCGFTITSADYDRVLEKLKKTATGWMTTINGKELKVEGQITYYNRYKRQNVVKDLSVELDRLSEESVNNDISSWTKGRSGEALSLLKKRFSHRPVQEKFVCLNCGFETHADEQAALNIARSWLFLRSQEYKKYQTNKTTGNTDKRAFVETWQSFYRKKLKEVWKPAV

SEQ ID NO: 35174 - protein, 979 aa, synthetic construct
  REGION 1..979: note = engineered CasX variant
QEIKRINKIRRRLVKDSNTKKAGKTGPMKTLLVRVMTPDLRERLENLRKKPENIPQPISNTSRANLNKLLTDYTEMKKAILHVYWEEFQKDPVGLMSRVAQPASKKIDQNKLKPEMDEKGNLTTAGFACSQCGQPLFVYKLEQVSEKGKAYTNYFGRCNVAEHEKLILLSQLKPEKDSDEAVTYSLGKFGQRALDFYSIHVTKESTHPVKPLAQIAGNRYASYPVGKALSDACMGTIASFLSKYQDIIIEHQKVVKGNQKRLESLRELAGKENLEYPSVTLPPQPHTKEGVDAYNEVIARVRMWVNLNLWQKLKLSRDDAKPLLRLKGFPSFPLVERQQANEVDWWDMVCNVKKLINEKKEDGKVFWQNLAGYKRQEALRPYLSSEEDRKKGKKFARYQLGDLLLHLEKKHGEDWGKVYDEAWERIDKKVEGLSKHIKLEEERRSEDAQSKAALTDWLRAKASFVIEGLKEADKDEFCRCELKLQKWYGDLRGKPFAIEAENSILDISGFSKQYNCAFIWQKDGVKKLNLYLIINYFKGGKLRFKKIKPEAFEANRFYTVINKKSGEIVPMEVNFNFDDPNLIILPLAFGKRQGREFIWNDLLSLETGSLKLANGRVIEKTLYNRRTRQDEPALFVALTFERREVLDSSNIKPMNLIGVDRGENIPAVIALTDPEGCPLSRFKDSLGNPTHILRIGESYKEKQRTIQAKKEVEQRRAGGYSRKYASKAKNLADDMVRNTARDLLYYAVTQDAMLIFENLSRGFGRQGKRTFMAERQYTRMEDWLTAKLAYEGLPSKTYLSKTLAQYTSKTCSNCGFTITSADYDRVLEKLKKTATGWMTTINGKELKVEGQITYYNRYKRQNVVKDLSVELDRLSEESVNNDISSWTKGRSGEALSLLKKRFSHRPVQEKFVCLNCGFETHADEQAALNIARSWLFLRSQEYKKYQTNKTTGNTDKRAFVETWQSFYRKKLKEVWKPAV

SEQ ID NO: 35175 - protein, 979 aa, synthetic construct
  REGION 1..979: note = engineered CasX variant
QEIKRINKIRRRLVKDSNTKKAGKTGPMKTLLVRVMTPDLRERLENLRKKPENIPQPISNTSRANLNKLLTDYTEMKKAILHVYWEEFQKDPVGLMSRVAQPASKKIDQNKLKPEMDEKGNLTTAGFACSQCGQPLFVYKLEQVSEKGKAYTNYFGRCNVAEHEKLILLSQLKPEKDSDEAVTYSLGKFGQRALDFYSIHVTKESTHPVKPLAQIAGNRYASHPVGKALSDACMGTIASFLSKYQDIIIEHQKVVKGNQKRLESLRELAGKENLEYPSVTLPPQPHTKEGVDAYNEVIARVRMWVNLNLWQKLKLSRDDAKPLLRLKGFPSFPLVERQQANEVDWWDMVCNVKKLINEKKEDGKVFWQNLAGYKRQEALRPYLSSEEDRKKGKKFARYQLGDLLLHLEKKHGEDWGKVYDEAWERIDKKVEGLSKHIKLEEERRSEDAQSKAALTDWLRAKASFVIEGLKEADKDEFCRCELKLQKWYGDLRGKPFAIEAENSILDISGFSKQYNCAFIWQKDGVKKLNLYLIINYFKGGKLRFKKIKPEAFEANRFYTVINKKSGEIVPMEVNFNFDDPNLIILPLAFGKRQGREFIWNDLLSLETGSLKLANGRVIEKTLYNRRTRQDEPALFVALTFERREVLDSSNIKPMNLIGVDRGENIPAVIALTDPEGCPLSRFKDSLGNPTHILRIGESYKEKQRTIQAKKEVEQRRAGGYSRKYASKAKNLADDMVRNTARDLLYYAVTQDAMLIFENLSRGFGRQGKRTFMAERQYTRMEDWLTAKLAYEGLPSKTYLSKTLAQYTSKTCSNCGFTITSADYDRVLEKLKKTATGWMTTINGKELKVEGQITYYNRYKRQNVVKDLSVELDRLSEESVNNDISSWTKGRSGEALSLLKKRFSHRPVQEKFVCLNCGFETHADEQAALNIARSWLFLRSQEYKKYQTNKTTGNTDKRAFVETWQSFYRKKLKEVWKPAV

SEQ ID NO: 35176 - protein, 979 aa, synthetic construct
  REGION 1..979: note = engineered CasX variant
QEIKRINKIRRRLVKDSNTKKAGKTGPMKTLLVRVMTPDLRERLENLRKKPENIPQPISNTSRANLNKLLTDYTEMKKAILHVYWEEFQKDPVGLMSRVAQPASKKIDQNKLKPEMDEKGNLTTAGFACSQCGQPLFVYKLEQVSEKGKAYTNYFGRCNVAEHEKLILLSQLKPEKDSDEAVTYSLGKFGQRALDFYSIHVTKESTHPVKPLAQIAGNRYASSPVGKALSDACMGTIASFLSKYQDIIIEHQKVVKGNQKRLESLRELAGKENLEYPSVTLPPQPHTKEGVDAYNEVIARVRMWVNLNLWQKLKLSRDDAKPLLRLKGFPSFPLVERQQANEVDWWDMVCNVKKLINEKKEDGKVFWQNLAGYKRQEALRPYLSSEEDRKKGKKFARYQLGDLLLHLEKKHGEDWGKVYDEAWERIDKKVEGLSKHIKLEEERRSEDAQSKAALTDWLRAKASFVIEGLKEADKDEFCRCELKLQKWYGDLRGKPFAIEAENSILDISGFSKQYNCAFIWQKDGVKKLNLYLIINYFKGGKLRFKKIKPEAFEANRFYTVINKKSGEIVPMEVNFNFDDPNLIILPLAFGKRQGREFIWNDLLSLETGSLKLANGRVIEKTLYNRRTRQDEPALFVALTFERREVLDSSNIKPMNLIGVDRGENIPAVIALTDPEGCPLSRFKDSLGNPTHILRIGESYKEKQRTIQAKKEVEQRRAGGYSRKYASKAKNLADDMVRNTARDLLYYAVTQDAMLIFENLSRGFGRQGKRTFMAERQYTRMEDWLTAKLAYEGLPSKTYLSKTLAQYTSKTCSNCGFTITSADYDRVLEKLKKTATGWMTTINGKELKVEGQITYYNRYKRQNVVKDLSVELDRLSEESVNNDISSWTKGRSGEALSLLKKRFSHRPVQEKFVCLNCGFETHADEQAALNIARSWLFLRSQEYKKYQTNKTTGNTDKRAFVETWQSFYRKKLKEVWKPAV

SEQ ID NO: 35177 - protein, 979 aa, synthetic construct
  REGION 1..979: note = engineered CasX variant
QEIKRINKIRRRLVKDSNTKKAGKTGPMKTLLVRVMTPDLRERLENLRKKPENIPQPISNTSRANLNKLLTDYTEMKKAILHVYWEEFQKDPVGLMSRVAQPASKKIDQNKLKPEMDEKGNLTTAGFACSQCGQPLFVYKLEQVSEKGKAYTNYFGRCNVAEHEKLILLSQLKPEKDSDEAVTYSLGKFGQRALDFYSIHVTKESTHPVKPLAQIAGNRYASTPVGKALSDACMGTIASFLSKYQDIIIEHQKVVKGNQKRLESLRELAGKENLEYPSVTLPPQPHTKEGVDAYNEVIARVRMWVNLNLWQKLKLSRDDAKPLLRLKGFPSFPLVERQQANEVDWWDMVCNVKKLINEKKEDGKVFWQNLAGYKRQEALRPYLSSEEDRKKGKKFARYQLGDLLLHLEKKHGEDWGKVYDEAWERIDKKVEGLSKHIKLEEERRSEDAQSKAALTDWLRAKASFVIEGLKEADKDEFCRCELKLQKWYGDLRGKPFAIEAENSILDISGFSKQYNCAFIWQKDGVKKLNLYLIINYFKGGKLRFKKIKPEAFEANRFYTVINKKSGEIVPMEVNFNFDDPNLIILPLAFGKRQGREFIWNDLLSLETGSLKLANGRVIEKTLYNRRTRQDEPALFVALTFERREVLDSSNIKPMNLIGVDRGENIPAVIALTDPEGCPLSRFKDSLGNPTHILRIGESYKEKQRTIQAKKEVEQRRAGGYSRKYASKAKNLADDMVRNTARDLLYYAVTQDAMLIFENLSRGFGRQGKRTFMAERQYTRMEDWLTAKLAYEGLPSKTYLSKTLAQYTSKTCSNCGFTITSADYDRVLEKLKKTATGWMTTINGKELKVEGQITYYNRYKRQNVVKDLSVELDRLSEESVNNDISSWTKGRSGEALSLLKKRFSHRPVQEKFVCLNCGFETHADEQAALNIARSWLFLRSQEYKKYQTNKTTGNTDKRAFVETWQSFYRKKLKEVWKPAV

SEQ ID NO: 35178 - protein, 979 aa, synthetic construct
  REGION 1..979: note = engineered CasX variant
QEIKRINKIRRRLVKDSNTKKAGKTGPMKTLLVRVMTPDLRERLENLRKKPENIPQPISNTSRANLNKLLTDYTEMKKAILHVYWEEFQKDPVGLMSRVAQPASKKIDQNKLKPEMDEKGNLTTAGFACSQCGQPLFVYKLEQVSEKGKAYTNYFGRCNVAEHEKLILLSQLKPEKDSDEAVTYSLGKFGQRALDFYSIHVTKESTHPVKPLAQIAGNRYASAPVGKALSDACMGTIASFLSKYQDIIIEHQKVVKGNQKRLESLRELAGKENLEYPSVTLPPQPHTKEGVDAYNEVIARVRMWVNLNLWQKLKLSRDDAKPLLRLKGFPSFPLVERQQANEVDWWDMVCNVKKLINEKKEDGKVFWQNLAGYKRQEALRPYLSSEEDRKKGKKFARYQLGDLLLHLEKKHGEDWGKVYDEAWERIDKKVEGLSKHIKLEEERRSEDAQSKAALTDWLRAKASFVIEGLKEADKDEFCRCELKLQKWYGDLRGKPFAIEAENSILDISGFSKQYNCAFIWQKDGVKKLNLYLIINYFKGGKLRFKKIKPEAFEANRFYTVINKKSGEIVPMEVNFNFDDPNLIILPLAFGKRQGREFIWNDLLSLETGSLKLANGRVIEKTLYNRRTRQDEPALFVALTFERREVLDSSNIKPMNLIGVDRGENIPAVIALTDPEGCPLSRFKDSLGNPTHILRIGESYKEKQRTIQAKKEVEQRRAGGYSRKYASKAKNLADDMVRNTARDLLYYAVTQDAMLIFENLSRGFGRQGKRTFMAERQYTRMEDWLTAKLAYEGLPSKTYLSKTLAQYTSKTCSNCGFTITSADYDRVLEKLKKTATGWMTTINGKELKVEGQITYYNRYKRQNVVKDLSVELDRLSEESVNNDISSWTKGRSGEALSLLKKRFSHRPVQEKFVCLNCGFETHADEQAALNIARSWLFLRSQEYKKYQTNKTTGNTDKRAFVETWQSFYRKKLKEVWKPAV

SEQ ID NO: 35179 - protein, 979 aa, synthetic construct
  REGION 1..979: note = engineered CasX variant
QEIKRINKIRRRLVKDSNTKKAGKTGPMKTLLVRVMTPDLRERLENLRKKPENIPQPISNTSRANLNKLLTDYTEMKKAILHVYWEEFQKDPVGLMSRVAQPASKKIDQNKLKPEMDEKGNLTTAGFACSQCGQPLFVYKLEQVSEKGKAYTNYFGRCNVAEHEKLILLSQLKPEKDSDEAVTYSLGKFGQRALDFYSIHVTKESTHPVKPLAQIAGNRYASVPVGKALSDACMGTIASFLSKYQDIIIEHQKVVKGNQKRLESLRELAGKENLEYPSVTLPPQPHTKEGVDAYNEVIARVRMWVNLNLWQKLKLSRDDAKPLLRLKGFPSFPLVERQQANEVDWWDMVCNVKKLINEKKEDGKVFWQNLAGYKRQEALRPYLSSEEDRKKGKKFARYQLGDLLLHLEKKHGEDWGKVYDEAWERIDKKVEGLSKHIKLEEERRSEDAQSKAALTDWLRAKASFVIEGLKEADKDEFCRCELKLQKWYGDLRGKPFAIEAENSILDISGFSKQYNCAFIWQKDGVKKLNLYLIINYFKGGKLRFKKIKPEAFEANRFYTVINKKSGEIVPMEVNFNFDDPNLIILPLAFGKRQGREFIWNDLLSLETGSLKLANGRVIEKTLYNRRTRQDEPALFVALTFERREVLDSSNIKPMNLIGVDRGENIPAVIALTDPEGCPLSRFKDSLGNPTHILRIGESYKEKQRTIQAKKEVEQRRAGGYSRKYASKAKNLADDMVRNTARDLLYYAVTQDAMLIFENLSRGFGRQGKRTFMAERQYTRMEDWLTAKLAYEGLPSKTYLSKTLAQYTSKTCSNCGFTITSADYDRVLEKLKKTATGWMTTINGKELKVEGQITYYNRYKRQNVVKDLSVELDRLSEESVNNDISSWTKGRSGEALSLLKKRFSHRPVQEKFVCLNCGFETHADEQAALNIARSWLFLRSQEYKKYQTNKTTGNTDKRAFVETWQSFYRKKLKEVWKPAV

SEQ ID NO: 35180 - protein, 979 aa, synthetic construct
  REGION 1..979: note = engineered CasX variant
QEIKRINKIRRRLVKDSNTKKAGKTGPMKTLLVRVMTPDLRERLENLRKKPENIPQPISNTSRANLNKLLTDYTEMKKAILHVYWEEFQKDPVGLMSRVAQPASKKIDQNKLKPEMDEKGNLTTAGFACSQCGQPLFVYKLEQVSEKGKAYTNYFGRCNVAEHEKLIKLSQLKPEKDSDEAVTYSLGKFGQRALDFYSIHVTKESTHPVKPLAQIAGNRYASGPVGKALSDACMGTIASFLSKYQDIIIEHQKVVKGNQKRLESLRELAGKENLEYPSVTLPPQPHTKEGVDAYNEVIARVRMWVNLNLWQKLKLSRDDAKPLLRLKGFPSFPLVERQQANEVDWWDMVCNVKKLINEKKEDGKVFWQNLAGYKRQEALRPYLSSEEDRKKGKKFARYQLGDLLLHLEKKHGEDWGKVYDEAWERIDKKVEGLSKHIKLEEERRSEDAQSKAALTDWLRAKASFVIEGLKEADKDEFCRCELKLQKWYGDLRGKPFAIEAENSILDISGFSKQYNCAFIWQKDGVKKLNLYLIINYFKGGKLRFKKIKPEAFEANRFYTVINKKSGEIVPMEVNFNFDDPNLIILPLAFGKRQGREFIWNDLLSLETGSLKLANGRVIEKTLYNRRTRQDEPALFVALTFERREVLDSSNIKPMNLIGVDRGENIPAVIALTDPEGCPLSRFKDSLGNPTHILRIGESYKEKQRTIQAKKEVEQRRAGGYSRKYASKAKNLADDMVRNTARDLLYYAVTQDAMLIFENLSRGFGRQGKRTFMAERQYTRMEDWLTAKLAYEGLPSKTYLSKTLAQYTSKTCSNCGFTITSADYDRVLEKLKKTATGWMTTINGKELKVEGQITYYNRYKRQNVVKDLSVELDRLSEESVNNDISSWTKGRSGEALSLLKKRFSHRPVQEKFVCLNCGFETHADEQAALNIARSWLFLRSQEYKKYQTNKTTGNTDKRAFVETWQSFYRKKLKEVWKPAV

SEQ ID NO: 35181 - protein, 978 aa, synthetic construct
  REGION 1..978: note = engineered CasX variant
QEIKRINKIRRRLVKDSNTKKAGKTGPMKTLLVRVMTPDLRERLENLRKKPENIPQPISNTSRANLNKLLTDYTEMKKAILHVYWEEFQKDPVGLMSRVAQPASKKIDQNKLKPEMDEKGNLTTAGFACSQCGQPLFVYKLEQVSEKGKAYTNYFGRCNVAEHEKLILLSQLKPEKDSDEAVTYSLGKFGQRALDFYSIHVTKESTHPVKPLAQIAGNRYASPVGKALSDACMGTIASFLSKYQDIIIEHQKVVKGNQKRLESLRELAGKENLEYPSVTLPPQPHTKEGVDAYNEVIARVRMWVNLNLWQKLKLSRDDAKPLLRLKGFPSFPLVERQQANEVDWWDMVCNVKKLINEKKEDGKVFWQNLAGYKRQEALRPYLSSEEDRKKGKKFARYQLGDLLLHLEKKHGEDWGKVYDEAWERIDKKVEGLSKHIKLEEERRSEDAQSKAALTDWLRAKASFVIEGLKEADKDEFCRCELKLQKWYGDLRGKPFAIEAENSILDISGFSKQYNCAFIWQKDGVKKLNLYLIINYFKGGKLRFKKIKPEAFEANRFYTVINKKSGEIVPMEVNFNFDDPNLIILPLAFGKRQGREFIWNDLLSLETGSLKLANGRVIEKTLYNRRTRQDEPALFVALTFERREVLDSSNIKPMNLIGVDRGENIPAVIALTDPEGCPLSRFKDSLGNPTHILRIGESYKEKQRTIQAKKEVEQRRAGGYSRKYASKAKNLADDMVRNTARDLLYYAVTQDAMLIFENLSRGFGRQGKRTFMAERQYTRMEDWLTAKLAYEGLPSKTYLSKTLAQYTSKTCSNCGFTITSADYDRVLEKLKKTATGWMTTINGKELKVEGQITYYNRYKRQNVVKDLSVELDRLSEESVNNDISSWTKGRSGEALSLLKKRFSHRPVQEKFVCLNCGFETHADEQAALNIARSWLFLRSQEYKKYQTNKTTGNTDKRAFVETWQSFYRKKLKEVWKPAV

SEQ ID NO: 35182 - protein, 979 aa, synthetic construct
  REGION 1..979: note = engineered CasX variant
QEIKRINKIRRRLVKDSNTKKAGKTGPMKTLLVRVMTPDLRERLENLRKKPENIPQPISNTSRANLNKLLTDYTEMKKAILHVYWEEFQKDPVGLMSRVAQPASKKIDQNKLKPEMDEKGNLTTAGFACSQCGQPLFVYKLEQVSEKGKAYTNYFGRCNVAEHEKLILLSQLKPEKDSDEAVTYSLGKFGQRALDFYSIHVTKESTHPVKPLAQIAGNRYASYPVGKALSDACMGTIASFLSKYQDIIIEHQKVVKGNQKRLESLRELAGKENLEYPSVTLPPQPHTKEGVDAYNEVIARVRMWVNLNLWQKLKLSRDDAKPLLRLKGFPSFPLVERQANAEVDWWDMVCNVKKLINEKKEDGKVFWQNLAGYKRQEALRPYLSSEEDRKKGKKFARYQLGDLLLHLEKKHGEDWGKVYDEAWERIDKKVEGLSKHIKLEEERRSEDAQSKAALTDWLRAKASFVIEGLKEADKDEFCRCELKLQKWYGDLRGKPFAIEAENSILDISGFSKQYNCAFIWQKDGVKKLNLYLIINYFKGGKLRFKKIKPEAFEANRFYTVINKKSGEIVPMEVNFNFDDPNLIILPLAFGKRQGREFIWNDLLSLETGSLKLANGRVIEKTLYNRRTRQDEPALFVALTFERREVLDSSNIKPMNLIGVDRGENIPAVIALTDPEGCPLSRFKDSLGNPTHILRIGESYKEKQRTIQAKKEVEQRRAGGYSRKYASKAKNLADDMVRNTARDLLYYAVTQDAMLIFENLSRGFGRQGKRTFMAERQYTRMEDWLTAKLAYEGLPSKTYLSKTLAQYTSKTCSNCGFTITSADYDRVLEKLKKTATGWMTTINGKELKVEGQITYYNRYKRQNVVKDLSVELDRLSEESVNNDISSWTKGRSGEALSLLKKRFSHRPVQEKFVCLNCGFETHADEQAALNIARSWLFLRSQEYKKYQTNKTTGNTDKRAFVETWQSFYRKKLKEVWKPAV

SEQ ID NO: 35183 - protein, 979 aa, synthetic construct
  REGION 1..979: note = engineered CasX variant
QEIKRINKIRRRLVKDSNTKKAGKTGPMKTLLVRVMTPDLRERLENLRKKPENIPQPISNTSRANLNKLLTDYTEMKKAILHVYWEEFQKDPVGLMSRVAQPASKKIDQNKLKPEMDEKGNLTTAGFACSQCGQPLFVYKLEQVSEKGKAYTNYFGRCNVAEHEKLILLSQLKPEKDSDEAVTYSLGKFGQRALDFYSIHVTKESTHPVKPLAQIAGNRYASHPVGKALSDACMGTIASFLSKYQDIIIEHQKVVKGNQKRLESLRELAGKENLEYPSVTLPPQPHTKEGVDAYNEVIARVRMWVNLNLWQKLKLSRDDAKPLLRLKGFPSFPLVERQANAEVDWWDMVCNVKKLINEKKEDGKVFWQNLAGYKRQEALRPYLSSEEDRKKGKKFARYQLGDLLLHLEKKHGEDWGKVYDEAWERIDKKVEGLSKHIKLEEERRSEDAQSKAALTDWLRAKASFVIEGLKEADKDEFCRCELKLQKWYGDLRGKPFAIEAENSILDISGFSKQYNCAFIWQKDGVKKLNLYLIINYFKGGKLRFKKIKPEAFEANRFYTVINKKSGEIVPMEVNFNFDDPNLIILPLAFGKRQGREFIWNDLLSLETGSLKLANGRVIEKTLYNRRTRQDEPALFVALTFERREVLDSSNIKPMNLIGVDRGENIPAVIALTDPEGCPLSRFKDSLGNPTHILRIGESYKEKQRTIQAKKEVEQRRAGGYSRKYASKAKNLADDMVRNTARDLLYYAVTQDAMLIFENLSRGFGRQGKRTFMAERQYTRMEDWLTAKLAYEGLPSKTYLSKTLAQYTSKTCSNCGFTITSADYDRVLEKLKKTATGWMTTINGKELKVEGQITYYNRYKRQNVVKDLSVELDRLSEESVNNDISSWTKGRSGEALSLLKKRFSHRPVQEKFVCLNCGFETHADEQAALNIARSWLFLRSQEYKKYQTNKTTGNTDKRAFVETWQSFYRKKLKEVWKPAV

SEQ ID NO: 35184 - protein, 979 aa, synthetic construct
  REGION 1..979: note = engineered CasX variant
QEIKRINKIRRRLVKDSNTKKAGKTGPMKTLLVRVMTPDLRERLENLRKKPENIPQPISNTSRANLNKLLTDYTEMKKAILHVYWEEFQKDPVGLMSRVAQPASKKIDQNKLKPEMDEKGNLTTAGFACSQCGQPLFVYKLEQVSEKGKAYTNYFGRCNVAEHEKLILLSQLKPEKDSDEAVTYSLGKFGQRALDFYSIHVTKESTHPVKPLAQIAGNRYASSPVGKALSDACMGTIASFLSKYQDIIIEHQKVVKGNQKRLESLRELAGKENLEYPSVTLPPQPHTKEGVDAYNEVIARVRMWVNLNLWQKLKLSRDDAKPLLRLKGFPSFPLVERQANAEVDWWDMVCNVKKLINEKKEDGKVFWQNLAGYKRQEALRPYLSSEEDRKKGKKFARYQLGDLLLHLEKKHGEDWGKVYDEAWERIDKKVEGLSKHIKLEEERRSEDAQSKAALTDWLRAKASFVIEGLKEADKDEFCRCELKLQKWYGDLRGKPFAIEAENSILDISGFSKQYNCAFIWQKDGVKKLNLYLIINYFKGGKLRFKKIKPEAFEANRFYTVINKKSGEIVPMEVNFNFDDPNLIILPLAFGKRQGREFIWNDLLSLETGSLKLANGRVIEKTLYNRRTRQDEPALFVALTFERREVLDSSNIKPMNLIGVDRGENIPAVIALTDPEGCPLSRFKDSLGNPTHILRIGESYKEKQRTIQAKKEVEQRRAGGYSRKYASKAKNLADDMVRNTARDLLYYAVTQDAMLIFENLSRGFGRQGKRTFMAERQYTRMEDWLTAKLAYEGLPSKTYLSKTLAQYTSKTCSNCGFTITSADYDRVLEKLKKTATGWMTTINGKELKVEGQITYYNRYKRQNVVKDLSVELDRLSEESVNNDISSWTKGRSGEALSLLKKRFSHRPVQEKFVCLNCGFETHADEQAALNIARSWLFLRSQEYKKYQTNKTTGNTDKRAFVETWQSFYRKKLKEVWKPAV

SEQ ID NO: 35185 - protein, 979 aa, synthetic construct
  REGION 1..979: note = engineered CasX variant
QEIKRINKIRRRLVKDSNTKKAGKTGPMKTLLVRVMTPDLRERLENLRKKPENIPQPISNTSRANLNKLLTDYTEMKKAILHVYWEEFQKDPVGLMSRVAQPASKKIDQNKLKPEMDEKGNLTTAGFACSQCGQPLFVYKLEQVSEKGKAYTNYFGRCNVAEHEKLILLSQLKPEKDSDEAVTYSLGKFGQRALDFYSIHVTKESTHPVKPLAQIAGNRYASTPVGKALSDACMGTIASFLSKYQDIIIEHQKVVKGNQKRLESLRELAGKENLEYPSVTLPPQPHTKEGVDAYNEVIARVRMWVNLNLWQKLKLSRDDAKPLLRLKGFPSFPLVERQANAEVDWWDMVCNVKKLINEKKEDGKVFWQNLAGYKRQEALRPYLSSEEDRKKGKKFARYQLGDLLLHLEKKHGEDWGKVYDEAWERIDKKVEGLSKHIKLEEERRSEDAQSKAALTDWLRAKASFVIEGLKEADKDEFCRCELKLQKWYGDLRGKPFAIEAENSILDISGFSKQYNCAFIWQKDGVKKLNLYLIINYFKGGKLRFKKIKPEAFEANRFYTVINKKSGEIVPMEVNFNFDDPNLIILPLAFGKRQGREFIWNDLLSLETGSLKLANGRVIEKTLYNRRTRQDEPALFVALTFERREVLDSSNIKPMNLIGVDRGENIPAVIALTDPEGCPLSRFKDSLGNPTHILRIGESYKEKQRTIQAKKEVEQRRAGGYSRKYASKAKNLADDMVRNTARDLLYYAVTQDAMLIFENLSRGFGRQGKRTFMAERQYTRMEDWLTAKLAYEGLPSKTYLSKTLAQYTSKTCSNCGFTITSADYDRVLEKLKKTATGWMTTINGKELKVEGQITYYNRYKRQNVVKDLSVELDRLSEESVNNDISSWTKGRSGEALSLLKKRFSHRPVQEKFVCLNCGFETHADEQAALNIARSWLFLRSQEYKKYQTNKTTGNTDKRAFVETWQSFYRKKLKEVWKPAV

SEQ ID NO: 35186 - protein, 979 aa, synthetic construct
  REGION 1..979: note = engineered CasX variant
QEIKRINKIRRRLVKDSNTKKAGKTGPMKTLLVRVMTPDLRERLENLRKKPENIPQPISNTSRANLNKLLTDYTEMKKAILHVYWEEFQKDPVGLMSRVAQPASKKIDQNKLKPEMDEKGNLTTAGFACSQCGQPLFVYKLEQVSEKGKAYTNYFGRCNVAEHEKLILLSQLKPEKDSDEAVTYSLGKFGQRALDFYSIHVTKESTHPVKPLAQIAGNRYASAPVGKALSDACMGTIASFLSKYQDIIIEHQKVVKGNQKRLESLRELAGKENLEYPSVTLPPQPHTKEGVDAYNEVIARVRMWVNLNLWQKLKLSRDDAKPLLRLKGFPSFPLVERQANAEVDWWDMVCNVKKLINEKKEDGKVFWQNLAGYKRQEALRPYLSSEEDRKKGKKFARYQLGDLLLHLEKKHGEDWGKVYDEAWERIDKKVEGLSKHIKLEEERRSEDAQSKAALTDWLRAKASFVIEGLKEADKDEFCRCELKLQKWYGDLRGKPFAIEAENSILDISGFSKQYNCAFIWQKDGVKKLNLYLIINYFKGGKLRFKKIKPEAFEANRFYTVINKKSGEIVPMEVNFNFDDPNLIILPLAFGKRQGREFIWNDLLSLETGSLKLANGRVIEKTLYNRRTRQDEPALFVALTFERREVLDSSNIKPMNLIGVDRGENIPAVIALTDPEGCPLSRFKDSLGNPTHILRIGESYKEKQRTIQAKKEVEQRRAGGYSRKYASKAKNLADDMVRNTARDLLYYAVTQDAMLIFENLSRGFGRQGKRTFMAERQYTRMEDWLTAKLAYEGLPSKTYLSKTLAQYTSKTCSNCGFTITSADYDRVLEKLKKTATGWMTTINGKELKVEGQITYYNRYKRQNVVKDLSVELDRLSEESVNNDISSWTKGRSGEALSLLKKRFSHRPVQEKFVCLNCGFETHADEQAALNIARSWLFLRSQEYKKYQTNKTTGNTDKRAFVETWQSFYRKKLKEVWKPAV

SEQ ID NO: 35187 - protein, 979 aa, synthetic construct
  REGION 1..979: note = engineered CasX variant
QEIKRINKIRRRLVKDSNTKKAGKTGPMKTLLVRVMTPDLRERLENLRKKPENIPQPISNTSRANLNKLLTDYTEMKKAILHVYWEEFQKDPVGLMSRVAQPASKKIDQNKLKPEMDEKGNLTTAGFACSQCGQPLFVYKLEQVSEKGKAYTNYFGRCNVAEHEKLILLSQLKPEKDSDEAVTYSLGKFGQRALDFYSIHVTKESTHPVKPLAQIAGNRYASVPVGKALSDACMGTIASFLSKYQDIIIEHQKVVKGNQKRLESLRELAGKENLEYPSVTLPPQPHTKEGVDAYNEVIARVRMWVNLNLWQKLKLSRDDAKPLLRLKGFPSFPLVERQANAEVDWWDMVCNVKKLINEKKEDGKVFWQNLAGYKRQEALRPYLSSEEDRKKGKKFARYQLGDLLLHLEKKHGEDWGKVYDEAWERIDKKVEGLSKHIKLEEERRSEDAQSKAALTDWLRAKASFVIEGLKEADKDEFCRCELKLQKWYGDLRGKPFAIEAENSILDISGFSKQYNCAFIWQKDGVKKLNLYLIINYFKGGKLRFKKIKPEAFEANRFYTVINKKSGEIVPMEVNFNFDDPNLIILPLAFGKRQGREFIWNDLLSLETGSLKLANGRVIEKTLYNRRTRQDEPALFVALTFERREVLDSSNIKPMNLIGVDRGENIPAVIALTDPEGCPLSRFKDSLGNPTHILRIGESYKEKQRTIQAKKEVEQRRAGGYSRKYASKAKNLADDMVRNTARDLLYYAVTQDAMLIFENLSRGFGRQGKRTFMAERQYTRMEDWLTAKLAYEGLPSKTYLSKTLAQYTSKTCSNCGFTITSADYDRVLEKLKKTATGWMTTINGKELKVEGQITYYNRYKRQNVVKDLSVELDRLSEESVNNDISSWTKGRSGEALSLLKKRFSHRPVQEKFVCLNCGFETHADEQAALNIARSWLFLRSQEYKKYQTNKTTGNTDKRAFVETWQSFYRKKLKEVWKPAV

SEQ ID NO: 35188 - protein, 979 aa, synthetic construct
  REGION 1..979: note = engineered CasX variant
QEIKRINKIRRRLVKDSNTKKAGKTGPMKTLLVRVMTPDLRERLENLRKKPENIPQPISNTSRANLNKLLTDYTEMKKAILHVYWEEFQKDPVGLMSRVAQPASKKIDQNKLKPEMDEKGNLTTAGFACSQCGQPLFVYKLEQVSEKGKAYTNYFGRCNVAEHEKLIKLSQLKPEKDSDEAVTYSLGKFGQRALDFYSIHVTKESTHPVKPLAQIAGNRYASGPVGKALSDACMGTIASFLSKYQDIIIEHQKVVKGNQKRLESLRELAGKENLEYPSVTLPPQPHTKEGVDAYNEVIARVRMWVNLNLWQKLKLSRDDAKPLLRLKGFPSFPLVERQANAEVDWWDMVCNVKKLINEKKEDGKVFWQNLAGYKRQEALRPYLSSEEDRKKGKKFARYQLGDLLLHLEKKHGEDWGKVYDEAWERIDKKVEGLSKHIKLEEERRSEDAQSKAALTDWLRAKASFVIEGLKEADKDEFCRCELKLQKWYGDLRGKPFAIEAENSILDISGFSKQYNCAFIWQKDGVKKLNLYLIINYFKGGKLRFKKIKPEAFEANRFYTVINKKSGEIVPMEVNFNFDDPNLIILPLAFGKRQGREFIWNDLLSLETGSLKLANGRVIEKTLYNRRTRQDEPALFVALTFERREVLDSSNIKPMNLIGVDRGENIPAVIALTDPEGCPLSRFKDSLGNPTHILRIGESYKEKQRTIQAKKEVEQRRAGGYSRKYASKAKNLADDMVRNTARDLLYYAVTQDAMLIFENLSRGFGRQGKRTFMAERQYTRMEDWLTAKLAYEGLPSKTYLSKTLAQYTSKTCSNCGFTITSADYDRVLEKLKKTATGWMTTINGKELKVEGQITYYNRYKRQNVVKDLSVELDRLSEESVNNDISSWTKGRSGEALSLLKKRFSHRPVQEKFVCLNCGFETHADEQAALNIARSWLFLRSQEYKKYQTNKTTGNTDKRAFVETWQSFYRKKLKEVWKPAV

SEQ ID NO: 35189 - protein, 978 aa, synthetic construct
  REGION 1..978: note = engineered CasX variant
QEIKRINKIRRRLVKDSNTKKAGKTGPMKTLLVRVMTPDLRERLENLRKKPENIPQPISNTSRANLNKLLTDYTEMKKAILHVYWEEFQKDPVGLMSRVAQPASKKIDQNKLKPEMDEKGNLTTAGFACSQCGQPLFVYKLEQVSEKGKAYTNYFGRCNVAEHEKLILLSQLKPEKDSDEAVTYSLGKFGQRALDFYSIHVTKESTHPVKPLAQIAGNRYASPVGKALSDACMGTIASFLSKYQDIIIEHQKVVKGNQKRLESLRELAGKENLEYPSVTLPPQPHTKEGVDAYNEVIARVRMWVNLNLWQKLKLSRDDAKPLLRLKGFPSFPLVERQANAEVDWWDMVCNVKKLINEKKEDGKVFWQNLAGYKRQEALRPYLSSEEDRKKGKKFARYQLGDLLLHLEKKHGEDWGKVYDEAWERIDKKVEGLSKHIKLEEERRSEDAQSKAALTDWLRAKASFVIEGLKEADKDEFCRCELKLQKWYGDLRGKPFAIEAENSILDISGFSKQYNCAFIWQKDGVKKLNLYLIINYFKGGKLRFKKIKPEAFEANRFYTVINKKSGEIVPMEVNFNFDDPNLIILPLAFGKRQGREFIWNDLLSLETGSLKLANGRVIEKTLYNRRTRQDEPALFVALTFERREVLDSSNIKPMNLIGVDRGENIPAVIALTDPEGCPLSRFKDSLGNPTHILRIGESYKEKQRTIQAKKEVEQRRAGGYSRKYASKAKNLADDMVRNTARDLLYYAVTQDAMLIFENLSRGFGRQGKRTFMAERQYTRMEDWLTAKLAYEGLPSKTYLSKTLAQYTSKTCSNCGFTITSADYDRVLEKLKKTATGWMTTINGKELKVEGQITYYNRYKRQNVVKDLSVELDRLSEESVNNDISSWTKGRSGEALSLLKKRFSHRPVQEKFVCLNCGFETHADEQAALNIARSWLFLRSQEYKKYQTNKTTGNTDKRAFVETWQSFYRKKLKEVWKPAV

SEQ ID NO: 35190 - protein, 978 aa, synthetic construct
  REGION 1..978: note = engineered CasX variant
QEIKRINKIRRRLVKDSNTKKAGKTGPMKTLLVRVMTPDLRERLENLRKKPENIPQPISNTSRANLNKLLTDYTEMKKAILHVYWEEFQKDPVGLMSRVAQPASKKIDQNKLKPEMDEKGNLTTAGFACSQCGQPLFVYKLEQVSEKGKAYTNYFGRCNVAEHEKLILLSQLKPEKDSDEAVTYSLGKFGQRALDFYSIHVTKESTHPVKPLAQIAGNRYASYPVGKALSDACMGTIASFLSKYQDIIIEHQKVVKGNQKRLESLRELAGKENLEYPSVTLPPQPHTKEGVDAYNEVIARVRMWVNLNLWQKLKLSRDDAKPLLRLKGFPSFPLVERQANEVDWWDMVCNVKKLINEKKEDGKVFWQNLAGYKRQEALRPYLSSEEDRKKGKKFARTQLGDLLLHLEKKHGEDWGKVYDEAWERIDKKVEGLSKHIKLEEERRSEDAQSKAALTDWLRAKASFVIEGLKEADKDEFCRCELKLQKWYGDLRGKPFAIEAENSILDISGFSKQYNCAFIWQKDGVKKLNLYLIINYFKGGKLRFKKIKPEAFEANRFYTVINKKSGEIVPMEVNFNFDDPNLIILPLAFGKRQGREFIWNDLLSLETGSLKLANGRVIEKTLYNRRTRQDEPALFVALTFERREVLDSSNIKPMNLIGVDRGENIPAVIALTDPEGCPLSRFKDSLGNPTHILRIGESYKEKQRTIQAKKEVEQRRAGGYSRKYASKAKNLADDMVRNTARDLLYYAVTQDAMLIFENLSRGFGRQGKRTFMAERQYTRMEDWLTAKLAYEGLPSKTYLSKTLAQYTSKTCSNCGFTITSADYDRVLEKLKKTATGWMTTINGKELKVEGQITYYNRYKRQNVVKDLSVELDRLSEESVNNDISSWTKGRSGEALSLLKKRFSHRPVQEKFVCLNCGFETHADEQAALNIARSWLFLRSQEYKKYQTNKTTGNTDKRAFVETWQSFYRKKLKEVWKPAV

SEQ ID NO: 35191 - protein, 978 aa, synthetic construct
  REGION 1..978: note = engineered CasX variant
QEIKRINKIRRRLVKDSNTKKAGKTGPMKTLLVRVMTPDLRERLENLRKKPENIPQPISNTSRANLNKLLTDYTEMKKAILHVYWEEFQKDPVGLMSRVAQPASKKIDQNKLKPEMDEKGNLTTAGFACSQCGQPLFVYKLEQVSEKGKAYTNYFGRCNVAEHEKLILLSQLKPEKDSDEAVTYSLGKFGQRALDFYSIHVTKESTHPVKPLAQIAGNRYASHPVGKALSDACMGTIASFLSKYQDIIIEHQKVVKGNQKRLESLRELAGKENLEYPSVTLPPQPHTKEGVDAYNEVIARVRMWVNLNLWQKLKLSRDDAKPLLRLKGFPSFPLVERQANEVDWWDMVCNVKKLINEKKEDGKVFWQNLAGYKRQEALRPYLSSEEDRKKGKKFARTQLGDLLLHLEKKHGEDWGKVYDEAWERIDKKVEGLSKHIKLEEERRSEDAQSKAALTDWLRAKASFVIEGLKEADKDEFCRCELKLQKWYGDLRGKPFAIEAENSILDISGFSKQYNCAFIWQKDGVKKLNLYLIINYFKGGKLRFKKIKPEAFEANRFYTVINKKSGEIVPMEVNFNFDDPNLIILPLAFGKRQGREFIWNDLLSLETGSLKLANGRVIEKTLYNRRTRQDEPALFVALTFERREVLDSSNIKPMNLIGVDRGENIPAVIALTDPEGCPLSRFKDSLGNPTHILRIGESYKEKQRTIQAKKEVEQRRAGGYSRKYASKAKNLADDMVRNTARDLLYYAVTQDAMLIFENLSRGFGRQGKRTFMAERQYTRMEDWLTAKLAYEGLPSKTYLSKTLAQYTSKTCSNCGFTITSADYDRVLEKLKKTATGWMTTINGKELKVEGQITYYNRYKRQNVVKDLSVELDRLSEESVNNDISSWTKGRSGEALSLLKKRFSHRPVQEKFVCLNCGFETHADEQAALNIARSWLFLRSQEYKKYQTNKTTGNTDKRAFVETWQSFYRKKLKEVWKPAV

SEQ ID NO: 35192 - protein, 978 aa, synthetic construct
  REGION 1..978: note = engineered CasX variant
QEIKRINKIRRRLVKDSNTKKAGKTGPMKTLLVRVMTPDLRERLENLRKKPENIPQPISNTSRANLNKLLTDYTEMKKAILHVYWEEFQKDPVGLMSRVAQPASKKIDQNKLKPEMDEKGNLTTAGFACSQCGQPLFVYKLEQVSEKGKAYTNYFGRCNVAEHEKLILLSQLKPEKDSDEAVTYSLGKFGQRALDFYSIHVTKESTHPVKPLAQIAGNRYASSPVGKALSDACMGTIASFLSKYQDIIIEHQKVVKGNQKRLESLRELAGKENLEYPSVTLPPQPHTKEGVDAYNEVIARVRMWVNLNLWQKLKLSRDDAKPLLRLKGFPSFPLVERQANEVDWWDMVCNVKKLINEKKEDGKVFWQNLAGYKRQEALRPYLSSEEDRKKGKKFARTQLGDLLLHLEKKHGEDWGKVYDEAWERIDKKVEGLSKHIKLEEERRSEDAQSKAALTDWLRAKASFVIEGLKEADKDEFCRCELKLQKWYGDLRGKPFAIEAENSILDISGFSKQYNCAFIWQKDGVKKLNLYLIINYFKGGKLRFKKIKPEAFEANRFYTVINKKSGEIVPMEVNFNFDDPNLIILPLAFGKRQGREFIWNDLLSLETGSLKLANGRVIEKTLYNRRTRQDEPALFVALTFERREVLDSSNIKPMNLIGVDRGENIPAVIALTDPEGCPLSRFKDSLGNPTHILRIGESYKEKQRTIQAKKEVEQRRAGGYSRKYASKAKNLADDMVRNTARDLLYYAVTQDAMLIFENLSRGFGRQGKRTFMAERQYTRMEDWLTAKLAYEGLPSKTYLSKTLAQYTSKTCSNCGFTITSADYDRVLEKLKKTATGWMTTINGKELKVEGQITYYNRYKRQNVVKDLSVELDRLSEESVNNDISSWTKGRSGEALSLLKKRFSHRPVQEKFVCLNCGFETHADEQAALNIARSWLFLRSQEYKKYQTNKTTGNTDKRAFVETWQSFYRKKLKEVWKPAV

SEQ ID NO: 35193 - protein, 978 aa, synthetic construct
  REGION 1..978: note = engineered CasX variant
QEIKRINKIRRRLVKDSNTKKAGKTGPMKTLLVRVMTPDLRERLENLRKKPENIPQPISNTSRANLNKLLTDYTEMKKAILHVYWEEFQKDPVGLMSRVAQPASKKIDQNKLKPEMDEKGNLTTAGFACSQCGQPLFVYKLEQVSEKGKAYTNYFGRCNVAEHEKLILLSQLKPEKDSDEAVTYSLGKFGQRALDFYSIHVTKESTHPVKPLAQIAGNRYASTPVGKALSDACMGTIASFLSKYQDIIIEHQKVVKGNQKRLESLRELAGKENLEYPSVTLPPQPHTKEGVDAYNEVIARVRMWVNLNLWQKLKLSRDDAKPLLRLKGFPSFPLVERQANEVDWWDMVCNVKKLINEKKEDGKVFWQNLAGYKRQEALRPYLSSEEDRKKGKKFARTQLGDLLLHLEKKHGEDWGKVYDEAWERIDKKVEGLSKHIKLEEERRSEDAQSKAALTDWLRAKASFVIEGLKEADKDEFCRCELKLQKWYGDLRGKPFAIEAENSILDISGFSKQYNCAFIWQKDGVKKLNLYLIINYFKGGKLRFKKIKPEAFEANRFYTVINKKSGEIVPMEVNFNFDDPNLIILPLAFGKRQGREFIWNDLLSLETGSLKLANGRVIEKTLYNRRTRQDEPALFVALTFERREVLDSSNIKPMNLIGVDRGENIPAVIALTDPEGCPLSRFKDSLGNPTHILRIGESYKEKQRTIQAKKEVEQRRAGGYSRKYASKAKNLADDMVRNTARDLLYYAVTQDAMLIFENLSRGFGRQGKRTFMAERQYTRMEDWLTAKLAYEGLPSKTYLSKTLAQYTSKTCSNCGFTITSADYDRVLEKLKKTATGWMTTINGKELKVEGQITYYNRYKRQNVVKDLSVELDRLSEESVNNDISSWTKGRSGEALSLLKKRFSHRPVQEKFVCLNCGFETHADEQAALNIARSWLFLRSQEYKKYQTNKTTGNTDKRAFVETWQSFYRKKLKEVWKPAV

SEQ ID NO: 35194 - protein, 978 aa, synthetic construct
  REGION 1..978: note = engineered CasX variant
QEIKRINKIRRRLVKDSNTKKAGKTGPMKTLLVRVMTPDLRERLENLRKKPENIPQPISNTSRANLNKLLTDYTEMKKAILHVYWEEFQKDPVGLMSRVAQPASKKIDQNKLKPEMDEKGNLTTAGFACSQCGQPLFVYKLEQVSEKGKAYTNYFGRCNVAEHEKLILLSQLKPEKDSDEAVTYSLGKFGQRALDFYSIHVTKESTHPVKPLAQIAGNRYASAPVGKALSDACMGTIASFLSKYQDIIIEHQKVVKGNQKRLESLRELAGKENLEYPSVTLPPQPHTKEGVDAYNEVIARVRMWVNLNLWQKLKLSRDDAKPLLRLKGFPSFPLVERQANEVDWWDMVCNVKKLINEKKEDGKVFWQNLAGYKRQEALRPYLSSEEDRKKGKKFARTQLGDLLLHLEKKHGEDWGKVYDEAWERIDKKVEGLSKHIKLEEERRSEDAQSKAALTDWLRAKASFVIEGLKEADKDEFCRCELKLQKWYGDLRGKPFAIEAENSILDISGFSKQYNCAFIWQKDGVKKLNLYLIINYFKGGKLRFKKIKPEAFEANRFYTVINKKSGEIVPMEVNFNFDDPNLIILPLAFGKRQGREFIWNDLLSLETGSLKLANGRVIEKTLYNRRTRQDEPALFVALTFERREVLDSSNIKPMNLIGVDRGENIPAVIALTDPEGCPLSRFKDSLGNPTHILRIGESYKEKQRTIQAKKEVEQRRAGGYSRKYASKAKNLADDMVRNTARDLLYYAVTQDAMLIFENLSRGFGRQGKRTFMAERQYTRMEDWLTAKLAYEGLPSKTYLSKTLAQYTSKTCSNCGFTITSADYDRVLEKLKKTATGWMTTINGKELKVEGQITYYNRYKRQNVVKDLSVELDRLSEESVNNDISSWTKGRSGEALSLLKKRFSHRPVQEKFVCLNCGFETHADEQAALNIARSWLFLRSQEYKKYQTNKTTGNTDKRAFVETWQSFYRKKLKEVWKPAV

SEQ ID NO: 35195 - protein, 978 aa, synthetic construct
  REGION 1..978: note = engineered CasX variant
QEIKRINKIRRRLVKDSNTKKAGKTGPMKTLLVRVMTPDLRERLENLRKKPENIPQPISNTSRANLNKLLTDYTEMKKAILHVYWEEFQKDPVGLMSRVAQPASKKIDQNKLKPEMDEKGNLTTAGFACSQCGQPLFVYKLEQVSEKGKAYTNYFGRCNVAEHEKLILLSQLKPEKDSDEAVTYSLGKFGQRALDFYSIHVTKESTHPVKPLAQIAGNRYASVPVGKALSDACMGTIASFLSKYQDIIIEHQKVVKGNQKRLESLRELAGKENLEYPSVTLPPQPHTKEGVDAYNEVIARVRMWVNLNLWQKLKLSRDDAKPLLRLKGFPSFPLVERQANEVDWWDMVCNVKKLINEKKEDGKVFWQNLAGYKRQEALRPYLSSEEDRKKGKKFARTQLGDLLLHLEKKHGEDWGKVYDEAWERIDKKVEGLSKHIKLEEERRSEDAQSKAALTDWLRAKASFVIEGLKEADKDEFCRCELKLQKWYGDLRGKPFAIEAENSILDISGFSKQYNCAFIWQKDGVKKLNLYLIINYFKGGKLRFKKIKPEAFEANRFYTVINKKSGEIVPMEVNFNFDDPNLIILPLAFGKRQGREFIWNDLLSLETGSLKLANGRVIEKTLYNRRTRQDEPALFVALTFERREVLDSSNIKPMNLIGVDRGENIPAVIALTDPEGCPLSRFKDSLGNPTHILRIGESYKEKQRTIQAKKEVEQRRAGGYSRKYASKAKNLADDMVRNTARDLLYYAVTQDAMLIFENLSRGFGRQGKRTFMAERQYTRMEDWLTAKLAYEGLPSKTYLSKTLAQYTSKTCSNCGFTITSADYDRVLEKLKKTATGWMTTINGKELKVEGQITYYNRYKRQNVVKDLSVELDRLSEESVNNDISSWTKGRSGEALSLLKKRFSHRPVQEKFVCLNCGFETHADEQAALNIARSWLFLRSQEYKKYQTNKTTGNTDKRAFVETWQSFYRKKLKEVWKPAV

SEQ ID NO: 35196 - protein, 978 aa, synthetic construct
  REGION 1..978: note = engineered CasX variant
QEIKRINKIRRRLVKDSNTKKAGKTGPMKTLLVRVMTPDLRERLENLRKKPENIPQPISNTSRANLNKLLTDYTEMKKAILHVYWEEFQKDPVGLMSRVAQPASKKIDQNKLKPEMDEKGNLTTAGFACSQCGQPLFVYKLEQVSEKGKAYTNYFGRCNVAEHEKLIKLSQLKPEKDSDEAVTYSLGKFGQRALDFYSIHVTKESTHPVKPLAQIAGNRYASGPVGKALSDACMGTIASFLSKYQDIIIEHQKVVKGNQKRLESLRELAGKENLEYPSVTLPPQPHTKEGVDAYNEVIARVRMWVNLNLWQKLKLSRDDAKPLLRLKGFPSFPLVERQANEVDWWDMVCNVKKLINEKKEDGKVFWQNLAGYKRQEALRPYLSSEEDRKKGKKFARTQLGDLLLHLEKKHGEDWGKVYDEAWERIDKKVEGLSKHIKLEEERRSEDAQSKAALTDWLRAKASFVIEGLKEADKDEFCRCELKLQKWYGDLRGKPFAIEAENSILDISGFSKQYNCAFIWQKDGVKKLNLYLIINYFKGGKLRFKKIKPEAFEANRFYTVINKKSGEIVPMEVNFNFDDPNLIILPLAFGKRQGREFIWNDLLSLETGSLKLANGRVIEKTLYNRRTRQDEPALFVALTFERREVLDSSNIKPMNLIGVDRGENIPAVIALTDPEGCPLSRFKDSLGNPTHILRIGESYKEKQRTIQAKKEVEQRRAGGYSRKYASKAKNLADDMVRNTARDLLYYAVTQDAMLIFENLSRGFGRQGKRTFMAERQYTRMEDWLTAKLAYEGLPSKTYLSKTLAQYTSKTCSNCGFTITSADYDRVLEKLKKTATGWMTTINGKELKVEGQITYYNRYKRQNVVKDLSVELDRLSEESVNNDISSWTKGRSGEALSLLKKRFSHRPVQEKFVCLNCGFETHADEQAALNIARSWLFLRSQEYKKYQTNKTTGNTDKRAFVETWQSFYRKKLKEVWKPAV

SEQ ID NO: 35197 - protein, 977 aa, synthetic construct
  REGION 1..977: note = engineered CasX variant
QEIKRINKIRRRLVKDSNTKKAGKTGPMKTLLVRVMTPDLRERLENLRKKPENIPQPISNTSRANLNKLLTDYTEMKKAILHVYWEEFQKDPVGLMSRVAQPASKKIDQNKLKPEMDEKGNLTTAGFACSQCGQPLFVYKLEQVSEKGKAYTNYFGRCNVAEHEKLILLSQLKPEKDSDEAVTYSLGKFGQRALDFYSIHVTKESTHPVKPLAQIAGNRYASPVGKALSDACMGTIASFLSKYQDIIIEHQKVVKGNQKRLESLRELAGKENLEYPSVTLPPQPHTKEGVDAYNEVIARVRMWVNLNLWQKLKLSRDDAKPLLRLKGFPSFPLVERQANEVDWWDMVCNVKKLINEKKEDGKVFWQNLAGYKRQEALRPYLSSEEDRKKGKKFARTQLGDLLLHLEKKHGEDWGKVYDEAWERIDKKVEGLSKHIKLEEERRSEDAQSKAALTDWLRAKASFVIEGLKEADKDEFCRCELKLQKWYGDLRGKPFAIEAENSILDISGFSKQYNCAFIWQKDGVKKLNLYLIINYFKGGKLRFKKIKPEAFEANRFYTVINKKSGEIVPMEVNFNFDDPNLIILPLAFGKRQGREFIWNDLLSLETGSLKLANGRVIEKTLYNRRTRQDEPALFVALTFERREVLDSSNIKPMNLIGVDRGENIPAVIALTDPEGCPLSRFKDSLGNPTHILRIGESYKEKQRTIQAKKEVEQRRAGGYSRKYASKAKNLADDMVRNTARDLLYYAVTQDAMLIFENLSRGFGRQGKRTFMAERQYTRMEDWLTAKLAYEGLPSKTYLSKTLAQYTSKTCSNCGFTITSADYDRVLEKLKKTATGWMTTINGKELKVEGQITYYNRYKRQNVVKDLSVELDRLSEESVNNDISSWTKGRSGEALSLLKKRFSHRPVQEKFVCLNCGFETHADEQAALNIARSWLFLRSQEYKKYQTNKTTGNTDKRAFVETWQSFYRKKLKEVWKPAV

SEQ ID NO: 35198 - protein, 979 aa, synthetic construct
  REGION 1..979: note = engineered CasX variant
QEIKRINKIRRRLVKDSNTKKAGKTGPMKTLLVRVMTPDLRERLENLRKKPENIPQPISNTSRANLNKLLTDYTEMKKAILHVYWEEFQKDPVGLMSRVAQPASKKIDQNKLKPEMDEKGNLTTAGFACSQCGQPLFVYKLEQVSEKGKAYTNYFGRCNVAEHEKLILLSQLKPEKDSDEAVTYSLGKFGQRALDFYSIHVTKESTHPVKPLAQIAGNRYASYPVGKALSDACMGTIASFLSKYQDIIIEHQKVVKGNQKRLESLRELAGKENLEYPSVTLPPQPHTKEGVDAYNEVIARVRMWVNLNLWQKLKLSRDDAKPLLRLKGFPSFPLVERQANEVDWWDMVCNVKKLINEKKEDGKVFWQNLAGYKRQEALRPYLSSEEDRKKGKKFARYQLGDLLLHLEKKHEGEDWGKVYDEAWERIDKKVEGLSKHIKLEEERRSEDAQSKAALTDWLRAKASFVIEGLKEADKDEFCRCELKLQKWYGDLRGKPFAIEAENSILDISGFSKQYNCAFIWQKDGVKKLNLYLIINYFKGGKLRFKKIKPEAFEANRFYTVINKKSGEIVPMEVNFNFDDPNLIILPLAFGKRQGREFIWNDLLSLETGSLKLANGRVIEKTLYNRRTRQDEPALFVALTFERREVLDSSNIKPMNLIGVDRGENIPAVIALTDPEGCPLSRFKDSLGNPTHILRIGESYKEKQRTIQAKKEVEQRRAGGYSRKYASKAKNLADDMVRNTARDLLYYAVTQDAMLIFENLSRGFGRQGKRTFMAERQYTRMEDWLTAKLAYEGLPSKTYLSKTLAQYTSKTCSNCGFTITSADYDRVLEKLKKTATGWMTTINGKELKVEGQITYYNRYKRQNVVKDLSVELDRLSEESVNNDISSWTKGRSGEALSLLKKRFSHRPVQEKFVCLNCGFETHADEQAALNIARSWLFLRSQEYKKYQTNKTTGNTDKRAFVETWQSFYRKKLKEVWKPAV

SEQ ID NO: 35199 - protein, 979 aa, synthetic construct
  REGION 1..979: note = engineered CasX variant
QEIKRINKIRRRLVKDSNTKKAGKTGPMKTLLVRVMTPDLRERLENLRKKPENIPQPISNTSRANLNKLLTDYTEMKKAILHVYWEEFQKDPVGLMSRVAQPASKKIDQNKLKPEMDEKGNLTTAGFACSQCGQPLFVYKLEQVSEKGKAYTNYFGRCNVAEHEKLILLSQLKPEKDSDEAVTYSLGKFGQRALDFYSIHVTKESTHPVKPLAQIAGNRYASHPVGKALSDACMGTIASFLSKYQDIIIEHQKVVKGNQKRLESLRELAGKENLEYPSVTLPPQPHTKEGVDAYNEVIARVRMWVNLNLWQKLKLSRDDAKPLLRLKGFPSFPLVERQANEVDWWDMVCNVKKLINEKKEDGKVFWQNLAGYKRQEALRPYLSSEEDRKKGKKFARYQLGDLLLHLEKKHEGEDWGKVYDEAWERIDKKVEGLSKHIKLEEERRSEDAQSKAALTDWLRAKASFVIEGLKEADKDEFCRCELKLQKWYGDLRGKPFAIEAENSILDISGFSKQYNCAFIWQKDGVKKLNLYLIINYFKGGKLRFKKIKPEAFEANRFYTVINKKSGEIVPMEVNFNFDDPNLIILPLAFGKRQGREFIWNDLLSLETGSLKLANGRVIEKTLYNRRTRQDEPALFVALTFERREVLDSSNIKPMNLIGVDRGENIPAVIALTDPEGCPLSRFKDSLGNPTHILRIGESYKEKQRTIQAKKEVEQRRAGGYSRKYASKAKNLADDMVRNTARDLLYYAVTQDAMLIFENLSRGFGRQGKRTFMAERQYTRMEDWLTAKLAYEGLPSKTYLSKTLAQYTSKTCSNCGFTITSADYDRVLEKLKKTATGWMTTINGKELKVEGQITYYNRYKRQNVVKDLSVELDRLSEESVNNDISSWTKGRSGEALSLLKKRFSHRPVQEKFVCLNCGFETHADEQAALNIARSWLFLRSQEYKKYQTNKTTGNTDKRAFVETWQSFYRKKLKEVWKPAV

SEQ ID NO: 35200 - protein, 979 aa, synthetic construct
  REGION 1..979: note = engineered CasX variant
QEIKRINKIRRRLVKDSNTKKAGKTGPMKTLLVRVMTPDLRERLENLRKKPENIPQPISNTSRANLNKLLTDYTEMKKAILHVYWEEFQKDPVGLMSRVAQPASKKIDQNKLKPEMDEKGNLTTAGFACSQCGQPLFVYKLEQVSEKGKAYTNYFGRCNVAEHEKLILLSQLKPEKDSDEAVTYSLGKFGQRALDFYSIHVTKESTHPVKPLAQIAGNRYASSPVGKALSDACMGTIASFLSKYQDIIIEHQKVVKGNQKRLESLRELAGKENLEYPSVTLPPQPHTKEGVDAYNEVIARVRMWVNLNLWQKLKLSRDDAKPLLRLKGFPSFPLVERQANEVDWWDMVCNVKKLINEKKEDGKVFWQNLAGYKRQEALRPYLSSEEDRKKGKKFARYQLGDLLLHLEKKHEGEDWGKVYDEAWERIDKKVEGLSKHIKLEEERRSEDAQSKAALTDWLRAKASFVIEGLKEADKDEFCRCELKLQKWYGDLRGKPFAIEAENSILDISGFSKQYNCAFIWQKDGVKKLNLYLIINYFKGGKLRFKKIKPEAFEANRFYTVINKKSGEIVPMEVNFNFDDPNLIILPLAFGKRQGREFIWNDLLSLETGSLKLANGRVIEKTLYNRRTRQDEPALFVALTFERREVLDSSNIKPMNLIGVDRGENIPAVIALTDPEGCPLSRFKDSLGNPTHILRIGESYKEKQRTIQAKKEVEQRRAGGYSRKYASKAKNLADDMVRNTARDLLYYAVTQDAMLIFENLSRGFGRQGKRTFMAERQYTRMEDWLTAKLAYEGLPSKTYLSKTLAQYTSKTCSNCGFTITSADYDRVLEKLKKTATGWMTTINGKELKVEGQITYYNRYKRQNVVKDLSVELDRLSEESVNNDISSWTKGRSGEALSLLKKRFSHRPVQEKFVCLNCGFETHADEQAALNIARSWLFLRSQEYKKYQTNKTTGNTDKRAFVETWQSFYRKKLKEVWKPAV

SEQ ID NO: 35201 - protein, 979 aa, synthetic construct
  REGION 1..979: note = engineered CasX variant
QEIKRINKIRRRLVKDSNTKKAGKTGPMKTLLVRVMTPDLRERLENLRKKPENIPQPISNTSRANLNKLLTDYTEMKKAILHVYWEEFQKDPVGLMSRVAQPASKKIDQNKLKPEMDEKGNLTTAGFACSQCGQPLFVYKLEQVSEKGKAYTNYFGRCNVAEHEKLILLSQLKPEKDSDEAVTYSLGKFGQRALDFYSIHVTKESTHPVKPLAQIAGNRYASTPVGKALSDACMGTIASFLSKYQDIIIEHQKVVKGNQKRLESLRELAGKENLEYPSVTLPPQPHTKEGVDAYNEVIARVRMWVNLNLWQKLKLSRDDAKPLLRLKGFPSFPLVERQANEVDWWDMVCNVKKLINEKKEDGKVFWQNLAGYKRQEALRPYLSSEEDRKKGKKFARYQLGDLLLHLEKKHEGEDWGKVYDEAWERIDKKVEGLSKHIKLEEERRSEDAQSKAALTDWLRAKASFVIEGLKEADKDEFCRCELKLQKWYGDLRGKPFAIEAENSILDISGFSKQYNCAFIWQKDGVKKLNLYLIINYFKGGKLRFKKIKPEAFEANRFYTVINKKSGEIVPMEVNFNFDDPNLIILPLAFGKRQGREFIWNDLLSLETGSLKLANGRVIEKTLYNRRTRQDEPALFVALTFERREVLDSSNIKPMNLIGVDRGENIPAVIALTDPEGCPLSRFKDSLGNPTHILRIGESYKEKQRTIQAKKEVEQRRAGGYSRKYASKAKNLADDMVRNTARDLLYYAVTQDAMLIFENLSRGFGRQGKRTFMAERQYTRMEDWLTAKLAYEGLPSKTYLSKTLAQYTSKTCSNCGFTITSADYDRVLEKLKKTATGWMTTINGKELKVEGQITYYNRYKRQNVVKDLSVELDRLSEESVNNDISSWTKGRSGEALSLLKKRFSHRPVQEKFVCLNCGFETHADEQAALNIARSWLFLRSQEYKKYQTNKTTGNTDKRAFVETWQSFYRKKLKEVWKPAV

SEQ ID NO: 35202 - protein, 979 aa, synthetic construct
  REGION 1..979: note = engineered CasX variant
QEIKRINKIRRRLVKDSNTKKAGKTGPMKTLLVRVMTPDLRERLENLRKKPENIPQPISNTSRANLNKLLTDYTEMKKAILHVYWEEFQKDPVGLMSRVAQPASKKIDQNKLKPEMDEKGNLTTAGFACSQCGQPLFVYKLEQVSEKGKAYTNYFGRCNVAEHEKLILLSQLKPEKDSDEAVTYSLGKFGQRALDFYSIHVTKESTHPVKPLAQIAGNRYASAPVGKALSDACMGTIASFLSKYQDIIIEHQKVVKGNQKRLESLRELAGKENLEYPSVTLPPQPHTKEGVDAYNEVIARVRMWVNLNLWQKLKLSRDDAKPLLRLKGFPSFPLVERQANEVDWWDMVCNVKKLINEKKEDGKVFWQNLAGYKRQEALRPYLSSEEDRKKGKKFARYQLGDLLLHLEKKHEGEDWGKVYDEAWERIDKKVEGLSKHIKLEEERRSEDAQSKAALTDWLRAKASFVIEGLKEADKDEFCRCELKLQKWYGDLRGKPFAIEAENSILDISGFSKQYNCAFIWQKDGVKKLNLYLIINYFKGGKLRFKKIKPEAFEANRFYTVINKKSGEIVPMEVNFNFDDPNLIILPLAFGKRQGREFIWNDLLSLETGSLKLANGRVIEKTLYNRRTRQDEPALFVALTFERREVLDSSNIKPMNLIGVDRGENIPAVIALTDPEGCPLSRFKDSLGNPTHILRIGESYKEKQRTIQAKKEVEQRRAGGYSRKYASKAKNLADDMVRNTARDLLYYAVTQDAMLIFENLSRGFGRQGKRTFMAERQYTRMEDWLTAKLAYEGLPSKTYLSKTLAQYTSKTCSNCGFTITSADYDRVLEKLKKTATGWMTTINGKELKVEGQITYYNRYKRQNVVKDLSVELDRLSEESVNNDISSWTKGRSGEALSLLKKRFSHRPVQEKFVCLNCGFETHADEQAALNIARSWLFLRSQEYKKYQTNKTTGNTDKRAFVETWQSFYRKKLKEVWKPAV

SEQ ID NO: 35203 - protein, 979 aa, synthetic construct
  REGION 1..979: note = engineered CasX variant
QEIKRINKIRRRLVKDSNTKKAGKTGPMKTLLVRVMTPDLRERLENLRKKPENIPQPISNTSRANLNKLLTDYTEMKKAILHVYWEEFQKDPVGLMSRVAQPASKKIDQNKLKPEMDEKGNLTTAGFACSQCGQPLFVYKLEQVSEKGKAYTNYFGRCNVAEHEKLILLSQLKPEKDSDEAVTYSLGKFGQRALDFYSIHVTKESTHPVKPLAQIAGNRYASVPVGKALSDACMGTIASFLSKYQDIIIEHQKVVKGNQKRLESLRELAGKENLEYPSVTLPPQPHTKEGVDAYNEVIARVRMWVNLNLWQKLKLSRDDAKPLLRLKGFPSFPLVERQANEVDWWDMVCNVKKLINEKKEDGKVFWQNLAGYKRQEALRPYLSSEEDRKKGKKFARYQLGDLLLHLEKKHEGEDWGKVYDEAWERIDKKVEGLSKHIKLEEERRSEDAQSKAALTDWLRAKASFVIEGLKEADKDEFCRCELKLQKWYGDLRGKPFAIEAENSILDISGFSKQYNCAFIWQKDGVKKLNLYLIINYFKGGKLRFKKIKPEAFEANRFYTVINKKSGEIVPMEVNFNFDDPNLIILPLAFGKRQGREFIWNDLLSLETGSLKLANGRVIEKTLYNRRTRQDEPALFVALTFERREVLDSSNIKPMNLIGVDRGENIPAVIALTDPEGCPLSRFKDSLGNPTHILRIGESYKEKQRTIQAKKEVEQRRAGGYSRKYASKAKNLADDMVRNTARDLLYYAVTQDAMLIFENLSRGFGRQGKRTFMAERQYTRMEDWLTAKLAYEGLPSKTYLSKTLAQYTSKTCSNCGFTITSADYDRVLEKLKKTATGWMTTINGKELKVEGQITYYNRYKRQNVVKDLSVELDRLSEESVNNDISSWTKGRSGEALSLLKKRFSHRPVQEKFVCLNCGFETHADEQAALNIARSWLFLRSQEYKKYQTNKTTGNTDKRAFVETWQSFYRKKLKEVWKPAV

SEQ ID NO: 35204 - protein, 979 aa, synthetic construct
  REGION 1..979: note = engineered CasX variant
QEIKRINKIRRRLVKDSNTKKAGKTGPMKTLLVRVMTPDLRERLENLRKKPENIPQPISNTSRANLNKLLTDYTEMKKAILHVYWEEFQKDPVGLMSRVAQPASKKIDQNKLKPEMDEKGNLTTAGFACSQCGQPLFVYKLEQVSEKGKAYTNYFGRCNVAEHEKLIKLSQLKPEKDSDEAVTYSLGKFGQRALDFYSIHVTKESTHPVKPLAQIAGNRYASGPVGKALSDACMGTIASFLSKYQDIIIEHQKVVKGNQKRLESLRELAGKENLEYPSVTLPPQPHTKEGVDAYNEVIARVRMWVNLNLWQKLKLSRDDAKPLLRLKGFPSFPLVERQANEVDWWDMVCNVKKLINEKKEDGKVFWQNLAGYKRQEALRPYLSSEEDRKKGKKFARYQLGDLLLHLEKKHEGEDWGKVYDEAWERIDKKVEGLSKHIKLEEERRSEDAQSKAALTDWLRAKASFVIEGLKEADKDEFCRCELKLQKWYGDLRGKPFAIEAENSILDISGFSKQYNCAFIWQKDGVKKLNLYLIINYFKGGKLRFKKIKPEAFEANRFYTVINKKSGEIVPMEVNFNFDDPNLIILPLAFGKRQGREFIWNDLLSLETGSLKLANGRVIEKTLYNRRTRQDEPALFVALTFERREVLDSSNIKPMNLIGVDRGENIPAVIALTDPEGCPLSRFKDSLGNPTHILRIGESYKEKQRTIQAKKEVEQRRAGGYSRKYASKAKNLADDMVRNTARDLLYYAVTQDAMLIFENLSRGFGRQGKRTFMAERQYTRMEDWLTAKLAYEGLPSKTYLSKTLAQYTSKTCSNCGFTITSADYDRVLEKLKKTATGWMTTINGKELKVEGQITYYNRYKRQNVVKDLSVELDRLSEESVNNDISSWTKGRSGEALSLLKKRFSHRPVQEKFVCLNCGFETHADEQAALNIARSWLFLRSQEYKKYQTNKTTGNTDKRAFVETWQSFYRKKLKEVWKPAV

SEQ ID NO: 35205 - protein, 978 aa, synthetic construct
  REGION 1..978: note = engineered CasX variant
QEIKRINKIRRRLVKDSNTKKAGKTGPMKTLLVRVMTPDLRERLENLRKKPENIPQPISNTSRANLNKLLTDYTEMKKAILHVYWEEFQKDPVGLMSRVAQPASKKIDQNKLKPEMDEKGNLTTAGFACSQCGQPLFVYKLEQVSEKGKAYTNYFGRCNVAEHEKLILLSQLKPEKDSDEAVTYSLGKFGQRALDFYSIHVTKESTHPVKPLAQIAGNRYASPVGKALSDACMGTIASFLSKYQDIIIEHQKVVKGNQKRLESLRELAGKENLEYPSVTLPPQPHTKEGVDAYNEVIARVRMWVNLNLWQKLKLSRDDAKPLLRLKGFPSFPLVERQANEVDWWDMVCNVKKLINEKKEDGKVFWQNLAGYKRQEALRPYLSSEEDRKKGKKFARYQLGDLLLHLEKKHEGEDWGKVYDEAWERIDKKVEGLSKHIKLEEERRSEDAQSKAALTDWLRAKASFVIEGLKEADKDEFCRCELKLQKWYGDLRGKPFAIEAENSILDISGFSKQYNCAFIWQKDGVKKLNLYLIINYFKGGKLRFKKIKPEAFEANRFYTVINKKSGEIVPMEVNFNFDDPNLIILPLAFGKRQGREFIWNDLLSLETGSLKLANGRVIEKTLYNRRTRQDEPALFVALTFERREVLDSSNIKPMNLIGVDRGENIPAVIALTDPEGCPLSRFKDSLGNPTHILRIGESYKEKQRTIQAKKEVEQRRAGGYSRKYASKAKNLADDMVRNTARDLLYYAVTQDAMLIFENLSRGFGRQGKRTFMAERQYTRMEDWLTAKLAYEGLPSKTYLSKTLAQYTSKTCSNCGFTITSADYDRVLEKLKKTATGWMTTINGKELKVEGQITYYNRYKRQNVVKDLSVELDRLSEESVNNDISSWTKGRSGEALSLLKKRFSHRPVQEKFVCLNCGFETHADEQAALNIARSWLFLRSQEYKKYQTNKTTGNTDKRAFVETWQSFYRKKLKEVWKPAV

SEQ ID NO: 35206 - protein, 978 aa, synthetic construct
  REGION 1..978: note = engineered CasX variant
QEIKRINKIRRRLVKDSNTKKAGKTGPMKTLLVRVMTPDLRERLENLRKKPENIPQPISNTSRANLNKLLTDYTEMKKAILHVYWEEFQKDPVGLMSRVAQPASKKIDQNKLKPEMDEKGNLTTAGFACSQCGQPLFVYKLEQVSEKGKAYTNYFGRCNVAEHEKLILLSQLKPEKDSDEAVTYSLGKFGQRALDFYSIHVTKESTHPVKPLAQIAGNRYASYPVGKALSDACMGTIASFLSKYQDIIIEHQKVVKGNQKRLESLRELAGKENLEYPSVTLPPQPHTKEGVDAYNEVIARVRMWVNLNLWQKLKLSRDDAKPLLRLKGFPSFPLVERQANEVDWWDMVCNVKKLINEKKEDGKVFWQNLAGYKRQEALRPYLSSEEDRKKGKKFARYQLGDLLLHLEKKHGEDWGKVYDEAWERIDKKVEGLSKHIKLEEERRSEDAQSKAALTDWLRAKASFVIEGLKEADKDEFCRCDLKLQKWYGDLRGKPFAIEAENSILDISGFSKQYNCAFIWQKDGVKKLNLYLIINYFKGGKLRFKKIKPEAFEANRFYTVINKKSGEIVPMEVNFNFDDPNLIILPLAFGKRQGREFIWNDLLSLETGSLKLANGRVIEKTLYNRRTRQDEPALFVALTFERREVLDSSNIKPMNLIGVDRGENIPAVIALTDPEGCPLSRFKDSLGNPTHILRIGESYKEKQRTIQAKKEVEQRRAGGYSRKYASKAKNLADDMVRNTARDLLYYAVTQDAMLIFENLSRGFGRQGKRTFMAERQYTRMEDWLTAKLAYEGLPSKTYLSKTLAQYTSKTCSNCGFTITSADYDRVLEKLKKTATGWMTTINGKELKVEGQITYYNRYKRQNVVKDLSVELDRLSEESVNNDISSWTKGRSGEALSLLKKRFSHRPVQEKFVCLNCGFETHADEQAALNIARSWLFLRSQEYKKYQTNKTTGNTDKRAFVETWQSFYRKKLKEVWKPAV

SEQ ID NO: 35207 - protein, 978 aa, synthetic construct
  REGION 1..978: note = engineered CasX variant
QEIKRINKIRRRLVKDSNTKKAGKTGPMKTLLVRVMTPDLRERLENLRKKPENIPQPISNTSRANLNKLLTDYTEMKKAILHVYWEEFQKDPVGLMSRVAQPASKKIDQNKLKPEMDEKGNLTTAGFACSQCGQPLFVYKLEQVSEKGKAYTNYFGRCNVAEHEKLILLSQLKPEKDSDEAVTYSLGKFGQRALDFYSIHVTKESTHPVKPLAQIAGNRYASHPVGKALSDACMGTIASFLSKYQDIIIEHQKVVKGNQKRLESLRELAGKENLEYPSVTLPPQPHTKEGVDAYNEVIARVRMWVNLNLWQKLKLSRDDAKPLLRLKGFPSFPLVERQANEVDWWDMVCNVKKLINEKKEDGKVFWQNLAGYKRQEALRPYLSSEEDRKKGKKFARYQLGDLLLHLEKKHGEDWGKVYDEAWERIDKKVEGLSKHIKLEEERRSEDAQSKAALTDWLRAKASFVIEGLKEADKDEFCRCDLKLQKWYGDLRGKPFAIEAENSILDISGFSKQYNCAFIWQKDGVKKLNLYLIINYFKGGKLRFKKIKPEAFEANRFYTVINKKSGEIVPMEVNFNFDDPNLIILPLAFGKRQGREFIWNDLLSLETGSLKLANGRVIEKTLYNRRTRQDEPALFVALTFERREVLDSSNIKPMNLIGVDRGENIPAVIALTDPEGCPLSRFKDSLGNPTHILRIGESYKEKQRTIQAKKEVEQRRAGGYSRKYASKAKNLADDMVRNTARDLLYYAVTQDAMLIFENLSRGFGRQGKRTFMAERQYTRMEDWLTAKLAYEGLPSKTYLSKTLAQYTSKTCSNCGFTITSADYDRVLEKLKKTATGWMTTINGKELKVEGQITYYNRYKRQNVVKDLSVELDRLSEESVNNDISSWTKGRSGEALSLLKKRFSHRPVQEKFVCLNCGFETHADEQAALNIARSWLFLRSQEYKKYQTNKTTGNTDKRAFVETWQSFYRKKLKEVWKPAV

SEQ ID NO: 35208 - protein, 978 aa, synthetic construct
  REGION 1..978: note = engineered CasX variant
QEIKRINKIRRRLVKDSNTKKAGKTGPMKTLLVRVMTPDLRERLENLRKKPENIPQPISNTSRANLNKLLTDYTEMKKAILHVYWEEFQKDPVGLMSRVAQPASKKIDQNKLKPEMDEKGNLTTAGFACSQCGQPLFVYKLEQVSEKGKAYTNYFGRCNVAEHEKLILLSQLKPEKDSDEAVTYSLGKFGQRALDFYSIHVTKESTHPVKPLAQIAGNRYASSPVGKALSDACMGTIASFLSKYQDIIIEHQKVVKGNQKRLESLRELAGKENLEYPSVTLPPQPHTKEGVDAYNEVIARVRMWVNLNLWQKLKLSRDDAKPLLRLKGFPSFPLVERQANEVDWWDMVCNVKKLINEKKEDGKVFWQNLAGYKRQEALRPYLSSEEDRKKGKKFARYQLGDLLLHLEKKHGEDWGKVYDEAWERIDKKVEGLSKHIKLEEERRSEDAQSKAALTDWLRAKASFVIEGLKEADKDEFCRCDLKLQKWYGDLRGKPFAIEAENSILDISGFSKQYNCAFIWQKDGVKKLNLYLIINYFKGGKLRFKKIKPEAFEANRFYTVINKKSGEIVPMEVNFNFDDPNLIILPLAFGKRQGREFIWNDLLSLETGSLKLANGRVIEKTLYNRRTRQDEPALFVALTFERREVLDSSNIKPMNLIGVDRGENIPAVIALTDPEGCPLSRFKDSLGNPTHILRIGESYKEKQRTIQAKKEVEQRRAGGYSRKYASKAKNLADDMVRNTARDLLYYAVTQDAMLIFENLSRGFGRQGKRTFMAERQYTRMEDWLTAKLAYEGLPSKTYLSKTLAQYTSKTCSNCGFTITSADYDRVLEKLKKTATGWMTTINGKELKVEGQITYYNRYKRQNVVKDLSVELDRLSEESVNNDISSWTKGRSGEALSLLKKRFSHRPVQEKFVCLNCGFETHADEQAALNIARSWLFLRSQEYKKYQTNKTTGNTDKRAFVETWQSFYRKKLKEVWKPAV

SEQ ID NO: 35209 - protein, 978 aa, synthetic construct
  REGION 1..978: note = engineered CasX variant
QEIKRINKIRRRLVKDSNTKKAGKTGPMKTLLVRVMTPDLRERLENLRKKPENIPQPISNTSRANLNKLLTDYTEMKKAILHVYWEEFQKDPVGLMSRVAQPASKKIDQNKLKPEMDEKGNLTTAGFACSQCGQPLFVYKLEQVSEKGKAYTNYFGRCNVAEHEKLILLSQLKPEKDSDEAVTYSLGKFGQRALDFYSIHVTKESTHPVKPLAQIAGNRYASTPVGKALSDACMGTIASFLSKYQDIIIEHQKVVKGNQKRLESLRELAGKENLEYPSVTLPPQPHTKEGVDAYNEVIARVRMWVNLNLWQKLKLSRDDAKPLLRLKGFPSFPLVERQANEVDWWDMVCNVKKLINEKKEDGKVFWQNLAGYKRQEALRPYLSSEEDRKKGKKFARYQLGDLLLHLEKKHGEDWGKVYDEAWERIDKKVEGLSKHIKLEEERRSEDAQSKAALTDWLRAKASFVIEGLKEADKDEFCRCDLKLQKWYGDLRGKPFAIEAENSILDISGFSKQYNCAFIWQKDGVKKLNLYLIINYFKGGKLRFKKIKPEAFEANRFYTVINKKSGEIVPMEVNFNFDDPNLIILPLAFGKRQGREFIWNDLLSLETGSLKLANGRVIEKTLYNRRTRQDEPALFVALTFERREVLDSSNIKPMNLIGVDRGENIPAVIALTDPEGCPLSRFKDSLGNPTHILRIGESYKEKQRTIQAKKEVEQRRAGGYSRKYASKAKNLADDMVRNTARDLLYYAVTQDAMLIFENLSRGFGRQGKRTFMAERQYTRMEDWLTAKLAYEGLPSKTYLSKTLAQYTSKTCSNCGFTITSADYDRVLEKLKKTATGWMTTINGKELKVEGQITYYNRYKRQNVVKDLSVELDRLSEESVNNDISSWTKGRSGEALSLLKKRFSHRPVQEKFVCLNCGFETHADEQAALNIARSWLFLRSQEYKKYQTNKTTGNTDKRAFVETWQSFYRKKLKEVWKPAV

SEQ ID NO: 35210 - protein, 978 aa, synthetic construct
  REGION 1..978: note = engineered CasX variant
QEIKRINKIRRRLVKDSNTKKAGKTGPMKTLLVRVMTPDLRERLENLRKKPENIPQPISNTSRANLNKLLTDYTEMKKAILHVYWEEFQKDPVGLMSRVAQPASKKIDQNKLKPEMDEKGNLTTAGFACSQCGQPLFVYKLEQVSEKGKAYTNYFGRCNVAEHEKLILLSQLKPEKDSDEAVTYSLGKFGQRALDFYSIHVTKESTHPVKPLAQIAGNRYASAPVGKALSDACMGTIASFLSKYQDIIIEHQKVVKGNQKRLESLRELAGKENLEYPSVTLPPQPHTKEGVDAYNEVIARVRMWVNLNLWQKLKLSRDDAKPLLRLKGFPSFPLVERQANEVDWWDMVCNVKKLINEKKEDGKVFWQNLAGYKRQEALRPYLSSEEDRKKGKKFARYQLGDLLLHLEKKHGEDWGKVYDEAWERIDKKVEGLSKHIKLEEERRSEDAQSKAALTDWLRAKASFVIEGLKEADKDEFCRCDLKLQKWYGDLRGKPFAIEAENSILDISGFSKQYNCAFIWQKDGVKKLNLYLIINYFKGGKLRFKKIKPEAFEANRFYTVINKKSGEIVPMEVNFNFDDPNLIILPLAFGKRQGREFIWNDLLSLETGSLKLANGRVIEKTLYNRRTRQDEPALFVALTFERREVLDSSNIKPMNLIGVDRGENIPAVIALTDPEGCPLSRFKDSLGNPTHILRIGESYKEKQRTIQAKKEVEQRRAGGYSRKYASKAKNLADDMVRNTARDLLYYAVTQDAMLIFENLSRGFGRQGKRTFMAERQYTRMEDWLTAKLAYEGLPSKTYLSKTLAQYTSKTCSNCGFTITSADYDRVLEKLKKTATGWMTTINGKELKVEGQITYYNRYKRQNVVKDLSVELDRLSEESVNNDISSWTKGRSGEALSLLKKRFSHRPVQEKFVCLNCGFETHADEQAALNIARSWLFLRSQEYKKYQTNKTTGNTDKRAFVETWQSFYRKKLKEVWKPAV

SEQ ID NO: 35211 - protein, 978 aa, synthetic construct
  REGION 1..978: note = engineered CasX variant
QEIKRINKIRRRLVKDSNTKKAGKTGPMKTLLVRVMTPDLRERLENLRKKPENIPQPISNTSRANLNKLLTDYTEMKKAILHVYWEEFQKDPVGLMSRVAQPASKKIDQNKLKPEMDEKGNLTTAGFACSQCGQPLFVYKLEQVSEKGKAYTNYFGRCNVAEHEKLILLSQLKPEKDSDEAVTYSLGKFGQRALDFYSIHVTKESTHPVKPLAQIAGNRYASVPVGKALSDACMGTIASFLSKYQDIIIEHQKVVKGNQKRLESLRELAGKENLEYPSVTLPPQPHTKEGVDAYNEVIARVRMWVNLNLWQKLKLSRDDAKPLLRLKGFPSFPLVERQANEVDWWDMVCNVKKLINEKKEDGKVFWQNLAGYKRQEALRPYLSSEEDRKKGKKFARYQLGDLLLHLEKKHGEDWGKVYDEAWERIDKKVEGLSKHIKLEEERRSEDAQSKAALTDWLRAKASFVIEGLKEADKDEFCRCDLKLQKWYGDLRGKPFAIEAENSILDISGFSKQYNCAFIWQKDGVKKLNLYLIINYFKGGKLRFKKIKPEAFEANRFYTVINKKSGEIVPMEVNFNFDDPNLIILPLAFGKRQGREFIWNDLLSLETGSLKLANGRVIEKTLYNRRTRQDEPALFVALTFERREVLDSSNIKPMNLIGVDRGENIPAVIALTDPEGCPLSRFKDSLGNPTHILRIGESYKEKQRTIQAKKEVEQRRAGGYSRKYASKAKNLADDMVRNTARDLLYYAVTQDAMLIFENLSRGFGRQGKRTFMAERQYTRMEDWLTAKLAYEGLPSKTYLSKTLAQYTSKTCSNCGFTITSADYDRVLEKLKKTATGWMTTINGKELKVEGQITYYNRYKRQNVVKDLSVELDRLSEESVNNDISSWTKGRSGEALSLLKKRFSHRPVQEKFVCLNCGFETHADEQAALNIARSWLFLRSQEYKKYQTNKTTGNTDKRAFVETWQSFYRKKLKEVWKPAV

SEQ ID NO: 35212 - protein, 978 aa, synthetic construct
  REGION 1..978: note = engineered CasX variant
QEIKRINKIRRRLVKDSNTKKAGKTGPMKTLLVRVMTPDLRERLENLRKKPENIPQPISNTSRANLNKLLTDYTEMKKAILHVYWEEFQKDPVGLMSRVAQPASKKIDQNKLKPEMDEKGNLTTAGFACSQCGQPLFVYKLEQVSEKGKAYTNYFGRCNVAEHEKLIKLSQLKPEKDSDEAVTYSLGKFGQRALDFYSIHVTKESTHPVKPLAQIAGNRYASGPVGKALSDACMGTIASFLSKYQDIIIEHQKVVKGNQKRLESLRELAGKENLEYPSVTLPPQPHTKEGVDAYNEVIARVRMWVNLNLWQKLKLSRDDAKPLLRLKGFPSFPLVERQANEVDWWDMVCNVKKLINEKKEDGKVFWQNLAGYKRQEALRPYLSSEEDRKKGKKFARYQLGDLLLHLEKKHGEDWGKVYDEAWERIDKKVEGLSKHIKLEEERRSEDAQSKAALTDWLRAKASFVIEGLKEADKDEFCRCDLKLQKWYGDLRGKPFAIEAENSILDISGFSKQYNCAFIWQKDGVKKLNLYLIINYFKGGKLRFKKIKPEAFEANRFYTVINKKSGEIVPMEVNFNFDDPNLIILPLAFGKRQGREFIWNDLLSLETGSLKLANGRVIEKTLYNRRTRQDEPALFVALTFERREVLDSSNIKPMNLIGVDRGENIPAVIALTDPEGCPLSRFKDSLGNPTHILRIGESYKEKQRTIQAKKEVEQRRAGGYSRKYASKAKNLADDMVRNTARDLLYYAVTQDAMLIFENLSRGFGRQGKRTFMAERQYTRMEDWLTAKLAYEGLPSKTYLSKTLAQYTSKTCSNCGFTITSADYDRVLEKLKKTATGWMTTINGKELKVEGQITYYNRYKRQNVVKDLSVELDRLSEESVNNDISSWTKGRSGEALSLLKKRFSHRPVQEKFVCLNCGFETHADEQAALNIARSWLFLRSQEYKKYQTNKTTGNTDKRAFVETWQSFYRKKLKEVWKPAV

SEQ ID NO: 35213 - protein, 977 aa, synthetic construct
  REGION 1..977: note = engineered CasX variant
QEIKRINKIRRRLVKDSNTKKAGKTGPMKTLLVRVMTPDLRERLENLRKKPENIPQPISNTSRANLNKLLTDYTEMKKAILHVYWEEFQKDPVGLMSRVAQPASKKIDQNKLKPEMDEKGNLTTAGFACSQCGQPLFVYKLEQVSEKGKAYTNYFGRCNVAEHEKLILLSQLKPEKDSDEAVTYSLGKFGQRALDFYSIHVTKESTHPVKPLAQIAGNRYASPVGKALSDACMGTIASFLSKYQDIIIEHQKVVKGNQKRLESLRELAGKENLEYPSVTLPPQPHTKEGVDAYNEVIARVRMWVNLNLWQKLKLSRDDAKPLLRLKGFPSFPLVERQANEVDWWDMVCNVKKLINEKKEDGKVFWQNLAGYKRQEALRPYLSSEEDRKKGKKFARYQLGDLLLHLEKKHGEDWGKVYDEAWERIDKKVEGLSKHIKLEEERRSEDAQSKAALTDWLRAKASFVIEGLKEADKDEFCRCDLKLQKWYGDLRGKPFAIEAENSILDISGFSKQYNCAFIWQKDGVKKLNLYLIINYFKGGKLRFKKIKPEAFEANRFYTVINKKSGEIVPMEVNFNFDDPNLIILPLAFGKRQGREFIWNDLLSLETGSLKLANGRVIEKTLYNRRTRQDEPALFVALTFERREVLDSSNIKPMNLIGVDRGENIPAVIALTDPEGCPLSRFKDSLGNPTHILRIGESYKEKQRTIQAKKEVEQRRAGGYSRKYASKAKNLADDMVRNTARDLLYYAVTQDAMLIFENLSRGFGRQGKRTFMAERQYTRMEDWLTAKLAYEGLPSKTYLSKTLAQYTSKTCSNCGFTITSADYDRVLEKLKKTATGWMTTINGKELKVEGQITYYNRYKRQNVVKDLSVELDRLSEESVNNDISSWTKGRSGEALSLLKKRFSHRPVQEKFVCLNCGFETHADEQAALNIARSWLFLRSQEYKKYQTNKTTGNTDKRAFVETWQSFYRKKLKEVWKPAV

SEQ ID NO: 35214 - protein, 978 aa, synthetic construct
  REGION 1..978: note = engineered CasX variant
QEIKRINKIRRRLVKDSNTKKAGKTGPMKTLLVRVMTPDLRERLENLRKKPENIPQPISNTSRANLNKLLTDYTEMKKAILHVYWEEFQKDPVGLMSRVAQPASKKIDQNKLKPEMDEKGNLTTAGFACSQCGQPLFVYKLEQVSEKGKAYTNYFGRCNVAEHEKLILLSQLKPEKDSDEAVTYSLGKFGQRALDFYSIHVTKESTHPVKPLAQIAGNRYASYPVGKALSDACMGTIASFLSKYQDIIIEHQKVVKGNQKRLESLRELAGKENLEYPSVTLPPQPHTKEGVDAYNEVIARVRMWVNLNLWQKLKLSRDDAKPLLRLKGFPSFPLVERQANEVDWWDMVCNVKKLINEKKEDGKVFWQNLAGYKRQEALRPYLSSEEDRKKGKKFARYQLGDLLLHLEKKHGEDWGKVYDEAWERIDKKVEGLSKHIKLEEERRSEDAQSKAALTDWLRAKASFVIEGLKEADKDEFCRCELKLQKWYGDLRGKPFAIEAENSILDISGFSKQYNCAFIWQKDGVKKLNLYLIINYFKGGKLRFKKIKPEAFEANRFYTVINKKSGEIVPMEVNFNFDDPNLIILPLAFGKRFGREFIWNDLLSLETGSLKLANGRVIEKTLYNRRTRQDEPALFVALTFERREVLDSSNIKPMNLIGVDRGENIPAVIALTDPEGCPLSRFKDSLGNPTHILRIGESYKEKQRTIQAKKEVEQRRAGGYSRKYASKAKNLADDMVRNTARDLLYYAVTQDAMLIFENLSRGFGRQGKRTFMAERQYTRMEDWLTAKLAYEGLPSKTYLSKTLAQYTSKTCSNCGFTITSADYDRVLEKLKKTATGWMTTINGKELKVEGQITYYNRYKRQNVVKDLSVELDRLSEESVNNDISSWTKGRSGEALSLLKKRFSHRPVQEKFVCLNCGFETHADEQAALNIARSWLFLRSQEYKKYQTNKTTGNTDKRAFVETWQSFYRKKLKEVWKPAV

SEQ ID NO: 35215 - protein, 978 aa, synthetic construct
  REGION 1..978: note = engineered CasX variant
QEIKRINKIRRRLVKDSNTKKAGKTGPMKTLLVRVMTPDLRERLENLRKKPENIPQPISNTSRANLNKLLTDYTEMKKAILHVYWEEFQKDPVGLMSRVAQPASKKIDQNKLKPEMDEKGNLTTAGFACSQCGQPLFVYKLEQVSEKGKAYTNYFGRCNVAEHEKLILLSQLKPEKDSDEAVTYSLGKFGQRALDFYSIHVTKESTHPVKPLAQIAGNRYASHPVGKALSDACMGTIASFLSKYQDIIIEHQKVVKGNQKRLESLRELAGKENLEYPSVTLPPQPHTKEGVDAYNEVIARVRMWVNLNLWQKLKLSRDDAKPLLRLKGFPSFPLVERQANEVDWWDMVCNVKKLINEKKEDGKVFWQNLAGYKRQEALRPYLSSEEDRKKGKKFARYQLGDLLLHLEKKHGEDWGKVYDEAWERIDKKVEGLSKHIKLEEERRSEDAQSKAALTDWLRAKASFVIEGLKEADKDEFCRCELKLQKWYGDLRGKPFAIEAENSILDISGFSKQYNCAFIWQKDGVKKLNLYLIINYFKGGKLRFKKIKPEAFEANRFYTVINKKSGEIVPMEVNFNFDDPNLIILPLAFGKRFGREFIWNDLLSLETGSLKLANGRVIEKTLYNRRTRQDEPALFVALTFERREVLDSSNIKPMNLIGVDRGENIPAVIALTDPEGCPLSRFKDSLGNPTHILRIGESYKEKQRTIQAKKEVEQRRAGGYSRKYASKAKNLADDMVRNTARDLLYYAVTQDAMLIFENLSRGFGRQGKRTFMAERQYTRMEDWLTAKLAYEGLPSKTYLSKTLAQYTSKTCSNCGFTITSADYDRVLEKLKKTATGWMTTINGKELKVEGQITYYNRYKRQNVVKDLSVELDRLSEESVNNDISSWTKGRSGEALSLLKKRFSHRPVQEKFVCLNCGFETHADEQAALNIARSWLFLRSQEYKKYQTNKTTGNTDKRAFVETWQSFYRKKLKEVWKPAV

SEQ ID NO: 35216 - protein, 978 aa, synthetic construct
  REGION 1..978: note = engineered CasX variant
QEIKRINKIRRRLVKDSNTKKAGKTGPMKTLLVRVMTPDLRERLENLRKKPENIPQPISNTSRANLNKLLTDYTEMKKAILHVYWEEFQKDPVGLMSRVAQPASKKIDQNKLKPEMDEKGNLTTAGFACSQCGQPLFVYKLEQVSEKGKAYTNYFGRCNVAEHEKLILLSQLKPEKDSDEAVTYSLGKFGQRALDFYSIHVTKESTHPVKPLAQIAGNRYASSPVGKALSDACMGTIASFLSKYQDIIIEHQKVVKGNQKRLESLRELAGKENLEYPSVTLPPQPHTKEGVDAYNEVIARVRMWVNLNLWQKLKLSRDDAKPLLRLKGFPSFPLVERQANEVDWWDMVCNVKKLINEKKEDGKVFWQNLAGYKRQEALRPYLSSEEDRKKGKKFARYQLGDLLLHLEKKHGEDWGKVYDEAWERIDKKVEGLSKHIKLEEERRSEDAQSKAALTDWLRAKASFVIEGLKEADKDEFCRCELKLQKWYGDLRGKPFAIEAENSILDISGFSKQYNCAFIWQKDGVKKLNLYLIINYFKGGKLRFKKIKPEAFEANRFYTVINKKSGEIVPMEVNFNFDDPNLIILPLAFGKRFGREFIWNDLLSLETGSLKLANGRVIEKTLYNRRTRQDEPALFVALTFERREVLDSSNIKPMNLIGVDRGENIPAVIALTDPEGCPLSRFKDSLGNPTHILRIGESYKEKQRTIQAKKEVEQRRAGGYSRKYASKAKNLADDMVRNTARDLLYYAVTQDAMLIFENLSRGFGRQGKRTFMAERQYTRMEDWLTAKLAYEGLPSKTYLSKTLAQYTSKTCSNCGFTITSADYDRVLEKLKKTATGWMTTINGKELKVEGQITYYNRYKRQNVVKDLSVELDRLSEESVNNDISSWTKGRSGEALSLLKKRFSHRPVQEKFVCLNCGFETHADEQAALNIARSWLFLRSQEYKKYQTNKTTGNTDKRAFVETWQSFYRKKLKEVWKPAV

SEQ ID NO: 35217 - protein, 978 aa, synthetic construct
  REGION 1..978: note = engineered CasX variant
QEIKRINKIRRRLVKDSNTKKAGKTGPMKTLLVRVMTPDLRERLENLRKKPENIPQPISNTSRANLNKLLTDYTEMKKAILHVYWEEFQKDPVGLMSRVAQPASKKIDQNKLKPEMDEKGNLTTAGFACSQCGQPLFVYKLEQVSEKGKAYTNYFGRCNVAEHEKLILLSQLKPEKDSDEAVTYSLGKFGQRALDFYSIHVTKESTHPVKPLAQIAGNRYASTPVGKALSDACMGTIASFLSKYQDIIIEHQKVVKGNQKRLESLRELAGKENLEYPSVTLPPQPHTKEGVDAYNEVIARVRMWVNLNLWQKLKLSRDDAKPLLRLKGFPSFPLVERQANEVDWWDMVCNVKKLINEKKEDGKVFWQNLAGYKRQEALRPYLSSEEDRKKGKKFARYQLGDLLLHLEKKHGEDWGKVYDEAWERIDKKVEGLSKHIKLEEERRSEDAQSKAALTDWLRAKASFVIEGLKEADKDEFCRCELKLQKWYGDLRGKPFAIEAENSILDISGFSKQYNCAFIWQKDGVKKLNLYLIINYFKGGKLRFKKIKPEAFEANRFYTVINKKSGEIVPMEVNFNFDDPNLIILPLAFGKRFGREFIWNDLLSLETGSLKLANGRVIEKTLYNRRTRQDEPALFVALTFERREVLDSSNIKPMNLIGVDRGENIPAVIALTDPEGCPLSRFKDSLGNPTHILRIGESYKEKQRTIQAKKEVEQRRAGGYSRKYASKAKNLADDMVRNTARDLLYYAVTQDAMLIFENLSRGFGRQGKRTFMAERQYTRMEDWLTAKLAYEGLPSKTYLSKTLAQYTSKTCSNCGFTITSADYDRVLEKLKKTATGWMTTINGKELKVEGQITYYNRYKRQNVVKDLSVELDRLSEESVNNDISSWTKGRSGEALSLLKKRFSHRPVQEKFVCLNCGFETHADEQAALNIARSWLFLRSQEYKKYQTNKTTGNTDKRAFVETWQSFYRKKLKEVWKPAV

SEQ ID NO: 35218 - protein, 978 aa, synthetic construct
  REGION 1..978: note = engineered CasX variant
QEIKRINKIRRRLVKDSNTKKAGKTGPMKTLLVRVMTPDLRERLENLRKKPENIPQPISNTSRANLNKLLTDYTEMKKAILHVYWEEFQKDPVGLMSRVAQPASKKIDQNKLKPEMDEKGNLTTAGFACSQCGQPLFVYKLEQVSEKGKAYTNYFGRCNVAEHEKLILLSQLKPEKDSDEAVTYSLGKFGQRALDFYSIHVTKESTHPVKPLAQIAGNRYASAPVGKALSDACMGTIASFLSKYQDIIIEHQKVVKGNQKRLESLRELAGKENLEYPSVTLPPQPHTKEGVDAYNEVIARVRMWVNLNLWQKLKLSRDDAKPLLRLKGFPSFPLVERQANEVDWWDMVCNVKKLINEKKEDGKVFWQNLAGYKRQEALRPYLSSEEDRKKGKKFARYQLGDLLLHLEKKHGEDWGKVYDEAWERIDKKVEGLSKHIKLEEERRSEDAQSKAALTDWLRAKASFVIEGLKEADKDEFCRCELKLQKWYGDLRGKPFAIEAENSILDISGFSKQYNCAFIWQKDGVKKLNLYLIINYFKGGKLRFKKIKPEAFEANRFYTVINKKSGEIVPMEVNFNFDDPNLIILPLAFGKRFGREFIWNDLLSLETGSLKLANGRVIEKTLYNRRTRQDEPALFVALTFERREVLDSSNIKPMNLIGVDRGENIPAVIALTDPEGCPLSRFKDSLGNPTHILRIGESYKEKQRTIQAKKEVEQRRAGGYSRKYASKAKNLADDMVRNTARDLLYYAVTQDAMLIFENLSRGFGRQGKRTFMAERQYTRMEDWLTAKLAYEGLPSKTYLSKTLAQYTSKTCSNCGFTITSADYDRVLEKLKKTATGWMTTINGKELKVEGQITYYNRYKRQNVVKDLSVELDRLSEESVNNDISSWTKGRSGEALSLLKKRFSHRPVQEKFVCLNCGFETHADEQAALNIARSWLFLRSQEYKKYQTNKTTGNTDKRAFVETWQSFYRKKLKEVWKPAV

SEQ ID NO: 35219 - protein, 978 aa, synthetic construct
  REGION 1..978: note = engineered CasX variant
QEIKRINKIRRRLVKDSNTKKAGKTGPMKTLLVRVMTPDLRERLENLRKKPENIPQPISNTSRANLNKLLTDYTEMKKAILHVYWEEFQKDPVGLMSRVAQPASKKIDQNKLKPEMDEKGNLTTAGFACSQCGQPLFVYKLEQVSEKGKAYTNYFGRCNVAEHEKLILLSQLKPEKDSDEAVTYSLGKFGQRALDFYSIHVTKESTHPVKPLAQIAGNRYASVPVGKALSDACMGTIASFLSKYQDIIIEHQKVVKGNQKRLESLRELAGKENLEYPSVTLPPQPHTKEGVDAYNEVIARVRMWVNLNLWQKLKLSRDDAKPLLRLKGFPSFPLVERQANEVDWWDMVCNVKKLINEKKEDGKVFWQNLAGYKRQEALRPYLSSEEDRKKGKKFARYQLGDLLLHLEKKHGEDWGKVYDEAWERIDKKVEGLSKHIKLEEERRSEDAQSKAALTDWLRAKASFVIEGLKEADKDEFCRCELKLQKWYGDLRGKPFAIEAENSILDISGFSKQYNCAFIWQKDGVKKLNLYLIINYFKGGKLRFKKIKPEAFEANRFYTVINKKSGEIVPMEVNFNFDDPNLIILPLAFGKRFGREFIWNDLLSLETGSLKLANGRVIEKTLYNRRTRQDEPALFVALTFERREVLDSSNIKPMNLIGVDRGENIPAVIALTDPEGCPLSRFKDSLGNPTHILRIGESYKEKQRTIQAKKEVEQRRAGGYSRKYASKAKNLADDMVRNTARDLLYYAVTQDAMLIFENLSRGFGRQGKRTFMAERQYTRMEDWLTAKLAYEGLPSKTYLSKTLAQYTSKTCSNCGFTITSADYDRVLEKLKKTATGWMTTINGKELKVEGQITYYNRYKRQNVVKDLSVELDRLSEESVNNDISSWTKGRSGEALSLLKKRFSHRPVQEKFVCLNCGFETHADEQAALNIARSWLFLRSQEYKKYQTNKTTGNTDKRAFVETWQSFYRKKLKEVWKPAV

SEQ ID NO: 35220 - protein, 978 aa, synthetic construct
  REGION 1..978: note = engineered CasX variant
QEIKRINKIRRRLVKDSNTKKAGKTGPMKTLLVRVMTPDLRERLENLRKKPENIPQPISNTSRANLNKLLTDYTEMKKAILHVYWEEFQKDPVGLMSRVAQPASKKIDQNKLKPEMDEKGNLTTAGFACSQCGQPLFVYKLEQVSEKGKAYTNYFGRCNVAEHEKLIKLSQLKPEKDSDEAVTYSLGKFGQRALDFYSIHVTKESTHPVKPLAQIAGNRYASGPVGKALSDACMGTIASFLSKYQDIIIEHQKVVKGNQKRLESLRELAGKENLEYPSVTLPPQPHTKEGVDAYNEVIARVRMWVNLNLWQKLKLSRDDAKPLLRLKGFPSFPLVERQANEVDWWDMVCNVKKLINEKKEDGKVFWQNLAGYKRQEALRPYLSSEEDRKKGKKFARYQLGDLLLHLEKKHGEDWGKVYDEAWERIDKKVEGLSKHIKLEEERRSEDAQSKAALTDWLRAKASFVIEGLKEADKDEFCRCELKLQKWYGDLRGKPFAIEAENSILDISGFSKQYNCAFIWQKDGVKKLNLYLIINYFKGGKLRFKKIKPEAFEANRFYTVINKKSGEIVPMEVNFNFDDPNLIILPLAFGKRFGREFIWNDLLSLETGSLKLANGRVIEKTLYNRRTRQDEPALFVALTFERREVLDSSNIKPMNLIGVDRGENIPAVIALTDPEGCPLSRFKDSLGNPTHILRIGESYKEKQRTIQAKKEVEQRRAGGYSRKYASKAKNLADDMVRNTARDLLYYAVTQDAMLIFENLSRGFGRQGKRTFMAERQYTRMEDWLTAKLAYEGLPSKTYLSKTLAQYTSKTCSNCGFTITSADYDRVLEKLKKTATGWMTTINGKELKVEGQITYYNRYKRQNVVKDLSVELDRLSEESVNNDISSWTKGRSGEALSLLKKRFSHRPVQEKFVCLNCGFETHADEQAALNIARSWLFLRSQEYKKYQTNKTTGNTDKRAFVETWQSFYRKKLKEVWKPAV

SEQ ID NO: 35221 - protein, 977 aa, synthetic construct
  REGION 1..977: note = engineered CasX variant
QEIKRINKIRRRLVKDSNTKKAGKTGPMKTLLVRVMTPDLRERLENLRKKPENIPQPISNTSRANLNKLLTDYTEMKKAILHVYWEEFQKDPVGLMSRVAQPASKKIDQNKLKPEMDEKGNLTTAGFACSQCGQPLFVYKLEQVSEKGKAYTNYFGRCNVAEHEKLILLSQLKPEKDSDEAVTYSLGKFGQRALDFYSIHVTKESTHPVKPLAQIAGNRYASPVGKALSDACMGTIASFLSKYQDIIIEHQKVVKGNQKRLESLRELAGKENLEYPSVTLPPQPHTKEGVDAYNEVIARVRMWVNLNLWQKLKLSRDDAKPLLRLKGFPSFPLVERQANEVDWWDMVCNVKKLINEKKEDGKVFWQNLAGYKRQEALRPYLSSEEDRKKGKKFARYQLGDLLLHLEKKHGEDWGKVYDEAWERIDKKVEGLSKHIKLEEERRSEDAQSKAALTDWLRAKASFVIEGLKEADKDEFCRCELKLQKWYGDLRGKPFAIEAENSILDISGFSKQYNCAFIWQKDGVKKLNLYLIINYFKGGKLRFKKIKPEAFEANRFYTVINKKSGEIVPMEVNFNFDDPNLIILPLAFGKRFGREFIWNDLLSLETGSLKLANGRVIEKTLYNRRTRQDEPALFVALTFERREVLDSSNIKPMNLIGVDRGENIPAVIALTDPEGCPLSRFKDSLGNPTHILRIGESYKEKQRTIQAKKEVEQRRAGGYSRKYASKAKNLADDMVRNTARDLLYYAVTQDAMLIFENLSRGFGRQGKRTFMAERQYTRMEDWLTAKLAYEGLPSKTYLSKTLAQYTSKTCSNCGFTITSADYDRVLEKLKKTATGWMTTINGKELKVEGQITYYNRYKRQNVVKDLSVELDRLSEESVNNDISSWTKGRSGEALSLLKKRFSHRPVQEKFVCLNCGFETHADEQAALNIARSWLFLRSQEYKKYQTNKTTGNTDKRAFVETWQSFYRKKLKEVWKPAV

SEQ ID NO: 35222 - protein, 978 aa, synthetic construct
  REGION 1..978: note = engineered CasX variant
QEIKRINKIRRRLVKDSNTKKAGKTGPMKTLLVRVMTPDLRERLENLRKKPENIPQPISNTSRANLNKLLTDYTEMKKAILHVYWEEFQKDPVGLMSRVAQPASKKIDQNKLKPEMDEKGNLTTAGFACSQCGQPLFVYKLEQVSEKGKAYTNYFGRCNVAEHEKLILLSQLKPEKDSDEAVTYSLGKFGQRALDFYSIHVTKESTHPVKPLAQIAGNRYASYPVGKALSDACMGTIASFLSKYQDIIIEHQKVVKGNQKRLESLRELAGKENLEYPSVTLPPQPHTKEGVDAYNEVIARVRMWVNLNLWQKLKLSRDDAKPLLRLKGFPSFPLVERQANEVDWWDMVCNVKKLINEKKEDGKVFWQNLAGYKRQEALRPYLSSEEDRKKGKKFARYQLGDLLLHLEKKHGEDWGKVYDEAWERIDKKVEGLSKHIKLEEERRSEDAQSKAALTDWLRAKASFVIEGLKEADKDEFCRCELKLQKWYGDLRGKPFAIEAENSILDISGFSKQYNCAFIWQKDGVKKLNLYLIINYFKGGKLRFKKIKPEAFEANRFYTVINKKSGEIVPMEVNFNFDDPNLIILPLAFGKRVGREFIWNDLLSLETGSLKLANGRVIEKTLYNRRTRQDEPALFVALTFERREVLDSSNIKPMNLIGVDRGENIPAVIALTDPEGCPLSRFKDSLGNPTHILRIGESYKEKQRTIQAKKEVEQRRAGGYSRKYASKAKNLADDMVRNTARDLLYYAVTQDAMLIFENLSRGFGRQGKRTFMAERQYTRMEDWLTAKLAYEGLPSKTYLSKTLAQYTSKTCSNCGFTITSADYDRVLEKLKKTATGWMTTINGKELKVEGQITYYNRYKRQNVVKDLSVELDRLSEESVNNDISSWTKGRSGEALSLLKKRFSHRPVQEKFVCLNCGFETHADEQAALNIARSWLFLRSQEYKKYQTNKTTGNTDKRAFVETWQSFYRKKLKEVWKPAV

SEQ ID NO: 35223 - protein, 978 aa, synthetic construct
  REGION 1..978: note = engineered CasX variant
QEIKRINKIRRRLVKDSNTKKAGKTGPMKTLLVRVMTPDLRERLENLRKKPENIPQPISNTSRANLNKLLTDYTEMKKAILHVYWEEFQKDPVGLMSRVAQPASKKIDQNKLKPEMDEKGNLTTAGFACSQCGQPLFVYKLEQVSEKGKAYTNYFGRCNVAEHEKLILLSQLKPEKDSDEAVTYSLGKFGQRALDFYSIHVTKESTHPVKPLAQIAGNRYASHPVGKALSDACMGTIASFLSKYQDIIIEHQKVVKGNQKRLESLRELAGKENLEYPSVTLPPQPHTKEGVDAYNEVIARVRMWVNLNLWQKLKLSRDDAKPLLRLKGFPSFPLVERQANEVDWWDMVCNVKKLINEKKEDGKVFWQNLAGYKRQEALRPYLSSEEDRKKGKKFARYQLGDLLLHLEKKHGEDWGKVYDEAWERIDKKVEGLSKHIKLEEERRSEDAQSKAALTDWLRAKASFVIEGLKEADKDEFCRCELKLQKWYGDLRGKPFAIEAENSILDISGFSKQYNCAFIWQKDGVKKLNLYLIINYFKGGKLRFKKIKPEAFEANRFYTVINKKSGEIVPMEVNFNFDDPNLIILPLAFGKRVGREFIWNDLLSLETGSLKLANGRVIEKTLYNRRTRQDEPALFVALTFERREVLDSSNIKPMNLIGVDRGENIPAVIALTDPEGCPLSRFKDSLGNPTHILRIGESYKEKQRTIQAKKEVEQRRAGGYSRKYASKAKNLADDMVRNTARDLLYYAVTQDAMLIFENLSRGFGRQGKRTFMAERQYTRMEDWLTAKLAYEGLPSKTYLSKTLAQYTSKTCSNCGFTITSADYDRVLEKLKKTATGWMTTINGKELKVEGQITYYNRYKRQNVVKDLSVELDRLSEESVNNDISSWTKGRSGEALSLLKKRFSHRPVQEKFVCLNCGFETHADEQAALNIARSWLFLRSQEYKKYQTNKTTGNTDKRAFVETWQSFYRKKLKEVWKPAV

SEQ ID NO: 35224 - protein, 978 aa, synthetic construct
  REGION 1..978: note = engineered CasX variant
QEIKRINKIRRRLVKDSNTKKAGKTGPMKTLLVRVMTPDLRERLENLRKKPENIPQPISNTSRANLNKLLTDYTEMKKAILHVYWEEFQKDPVGLMSRVAQPASKKIDQNKLKPEMDEKGNLTTAGFACSQCGQPLFVYKLEQVSEKGKAYTNYFGRCNVAEHEKLILLSQLKPEKDSDEAVTYSLGKFGQRALDFYSIHVTKESTHPVKPLAQIAGNRYASSPVGKALSDACMGTIASFLSKYQDIIIEHQKVVKGNQKRLESLRELAGKENLEYPSVTLPPQPHTKEGVDAYNEVIARVRMWVNLNLWQKLKLSRDDAKPLLRLKGFPSFPLVERQANEVDWWDMVCNVKKLINEKKEDGKVFWQNLAGYKRQEALRPYLSSEEDRKKGKKFARYQLGDLLLHLEKKHGEDWGKVYDEAWERIDKKVEGLSKHIKLEEERRSEDAQSKAALTDWLRAKASFVIEGLKEADKDEFCRCELKLQKWYGDLRGKPFAIEAENSILDISGFSKQYNCAFIWQKDGVKKLNLYLIINYFKGGKLRFKKIKPEAFEANRFYTVINKKSGEIVPMEVNFNFDDPNLIILPLAFGKRVGREFIWNDLLSLETGSLKLANGRVIEKTLYNRRTRQDEPALFVALTFERREVLDSSNIKPMNLIGVDRGENIPAVIALTDPEGCPLSRFKDSLGNPTHILRIGESYKEKQRTIQAKKEVEQRRAGGYSRKYASKAKNLADDMVRNTARDLLYYAVTQDAMLIFENLSRGFGRQGKRTFMAERQYTRMEDWLTAKLAYEGLPSKTYLSKTLAQYTSKTCSNCGFTITSADYDRVLEKLKKTATGWMTTINGKELKVEGQITYYNRYKRQNVVKDLSVELDRLSEESVNNDISSWTKGRSGEALSLLKKRFSHRPVQEKFVCLNCGFETHADEQAALNIARSWLFLRSQEYKKYQTNKTTGNTDKRAFVETWQSFYRKKLKEVWKPAV

SEQ ID NO: 35225 - protein, 978 aa, synthetic construct
  REGION 1..978: note = engineered CasX variant
QEIKRINKIRRRLVKDSNTKKAGKTGPMKTLLVRVMTPDLRERLENLRKKPENIPQPISNTSRANLNKLLTDYTEMKKAILHVYWEEFQKDPVGLMSRVAQPASKKIDQNKLKPEMDEKGNLTTAGFACSQCGQPLFVYKLEQVSEKGKAYTNYFGRCNVAEHEKLILLSQLKPEKDSDEAVTYSLGKFGQRALDFYSIHVTKESTHPVKPLAQIAGNRYASTPVGKALSDACMGTIASFLSKYQDIIIEHQKVVKGNQKRLESLRELAGKENLEYPSVTLPPQPHTKEGVDAYNEVIARVRMWVNLNLWQKLKLSRDDAKPLLRLKGFPSFPLVERQANEVDWWDMVCNVKKLINEKKEDGKVFWQNLAGYKRQEALRPYLSSEEDRKKGKKFARYQLGDLLLHLEKKHGEDWGKVYDEAWERIDKKVEGLSKHIKLEEERRSEDAQSKAALTDWLRAKASFVIEGLKEADKDEFCRCELKLQKWYGDLRGKPFAIEAENSILDISGFSKQYNCAFIWQKDGVKKLNLYLIINYFKGGKLRFKKIKPEAFEANRFYTVINKKSGEIVPMEVNFNFDDPNLIILPLAFGKRVGREFIWNDLLSLETGSLKLANGRVIEKTLYNRRTRQDEPALFVALTFERREVLDSSNIKPMNLIGVDRGENIPAVIALTDPEGCPLSRFKDSLGNPTHILRIGESYKEKQRTIQAKKEVEQRRAGGYSRKYASKAKNLADDMVRNTARDLLYYAVTQDAMLIFENLSRGFGRQGKRTFMAERQYTRMEDWLTAKLAYEGLPSKTYLSKTLAQYTSKTCSNCGFTITSADYDRVLEKLKKTATGWMTTINGKELKVEGQITYYNRYKRQNVVKDLSVELDRLSEESVNNDISSWTKGRSGEALSLLKKRFSHRPVQEKFVCLNCGFETHADEQAALNIARSWLFLRSQEYKKYQTNKTTGNTDKRAFVETWQSFYRKKLKEVWKPAV

SEQ ID NO: 35226 - protein, 978 aa, synthetic construct
  REGION 1..978: note = engineered CasX variant
QEIKRINKIRRRLVKDSNTKKAGKTGPMKTLLVRVMTPDLRERLENLRKKPENIPQPISNTSRANLNKLLTDYTEMKKAILHVYWEEFQKDPVGLMSRVAQPASKKIDQNKLKPEMDEKGNLTTAGFACSQCGQPLFVYKLEQVSEKGKAYTNYFGRCNVAEHEKLILLSQLKPEKDSDEAVTYSLGKFGQRALDFYSIHVTKESTHPVKPLAQIAGNRYASAPVGKALSDACMGTIASFLSKYQDIIIEHQKVVKGNQKRLESLRELAGKENLEYPSVTLPPQPHTKEGVDAYNEVIARVRMWVNLNLWQKLKLSRDDAKPLLRLKGFPSFPLVERQANEVDWWDMVCNVKKLINEKKEDGKVFWQNLAGYKRQEALRPYLSSEEDRKKGKKFARYQLGDLLLHLEKKHGEDWGKVYDEAWERIDKKVEGLSKHIKLEEERRSEDAQSKAALTDWLRAKASFVIEGLKEADKDEFCRCELKLQKWYGDLRGKPFAIEAENSILDISGFSKQYNCAFIWQKDGVKKLNLYLIINYFKGGKLRFKKIKPEAFEANRFYTVINKKSGEIVPMEVNFNFDDPNLIILPLAFGKRVGREFIWNDLLSLETGSLKLANGRVIEKTLYNRRTRQDEPALFVALTFERREVLDSSNIKPMNLIGVDRGENIPAVIALTDPEGCPLSRFKDSLGNPTHILRIGESYKEKQRTIQAKKEVEQRRAGGYSRKYASKAKNLADDMVRNTARDLLYYAVTQDAMLIFENLSRGFGRQGKRTFMAERQYTRMEDWLTAKLAYEGLPSKTYLSKTLAQYTSKTCSNCGFTITSADYDRVLEKLKKTATGWMTTINGKELKVEGQITYYNRYKRQNVVKDLSVELDRLSEESVNNDISSWTKGRSGEALSLLKKRFSHRPVQEKFVCLNCGFETHADEQAALNIARSWLFLRSQEYKKYQTNKTTGNTDKRAFVETWQSFYRKKLKEVWKPAV

SEQ ID NO: 35227 - protein, 978 aa, synthetic construct
  REGION 1..978: note = engineered CasX variant
QEIKRINKIRRRLVKDSNTKKAGKTGPMKTLLVRVMTPDLRERLENLRKKPENIPQPISNTSRANLNKLLTDYTEMKKAILHVYWEEFQKDPVGLMSRVAQPASKKIDQNKLKPEMDEKGNLTTAGFACSQCGQPLFVYKLEQVSEKGKAYTNYFGRCNVAEHEKLILLSQLKPEKDSDEAVTYSLGKFGQRALDFYSIHVTKESTHPVKPLAQIAGNRYASVPVGKALSDACMGTIASFLSKYQDIIIEHQKVVKGNQKRLESLRELAGKENLEYPSVTLPPQPHTKEGVDAYNEVIARVRMWVNLNLWQKLKLSRDDAKPLLRLKGFPSFPLVERQANEVDWWDMVCNVKKLINEKKEDGKVFWQNLAGYKRQEALRPYLSSEEDRKKGKKFARYQLGDLLLHLEKKHGEDWGKVYDEAWERIDKKVEGLSKHIKLEEERRSEDAQSKAALTDWLRAKASFVIEGLKEADKDEFCRCELKLQKWYGDLRGKPFAIEAENSILDISGFSKQYNCAFIWQKDGVKKLNLYLIINYFKGGKLRFKKIKPEAFEANRFYTVINKKSGEIVPMEVNFNFDDPNLIILPLAFGKRVGREFIWNDLLSLETGSLKLANGRVIEKTLYNRRTRQDEPALFVALTFERREVLDSSNIKPMNLIGVDRGENIPAVIALTDPEGCPLSRFKDSLGNPTHILRIGESYKEKQRTIQAKKEVEQRRAGGYSRKYASKAKNLADDMVRNTARDLLYYAVTQDAMLIFENLSRGFGRQGKRTFMAERQYTRMEDWLTAKLAYEGLPSKTYLSKTLAQYTSKTCSNCGFTITSADYDRVLEKLKKTATGWMTTINGKELKVEGQITYYNRYKRQNVVKDLSVELDRLSEESVNNDISSWTKGRSGEALSLLKKRFSHRPVQEKFVCLNCGFETHADEQAALNIARSWLFLRSQEYKKYQTNKTTGNTDKRAFVETWQSFYRKKLKEVWKPAV

SEQ ID NO: 35228 - protein, 978 aa, synthetic construct
  REGION 1..978: note = engineered CasX variant
QEIKRINKIRRRLVKDSNTKKAGKTGPMKTLLVRVMTPDLRERLENLRKKPENIPQPISNTSRANLNKLLTDYTEMKKAILHVYWEEFQKDPVGLMSRVAQPASKKIDQNKLKPEMDEKGNLTTAGFACSQCGQPLFVYKLEQVSEKGKAYTNYFGRCNVAEHEKLIKLSQLKPEKDSDEAVTYSLGKFGQRALDFYSIHVTKESTHPVKPLAQIAGNRYASGPVGKALSDACMGTIASFLSKYQDIIIEHQKVVKGNQKRLESLRELAGKENLEYPSVTLPPQPHTKEGVDAYNEVIARVRMWVNLNLWQKLKLSRDDAKPLLRLKGFPSFPLVERQANEVDWWDMVCNVKKLINEKKEDGKVFWQNLAGYKRQEALRPYLSSEEDRKKGKKFARYQLGDLLLHLEKKHGEDWGKVYDEAWERIDKKVEGLSKHIKLEEERRSEDAQSKAALTDWLRAKASFVIEGLKEADKDEFCRCELKLQKWYGDLRGKPFAIEAENSILDISGFSKQYNCAFIWQKDGVKKLNLYLIINYFKGGKLRFKKIKPEAFEANRFYTVINKKSGEIVPMEVNFNFDDPNLIILPLAFGKRVGREFIWNDLLSLETGSLKLANGRVIEKTLYNRRTRQDEPALFVALTFERREVLDSSNIKPMNLIGVDRGENIPAVIALTDPEGCPLSRFKDSLGNPTHILRIGESYKEKQRTIQAKKEVEQRRAGGYSRKYASKAKNLADDMVRNTARDLLYYAVTQDAMLIFENLSRGFGRQGKRTFMAERQYTRMEDWLTAKLAYEGLPSKTYLSKTLAQYTSKTCSNCGFTITSADYDRVLEKLKKTATGWMTTINGKELKVEGQITYYNRYKRQNVVKDLSVELDRLSEESVNNDISSWTKGRSGEALSLLKKRFSHRPVQEKFVCLNCGFETHADEQAALNIARSWLFLRSQEYKKYQTNKTTGNTDKRAFVETWQSFYRKKLKEVWKPAV

SEQ ID NO: 35229 - protein, 977 aa, synthetic construct
  REGION 1..977: note = engineered CasX variant
QEIKRINKIRRRLVKDSNTKKAGKTGPMKTLLVRVMTPDLRERLENLRKKPENIPQPISNTSRANLNKLLTDYTEMKKAILHVYWEEFQKDPVGLMSRVAQPASKKIDQNKLKPEMDEKGNLTTAGFACSQCGQPLFVYKLEQVSEKGKAYTNYFGRCNVAEHEKLILLSQLKPEKDSDEAVTYSLGKFGQRALDFYSIHVTKESTHPVKPLAQIAGNRYASPVGKALSDACMGTIASFLSKYQDIIIEHQKVVKGNQKRLESLRELAGKENLEYPSVTLPPQPHTKEGVDAYNEVIARVRMWVNLNLWQKLKLSRDDAKPLLRLKGFPSFPLVERQANEVDWWDMVCNVKKLINEKKEDGKVFWQNLAGYKRQEALRPYLSSEEDRKKGKKFARYQLGDLLLHLEKKHGEDWGKVYDEAWERIDKKVEGLSKHIKLEEERRSEDAQSKAALTDWLRAKASFVIEGLKEADKDEFCRCELKLQKWYGDLRGKPFAIEAENSILDISGFSKQYNCAFIWQKDGVKKLNLYLIINYFKGGKLRFKKIKPEAFEANRFYTVINKKSGEIVPMEVNFNFDDPNLIILPLAFGKRVGREFIWNDLLSLETGSLKLANGRVIEKTLYNRRTRQDEPALFVALTFERREVLDSSNIKPMNLIGVDRGENIPAVIALTDPEGCPLSRFKDSLGNPTHILRIGESYKEKQRTIQAKKEVEQRRAGGYSRKYASKAKNLADDMVRNTARDLLYYAVTQDAMLIFENLSRGFGRQGKRTFMAERQYTRMEDWLTAKLAYEGLPSKTYLSKTLAQYTSKTCSNCGFTITSADYDRVLEKLKKTATGWMTTINGKELKVEGQITYYNRYKRQNVVKDLSVELDRLSEESVNNDISSWTKGRSGEALSLLKKRFSHRPVQEKFVCLNCGFETHADEQAALNIARSWLFLRSQEYKKYQTNKTTGNTDKRAFVETWQSFYRKKLKEVWKPAV

SEQ ID NO: 35230 - protein, 979 aa, synthetic construct
  REGION 1..979: note = engineered CasX variant
QEIKRINKIRRRLVKDSNTKKAGKTGPMKTLLVRVMTPDLRERLENLRKKPENIPQPISNTSRANLNKLLTDYTEMKKAILHVYWEEFQKDPVGLMSRVAQPASKKIDQNKLKPEMDEKGNLTTAGFACSQCGQPLFVYKLEQVSEKGKAYTNYFGRCNVAEHEKLILLSQLKPEKDSDEAVTYSLGKFGQRALDFYSIHVTKESTHPVKPLAQIAGNRYASYPVGKALSDACMGTIASFLSKYQDIIIEHQKVVKGNQKRLESLRELAGKENLEYPSVTLPPQPHTKEGVDAYNEVIARVRMWVNLNLWQKLKLSRDDAKPLLRLKGFPSFPLVERQANEVDWWDMVCNVKKLINEKKEDGKVFWQNLAGYKRQEALRPYLSSEEDRKKGKKFARYQLGDLLLHLEKKHGEDWGKVYDEAWERIDKKVEGLSKHIKLEEERRSEDAQSKAALTDWLRAKASFVIEGLKEADKDEFCRCELKLQKWYGDLRGKPFAIEAENSILDISGFSKQYNCAFIWQKDGVKKLNLYLIINYFKGGKLRFKKIKPEAFEANRFYTVINKKSGEIVPMEVNFNFDDPNLIILPLAFGKRQGREFIWNDLLSLETGSLKLANGRVIEKTLYNRRTRQDEPALFVALTFERREVLDSSNIKTPMNLIGVDRGENIPAVIALTDPEGCPLSRFKDSLGNPTHILRIGESYKEKQRTIQAKKEVEQRRAGGYSRKYASKAKNLADDMVRNTARDLLYYAVTQDAMLIFENLSRGFGRQGKRTFMAERQYTRMEDWLTAKLAYEGLPSKTYLSKTLAQYTSKTCSNCGFTITSADYDRVLEKLKKTATGWMTTINGKELKVEGQITYYNRYKRQNVVKDLSVELDRLSEESVNNDISSWTKGRSGEALSLLKKRFSHRPVQEKFVCLNCGFETHADEQAALNIARSWLFLRSQEYKKYQTNKTTGNTDKRAFVETWQSFYRKKLKEVWKPAV

SEQ ID NO: 35231 - protein, 979 aa, synthetic construct
  REGION 1..979: note = engineered CasX variant
QEIKRINKIRRRLVKDSNTKKAGKTGPMKTLLVRVMTPDLRERLENLRKKPENIPQPISNTSRANLNKLLTDYTEMKKAILHVYWEEFQKDPVGLMSRVAQPASKKIDQNKLKPEMDEKGNLTTAGFACSQCGQPLFVYKLEQVSEKGKAYTNYFGRCNVAEHEKLILLSQLKPEKDSDEAVTYSLGKFGQRALDFYSIHVTKESTHPVKPLAQIAGNRYASHPVGKALSDACMGTIASFLSKYQDIIIEHQKVVKGNQKRLESLRELAGKENLEYPSVTLPPQPHTKEGVDAYNEVIARVRMWVNLNLWQKLKLSRDDAKPLLRLKGFPSFPLVERQANEVDWWDMVCNVKKLINEKKEDGKVFWQNLAGYKRQEALRPYLSSEEDRKKGKKFARYQLGDLLLHLEKKHGEDWGKVYDEAWERIDKKVEGLSKHIKLEEERRSEDAQSKAALTDWLRAKASFVIEGLKEADKDEFCRCELKLQKWYGDLRGKPFAIEAENSILDISGFSKQYNCAFIWQKDGVKKLNLYLIINYFKGGKLRFKKIKPEAFEANRFYTVINKKSGEIVPMEVNFNFDDPNLIILPLAFGKRQGREFIWNDLLSLETGSLKLANGRVIEKTLYNRRTRQDEPALFVALTFERREVLDSSNIKTPMNLIGVDRGENIPAVIALTDPEGCPLSRFKDSLGNPTHILRIGESYKEKQRTIQAKKEVEQRRAGGYSRKYASKAKNLADDMVRNTARDLLYYAVTQDAMLIFENLSRGFGRQGKRTFMAERQYTRMEDWLTAKLAYEGLPSKTYLSKTLAQYTSKTCSNCGFTITSADYDRVLEKLKKTATGWMTTINGKELKVEGQITYYNRYKRQNVVKDLSVELDRLSEESVNNDISSWTKGRSGEALSLLKKRFSHRPVQEKFVCLNCGFETHADEQAALNIARSWLFLRSQEYKKYQTNKTTGNTDKRAFVETWQSFYRKKLKEVWKPAV

SEQ ID NO: 35232 - protein, 979 aa, synthetic construct
  REGION 1..979: note = engineered CasX variant
QEIKRINKIRRRLVKDSNTKKAGKTGPMKTLLVRVMTPDLRERLENLRKKPENIPQPISNTSRANLNKLLTDYTEMKKAILHVYWEEFQKDPVGLMSRVAQPASKKIDQNKLKPEMDEKGNLTTAGFACSQCGQPLFVYKLEQVSEKGKAYTNYFGRCNVAEHEKLILLSQLKPEKDSDEAVTYSLGKFGQRALDFYSIHVTKESTHPVKPLAQIAGNRYASSPVGKALSDACMGTIASFLSKYQDIIIEHQKVVKGNQKRLESLRELAGKENLEYPSVTLPPQPHTKEGVDAYNEVIARVRMWVNLNLWQKLKLSRDDAKPLLRLKGFPSFPLVERQANEVDWWDMVCNVKKLINEKKEDGKVFWQNLAGYKRQEALRPYLSSEEDRKKGKKFARYQLGDLLLHLEKKHGEDWGKVYDEAWERIDKKVEGLSKHIKLEEERRSEDAQSKAALTDWLRAKASFVIEGLKEADKDEFCRCELKLQKWYGDLRGKPFAIEAENSILDISGFSKQYNCAFIWQKDGVKKLNLYLIINYFKGGKLRFKKIKPEAFEANRFYTVINKKSGEIVPMEVNFNFDDPNLIILPLAFGKRQGREFIWNDLLSLETGSLKLANGRVIEKTLYNRRTRQDEPALFVALTFERREVLDSSNIKTPMNLIGVDRGENIPAVIALTDPEGCPLSRFKDSLGNPTHILRIGESYKEKQRTIQAKKEVEQRRAGGYSRKYASKAKNLADDMVRNTARDLLYYAVTQDAMLIFENLSRGFGRQGKRTFMAERQYTRMEDWLTAKLAYEGLPSKTYLSKTLAQYTSKTCSNCGFTITSADYDRVLEKLKKTATGWMTTINGKELKVEGQITYYNRYKRQNVVKDLSVELDRLSEESVNNDISSWTKGRSGEALSLLKKRFSHRPVQEKFVCLNCGFETHADEQAALNIARSWLFLRSQEYKKYQTNKTTGNTDKRAFVETWQSFYRKKLKEVWKPAV

SEQ ID NO: 35233 - protein, 979 aa, synthetic construct
  REGION 1..979: note = engineered CasX variant
QEIKRINKIRRRLVKDSNTKKAGKTGPMKTLLVRVMTPDLRERLENLRKKPENIPQPISNTSRANLNKLLTDYTEMKKAILHVYWEEFQKDPVGLMSRVAQPASKKIDQNKLKPEMDEKGNLTTAGFACSQCGQPLFVYKLEQVSEKGKAYTNYFGRCNVAEHEKLILLSQLKPEKDSDEAVTYSLGKFGQRALDFYSIHVTKESTHPVKPLAQIAGNRYASTPVGKALSDACMGTIASFLSKYQDIIIEHQKVVKGNQKRLESLRELAGKENLEYPSVTLPPQPHTKEGVDAYNEVIARVRMWVNLNLWQKLKLSRDDAKPLLRLKGFPSFPLVERQANEVDWWDMVCNVKKLINEKKEDGKVFWQNLAGYKRQEALRPYLSSEEDRKKGKKFARYQLGDLLLHLEKKHGEDWGKVYDEAWERIDKKVEGLSKHIKLEEERRSEDAQSKAALTDWLRAKASFVIEGLKEADKDEFCRCELKLQKWYGDLRGKPFAIEAENSILDISGFSKQYNCAFIWQKDGVKKLNLYLIINYFKGGKLRFKKIKPEAFEANRFYTVINKKSGEIVPMEVNFNFDDPNLIILPLAFGKRQGREFIWNDLLSLETGSLKLANGRVIEKTLYNRRTRQDEPALFVALTFERREVLDSSNIKTPMNLIGVDRGENIPAVIALTDPEGCPLSRFKDSLGNPTHILRIGESYKEKQRTIQAKKEVEQRRAGGYSRKYASKAKNLADDMVRNTARDLLYYAVTQDAMLIFENLSRGFGRQGKRTFMAERQYTRMEDWLTAKLAYEGLPSKTYLSKTLAQYTSKTCSNCGFTITSADYDRVLEKLKKTATGWMTTINGKELKVEGQITYYNRYKRQNVVKDLSVELDRLSEESVNNDISSWTKGRSGEALSLLKKRFSHRPVQEKFVCLNCGFETHADEQAALNIARSWLFLRSQEYKKYQTNKTTGNTDKRAFVETWQSFYRKKLKEVWKPAV

SEQ ID NO: 35234 - protein, 979 aa, synthetic construct
  REGION 1..979: note = engineered CasX variant
QEIKRINKIRRRLVKDSNTKKAGKTGPMKTLLVRVMTPDLRERLENLRKKPENIPQPISNTSRANLNKLLTDYTEMKKAILHVYWEEFQKDPVGLMSRVAQPASKKIDQNKLKPEMDEKGNLTTAGFACSQCGQPLFVYKLEQVSEKGKAYTNYFGRCNVAEHEKLILLSQLKPEKDSDEAVTYSLGKFGQRALDFYSIHVTKESTHPVKPLAQIAGNRYASAPVGKALSDACMGTIASFLSKYQDIIIEHQKVVKGNQKRLESLRELAGKENLEYPSVTLPPQPHTKEGVDAYNEVIARVRMWVNLNLWQKLKLSRDDAKPLLRLKGFPSFPLVERQANEVDWWDMVCNVKKLINEKKEDGKVFWQNLAGYKRQEALRPYLSSEEDRKKGKKFARYQLGDLLLHLEKKHGEDWGKVYDEAWERIDKKVEGLSKHIKLEEERRSEDAQSKAALTDWLRAKASFVIEGLKEADKDEFCRCELKLQKWYGDLRGKPFAIEAENSILDISGFSKQYNCAFIWQKDGVKKLNLYLIINYFKGGKLRFKKIKPEAFEANRFYTVINKKSGEIVPMEVNFNFDDPNLIILPLAFGKRQGREFIWNDLLSLETGSLKLANGRVIEKTLYNRRTRQDEPALFVALTFERREVLDSSNIKTPMNLIGVDRGENIPAVIALTDPEGCPLSRFKDSLGNPTHILRIGESYKEKQRTIQAKKEVEQRRAGGYSRKYASKAKNLADDMVRNTARDLLYYAVTQDAMLIFENLSRGFGRQGKRTFMAERQYTRMEDWLTAKLAYEGLPSKTYLSKTLAQYTSKTCSNCGFTITSADYDRVLEKLKKTATGWMTTINGKELKVEGQITYYNRYKRQNVVKDLSVELDRLSEESVNNDISSWTKGRSGEALSLLKKRFSHRPVQEKFVCLNCGFETHADEQAALNIARSWLFLRSQEYKKYQTNKTTGNTDKRAFVETWQSFYRKKLKEVWKPAV

SEQ ID NO: 35235 - protein, 979 aa, synthetic construct
  REGION 1..979: note = engineered CasX variant
QEIKRINKIRRRLVKDSNTKKAGKTGPMKTLLVRVMTPDLRERLENLRKKPENIPQPISNTSRANLNKLLTDYTEMKKAILHVYWEEFQKDPVGLMSRVAQPASKKIDQNKLKPEMDEKGNLTTAGFACSQCGQPLFVYKLEQVSEKGKAYTNYFGRCNVAEHEKLILLSQLKPEKDSDEAVTYSLGKFGQRALDFYSIHVTKESTHPVKPLAQIAGNRYASVPVGKALSDACMGTIASFLSKYQDIIIEHQKVVKGNQKRLESLRELAGKENLEYPSVTLPPQPHTKEGVDAYNEVIARVRMWVNLNLWQKLKLSRDDAKPLLRLKGFPSFPLVERQANEVDWWDMVCNVKKLINEKKEDGKVFWQNLAGYKRQEALRPYLSSEEDRKKGKKFARYQLGDLLLHLEKKHGEDWGKVYDEAWERIDKKVEGLSKHIKLEEERRSEDAQSKAALTDWLRAKASFVIEGLKEADKDEFCRCELKLQKWYGDLRGKPFAIEAENSILDISGFSKQYNCAFIWQKDGVKKLNLYLIINYFKGGKLRFKKIKPEAFEANRFYTVINKKSGEIVPMEVNFNFDDPNLIILPLAFGKRQGREFIWNDLLSLETGSLKLANGRVIEKTLYNRRTRQDEPALFVALTFERREVLDSSNIKTPMNLIGVDRGENIPAVIALTDPEGCPLSRFKDSLGNPTHILRIGESYKEKQRTIQAKKEVEQRRAGGYSRKYASKAKNLADDMVRNTARDLLYYAVTQDAMLIFENLSRGFGRQGKRTFMAERQYTRMEDWLTAKLAYEGLPSKTYLSKTLAQYTSKTCSNCGFTITSADYDRVLEKLKKTATGWMTTINGKELKVEGQITYYNRYKRQNVVKDLSVELDRLSEESVNNDISSWTKGRSGEALSLLKKRFSHRPVQEKFVCLNCGFETHADEQAALNIARSWLFLRSQEYKKYQTNKTTGNTDKRAFVETWQSFYRKKLKEVWKPAV

SEQ ID NO: 35236 - protein, 979 aa, synthetic construct
  REGION 1..979: note = engineered CasX variant
QEIKRINKIRRRLVKDSNTKKAGKTGPMKTLLVRVMTPDLRERLENLRKKPENIPQPISNTSRANLNKLLTDYTEMKKAILHVYWEEFQKDPVGLMSRVAQPASKKIDQNKLKPEMDEKGNLTTAGFACSQCGQPLFVYKLEQVSEKGKAYTNYFGRCNVAEHEKLIKLSQLKPEKDSDEAVTYSLGKFGQRALDFYSIHVTKESTHPVKPLAQIAGNRYASGPVGKALSDACMGTIASFLSKYQDIIIEHQKVVKGNQKRLESLRELAGKENLEYPSVTLPPQPHTKEGVDAYNEVIARVRMWVNLNLWQKLKLSRDDAKPLLRLKGFPSFPLVERQANEVDWWDMVCNVKKLINEKKEDGKVFWQNLAGYKRQEALRPYLSSEEDRKKGKKFARYQLGDLLLHLEKKHGEDWGKVYDEAWERIDKKVEGLSKHIKLEEERRSEDAQSKAALTDWLRAKASFVIEGLKEADKDEFCRCELKLQKWYGDLRGKPFAIEAENSILDISGFSKQYNCAFIWQKDGVKKLNLYLIINYFKGGKLRFKKIKPEAFEANRFYTVINKKSGEIVPMEVNFNFDDPNLIILPLAFGKRQGREFIWNDLLSLETGSLKLANGRVIEKTLYNRRTRQDEPALFVALTFERREVLDSSNIKTPMNLIGVDRGENIPAVIALTDPEGCPLSRFKDSLGNPTHILRIGESYKEKQRTIQAKKEVEQRRAGGYSRKYASKAKNLADDMVRNTARDLLYYAVTQDAMLIFENLSRGFGRQGKRTFMAERQYTRMEDWLTAKLAYEGLPSKTYLSKTLAQYTSKTCSNCGFTITSADYDRVLEKLKKTATGWMTTINGKELKVEGQITYYNRYKRQNVVKDLSVELDRLSEESVNNDISSWTKGRSGEALSLLKKRFSHRPVQEKFVCLNCGFETHADEQAALNIARSWLFLRSQEYKKYQTNKTTGNTDKRAFVETWQSFYRKKLKEVWKPAV

SEQ ID NO: 35237 - protein, 978 aa, synthetic construct
  REGION 1..978: note = engineered CasX variant
QEIKRINKIRRRLVKDSNTKKAGKTGPMKTLLVRVMTPDLRERLENLRKKPENIPQPISNTSRANLNKLLTDYTEMKKAILHVYWEEFQKDPVGLMSRVAQPASKKIDQNKLKPEMDEKGNLTTAGFACSQCGQPLFVYKLEQVSEKGKAYTNYFGRCNVAEHEKLILLSQLKPEKDSDEAVTYSLGKFGQRALDFYSIHVTKESTHPVKPLAQIAGNRYASPVGKALSDACMGTIASFLSKYQDIIIEHQKVVKGNQKRLESLRELAGKENLEYPSVTLPPQPHTKEGVDAYNEVIARVRMWVNLNLWQKLKLSRDDAKPLLRLKGFPSFPLVERQANEVDWWDMVCNVKKLINEKKEDGKVFWQNLAGYKRQEALRPYLSSEEDRKKGKKFARYQLGDLLLHLEKKHGEDWGKVYDEAWERIDKKVEGLSKHIKLEEERRSEDAQSKAALTDWLRAKASFVIEGLKEADKDEFCRCELKLQKWYGDLRGKPFAIEAENSILDISGFSKQYNCAFIWQKDGVKKLNLYLIINYFKGGKLRFKKIKPEAFEANRFYTVINKKSGEIVPMEVNFNFDDPNLIILPLAFGKRQGREFIWNDLLSLETGSLKLANGRVIEKTLYNRRTRQDEPALFVALTFERREVLDSSNIKTPMNLIGVDRGENIPAVIALTDPEGCPLSRFKDSLGNPTHILRIGESYKEKQRTIQAKKEVEQRRAGGYSRKYASKAKNLADDMVRNTARDLLYYAVTQDAMLIFENLSRGFGRQGKRTFMAERQYTRMEDWLTAKLAYEGLPSKTYLSKTLAQYTSKTCSNCGFTITSADYDRVLEKLKKTATGWMTTINGKELKVEGQITYYNRYKRQNVVKDLSVELDRLSEESVNNDISSWTKGRSGEALSLLKKRFSHRPVQEKFVCLNCGFETHADEQAALNIARSWLFLRSQEYKKYQTNKTTGNTDKRAFVETWQSFYRKKLKEVWKPAV

SEQ ID NO: 35238 - protein, 979 aa, synthetic construct
  REGION 1..979: note = engineered CasX variant
QEIKRINKIRRRLVKDSNTKKAGKTGPMKTLLVRVMTPDLRERLENLRKKPENIPQPISNTSRANLNKLLTDYTEMKKAILHVYWEEFQKDPVGLMSRVAQPASKKIDQNKLKPEMDEKGNLTTAGFACSQCGQPLFVYKLEQVSEKGKAYTNYFGRCNVAEHEKLILLSQLKPEKDSDEAVTYSLGKFGQRALDFYSIHVTKESTHPVKPLAQIAGNRYASYPVGKALSDACMGTIASFLSKYQDIIIEHQKVVKGNQKRLESLRELAGKENLEYPSVTLPPQPHTKEGVDAYNEVIARVRMWVNLNLWQKLKLSRDDAKPLLRLKGFPSFPLVERQANEVDWWDMVCNVKKLINEKKEDGKVFWQNLAGYKRQEALRPYLSSEEDRKKGKKFARYQLGDLLLHLEKKHGEDWGKVYDEAWERIDKKVEGLSKHIKLEEERRSEDAQSKAALTDWLRAKASFVIEGLKEADKDEFCRCELKLQKWYGDLRGKPFAIEAENSILDISGFSKQYNCAFIWQKDGVKKLNLYLIINYFKGGKLRFKKIKPEAFEANRFYTVINKKSGEIVPMEVNFNFDDPNLIILPLAFGKRQGREFIWNDLLSLETGSLKLANGRVIEKTLYNRRTRQDEPALFVALTFERREVLDSSNIKPMSNLIGVDRGENIPAVIALTDPEGCPLSRFKDSLGNPTHILRIGESYKEKQRTIQAKKEVEQRRAGGYSRKYASKAKNLADDMVRNTARDLLYYAVTQDAMLIFENLSRGFGRQGKRTFMAERQYTRMEDWLTAKLAYEGLPSKTYLSKTLAQYTSKTCSNCGFTITSADYDRVLEKLKKTATGWMTTINGKELKVEGQITYYNRYKRQNVVKDLSVELDRLSEESVNNDISSWTKGRSGEALSLLKKRFSHRPVQEKFVCLNCGFETHADEQAALNIARSWLFLRSQEYKKYQTNKTTGNTDKRAFVETWQSFYRKKLKEVWKPAV

SEQ ID NO: 35239 - protein, 979 aa, synthetic construct
  REGION 1..979: note = engineered CasX variant
QEIKRINKIRRRLVKDSNTKKAGKTGPMKTLLVRVMTPDLRERLENLRKKPENIPQPISNTSRANLNKLLTDYTEMKKAILHVYWEEFQKDPVGLMSRVAQPASKKIDQNKLKPEMDEKGNLTTAGFACSQCGQPLFVYKLEQVSEKGKAYTNYFGRCNVAEHEKLILLSQLKPEKDSDEAVTYSLGKFGQRALDFYSIHVTKESTHPVKPLAQIAGNRYASHPVGKALSDACMGTIASFLSKYQDIIIEHQKVVKGNQKRLESLRELAGKENLEYPSVTLPPQPHTKEGVDAYNEVIARVRMWVNLNLWQKLKLSRDDAKPLLRLKGFPSFPLVERQANEVDWWDMVCNVKKLINEKKEDGKVFWQNLAGYKRQEALRPYLSSEEDRKKGKKFARYQLGDLLLHLEKKHGEDWGKVYDEAWERIDKKVEGLSKHIKLEEERRSEDAQSKAALTDWLRAKASFVIEGLKEADKDEFCRCELKLQKWYGDLRGKPFAIEAENSILDISGFSKQYNCAFIWQKDGVKKLNLYLIINYFKGGKLRFKKIKPEAFEANRFYTVINKKSGEIVPMEVNFNFDDPNLIILPLAFGKRQGREFIWNDLLSLETGSLKLANGRVIEKTLYNRRTRQDEPALFVALTFERREVLDSSNIKPMSNLIGVDRGENIPAVIALTDPEGCPLSRFKDSLGNPTHILRIGESYKEKQRTIQAKKEVEQRRAGGYSRKYASKAKNLADDMVRNTARDLLYYAVTQDAMLIFENLSRGFGRQGKRTFMAERQYTRMEDWLTAKLAYEGLPSKTYLSKTLAQYTSKTCSNCGFTITSADYDRVLEKLKKTATGWMTTINGKELKVEGQITYYNRYKRQNVVKDLSVELDRLSEESVNNDISSWTKGRSGEALSLLKKRFSHRPVQEKFVCLNCGFETHADEQAALNIARSWLFLRSQEYKKYQTNKTTGNTDKRAFVETWQSFYRKKLKEVWKPAV

SEQ ID NO: 35240 - protein, 979 aa, synthetic construct
  REGION 1..979: note = engineered CasX variant
QEIKRINKIRRRLVKDSNTKKAGKTGPMKTLLVRVMTPDLRERLENLRKKPENIPQPISNTSRANLNKLLTDYTEMKKAILHVYWEEFQKDPVGLMSRVAQPASKKIDQNKLKPEMDEKGNLTTAGFACSQCGQPLFVYKLEQVSEKGKAYTNYFGRCNVAEHEKLILLSQLKPEKDSDEAVTYSLGKFGQRALDFYSIHVTKESTHPVKPLAQIAGNRYASSPVGKALSDACMGTIASFLSKYQDIIIEHQKVVKGNQKRLESLRELAGKENLEYPSVTLPPQPHTKEGVDAYNEVIARVRMWVNLNLWQKLKLSRDDAKPLLRLKGFPSFPLVERQANEVDWWDMVCNVKKLINEKKEDGKVFWQNLAGYKRQEALRPYLSSEEDRKKGKKFARYQLGDLLLHLEKKHGEDWGKVYDEAWERIDKKVEGLSKHIKLEEERRSEDAQSKAALTDWLRAKASFVIEGLKEADKDEFCRCELKLQKWYGDLRGKPFAIEAENSILDISGFSKQYNCAFIWQKDGVKKLNLYLIINYFKGGKLRFKKIKPEAFEANRFYTVINKKSGEIVPMEVNFNFDDPNLIILPLAFGKRQGREFIWNDLLSLETGSLKLANGRVIEKTLYNRRTRQDEPALFVALTFERREVLDSSNIKPMSNLIGVDRGENIPAVIALTDPEGCPLSRFKDSLGNPTHILRIGESYKEKQRTIQAKKEVEQRRAGGYSRKYASKAKNLADDMVRNTARDLLYYAVTQDAMLIFENLSRGFGRQGKRTFMAERQYTRMEDWLTAKLAYEGLPSKTYLSKTLAQYTSKTCSNCGFTITSADYDRVLEKLKKTATGWMTTINGKELKVEGQITYYNRYKRQNVVKDLSVELDRLSEESVNNDISSWTKGRSGEALSLLKKRFSHRPVQEKFVCLNCGFETHADEQAALNIARSWLFLRSQEYKKYQTNKTTGNTDKRAFVETWQSFYRKKLKEVWKPAV

SEQ ID NO: 35241 - protein, 979 aa, synthetic construct
  REGION 1..979: note = engineered CasX variant
QEIKRINKIRRRLVKDSNTKKAGKTGPMKTLLVRVMTPDLRERLENLRKKPENIPQPISNTSRANLNKLLTDYTEMKKAILHVYWEEFQKDPVGLMSRVAQPASKKIDQNKLKPEMDEKGNLTTAGFACSQCGQPLFVYKLEQVSEKGKAYTNYFGRCNVAEHEKLILLSQLKPEKDSDEAVTYSLGKFGQRALDFYSIHVTKESTHPVKPLAQIAGNRYASTPVGKALSDACMGTIASFLSKYQDIIIEHQKVVKGNQKRLESLRELAGKENLEYPSVTLPPQPHTKEGVDAYNEVIARVRMWVNLNLWQKLKLSRDDAKPLLRLKGFPSFPLVERQANEVDWWDMVCNVKKLINEKKEDGKVFWQNLAGYKRQEALRPYLSSEEDRKKGKKFARYQLGDLLLHLEKKHGEDWGKVYDEAWERIDKKVEGLSKHIKLEEERRSEDAQSKAALTDWLRAKASFVIEGLKEADKDEFCRCELKLQKWYGDLRGKPFAIEAENSILDISGFSKQYNCAFIWQKDGVKKLNLYLIINYFKGGKLRFKKIKPEAFEANRFYTVINKKSGEIVPMEVNFNFDDPNLIILPLAFGKRQGREFIWNDLLSLETGSLKLANGRVIEKTLYNRRTRQDEPALFVALTFERREVLDSSNIKPMSNLIGVDRGENIPAVIALTDPEGCPLSRFKDSLGNPTHILRIGESYKEKQRTIQAKKEVEQRRAGGYSRKYASKAKNLADDMVRNTARDLLYYAVTQDAMLIFENLSRGFGRQGKRTFMAERQYTRMEDWLTAKLAYEGLPSKTYLSKTLAQYTSKTCSNCGFTITSADYDRVLEKLKKTATGWMTTINGKELKVEGQITYYNRYKRQNVVKDLSVELDRLSEESVNNDISSWTKGRSGEALSLLKKRFSHRPVQEKFVCLNCGFETHADEQAALNIARSWLFLRSQEYKKYQTNKTTGNTDKRAFVETWQSFYRKKLKEVWKPAV

SEQ ID NO: 35242 - protein, 979 aa, synthetic construct
  REGION 1..979: note = engineered CasX variant
QEIKRINKIRRRLVKDSNTKKAGKTGPMKTLLVRVMTPDLRERLENLRKKPENIPQPISNTSRANLNKLLTDYTEMKKAILHVYWEEFQKDPVGLMSRVAQPASKKIDQNKLKPEMDEKGNLTTAGFACSQCGQPLFVYKLEQVSEKGKAYTNYFGRCNVAEHEKLILLSQLKPEKDSDEAVTYSLGKFGQRALDFYSIHVTKESTHPVKPLAQIAGNRYASAPVGKALSDACMGTIASFLSKYQDIIIEHQKVVKGNQKRLESLRELAGKENLEYPSVTLPPQPHTKEGVDAYNEVIARVRMWVNLNLWQKLKLSRDDAKPLLRLKGFPSFPLVERQANEVDWWDMVCNVKKLINEKKEDGKVFWQNLAGYKRQEALRPYLSSEEDRKKGKKFARYQLGDLLLHLEKKHGEDWGKVYDEAWERIDKKVEGLSKHIKLEEERRSEDAQSKAALTDWLRAKASFVIEGLKEADKDEFCRCELKLQKWYGDLRGKPFAIEAENSILDISGFSKQYNCAFIWQKDGVKKLNLYLIINYFKGGKLRFKKIKPEAFEANRFYTVINKKSGEIVPMEVNFNFDDPNLIILPLAFGKRQGREFIWNDLLSLETGSLKLANGRVIEKTLYNRRTRQDEPALFVALTFERREVLDSSNIKPMSNLIGVDRGENIPAVIALTDPEGCPLSRFKDSLGNPTHILRIGESYKEKQRTIQAKKEVEQRRAGGYSRKYASKAKNLADDMVRNTARDLLYYAVTQDAMLIFENLSRGFGRQGKRTFMAERQYTRMEDWLTAKLAYEGLPSKTYLSKTLAQYTSKTCSNCGFTITSADYDRVLEKLKKTATGWMTTINGKELKVEGQITYYNRYKRQNVVKDLSVELDRLSEESVNNDISSWTKGRSGEALSLLKKRFSHRPVQEKFVCLNCGFETHADEQAALNIARSWLFLRSQEYKKYQTNKTTGNTDKRAFVETWQSFYRKKLKEVWKPAV

SEQ ID NO: 35243 - protein, 979 aa, synthetic construct
  REGION 1..979: note = engineered CasX variant
QEIKRINKIRRRLVKDSNTKKAGKTGPMKTLLVRVMTPDLRERLENLRKKPENIPQPISNTSRANLNKLLTDYTEMKKAILHVYWEEFQKDPVGLMSRVAQPASKKIDQNKLKPEMDEKGNLTTAGFACSQCGQPLFVYKLEQVSEKGKAYTNYFGRCNVAEHEKLILLSQLKPEKDSDEAVTYSLGKFGQRALDFYSIHVTKESTHPVKPLAQIAGNRYASVPVGKALSDACMGTIASFLSKYQDIIIEHQKVVKGNQKRLESLRELAGKENLEYPSVTLPPQPHTKEGVDAYNEVIARVRMWVNLNLWQKLKLSRDDAKPLLRLKGFPSFPLVERQANEVDWWDMVCNVKKLINEKKEDGKVFWQNLAGYKRQEALRPYLSSEEDRKKGKKFARYQLGDLLLHLEKKHGEDWGKVYDEAWERIDKKVEGLSKHIKLEEERRSEDAQSKAALTDWLRAKASFVIEGLKEADKDEFCRCELKLQKWYGDLRGKPFAIEAENSILDISGFSKQYNCAFIWQKDGVKKLNLYLIINYFKGGKLRFKKIKPEAFEANRFYTVINKKSGEIVPMEVNFNFDDPNLIILPLAFGKRQGREFIWNDLLSLETGSLKLANGRVIEKTLYNRRTRQDEPALFVALTFERREVLDSSNIKPMSNLIGVDRGENIPAVIALTDPEGCPLSRFKDSLGNPTHILRIGESYKEKQRTIQAKKEVEQRRAGGYSRKYASKAKNLADDMVRNTARDLLYYAVTQDAMLIFENLSRGFGRQGKRTFMAERQYTRMEDWLTAKLAYEGLPSKTYLSKTLAQYTSKTCSNCGFTITSADYDRVLEKLKKTATGWMTTINGKELKVEGQITYYNRYKRQNVVKDLSVELDRLSEESVNNDISSWTKGRSGEALSLLKKRFSHRPVQEKFVCLNCGFETHADEQAALNIARSWLFLRSQEYKKYQTNKTTGNTDKRAFVETWQSFYRKKLKEVWKPAV

SEQ ID NO: 35244 - protein, 979 aa, synthetic construct
  REGION 1..979: note = engineered CasX variant
QEIKRINKIRRRLVKDSNTKKAGKTGPMKTLLVRVMTPDLRERLENLRKKPENIPQPISNTSRANLNKLLTDYTEMKKAILHVYWEEFQKDPVGLMSRVAQPASKKIDQNKLKPEMDEKGNLTTAGFACSQCGQPLFVYKLEQVSEKGKAYTNYFGRCNVAEHEKLIKLSQLKPEKDSDEAVTYSLGKFGQRALDFYSIHVTKESTHPVKPLAQIAGNRYASGPVGKALSDACMGTIASFLSKYQDIIIEHQKVVKGNQKRLESLRELAGKENLEYPSVTLPPQPHTKEGVDAYNEVIARVRMWVNLNLWQKLKLSRDDAKPLLRLKGFPSFPLVERQANEVDWWDMVCNVKKLINEKKEDGKVFWQNLAGYKRQEALRPYLSSEEDRKKGKKFARYQLGDLLLHLEKKHGEDWGKVYDEAWERIDKKVEGLSKHIKLEEERRSEDAQSKAALTDWLRAKASFVIEGLKEADKDEFCRCELKLQKWYGDLRGKPFAIEAENSILDISGFSKQYNCAFIWQKDGVKKLNLYLIINYFKGGKLRFKKIKPEAFEANRFYTVINKKSGEIVPMEVNFNFDDPNLIILPLAFGKRQGREFIWNDLLSLETGSLKLANGRVIEKTLYNRRTRQDEPALFVALTFERREVLDSSNIKPMSNLIGVDRGENIPAVIALTDPEGCPLSRFKDSLGNPTHILRIGESYKEKQRTIQAKKEVEQRRAGGYSRKYASKAKNLADDMVRNTARDLLYYAVTQDAMLIFENLSRGFGRQGKRTFMAERQYTRMEDWLTAKLAYEGLPSKTYLSKTLAQYTSKTCSNCGFTITSADYDRVLEKLKKTATGWMTTINGKELKVEGQITYYNRYKRQNVVKDLSVELDRLSEESVNNDISSWTKGRSGEALSLLKKRFSHRPVQEKFVCLNCGFETHADEQAALNIARSWLFLRSQEYKKYQTNKTTGNTDKRAFVETWQSFYRKKLKEVWKPAV

SEQ ID NO: 35245 - protein, 978 aa, synthetic construct
  REGION 1..978: note = engineered CasX variant
QEIKRINKIRRRLVKDSNTKKAGKTGPMKTLLVRVMTPDLRERLENLRKKPENIPQPISNTSRANLNKLLTDYTEMKKAILHVYWEEFQKDPVGLMSRVAQPASKKIDQNKLKPEMDEKGNLTTAGFACSQCGQPLFVYKLEQVSEKGKAYTNYFGRCNVAEHEKLILLSQLKPEKDSDEAVTYSLGKFGQRALDFYSIHVTKESTHPVKPLAQIAGNRYASPVGKALSDACMGTIASFLSKYQDIIIEHQKVVKGNQKRLESLRELAGKENLEYPSVTLPPQPHTKEGVDAYNEVIARVRMWVNLNLWQKLKLSRDDAKPLLRLKGFPSFPLVERQANEVDWWDMVCNVKKLINEKKEDGKVFWQNLAGYKRQEALRPYLSSEEDRKKGKKFARYQLGDLLLHLEKKHGEDWGKVYDEAWERIDKKVEGLSKHIKLEEERRSEDAQSKAALTDWLRAKASFVIEGLKEADKDEFCRCELKLQKWYGDLRGKPFAIEAENSILDISGFSKQYNCAFIWQKDGVKKLNLYLIINYFKGGKLRFKKIKPEAFEANRFYTVINKKSGEIVPMEVNFNFDDPNLIILPLAFGKRQGREFIWNDLLSLETGSLKLANGRVIEKTLYNRRTRQDEPALFVALTFERREVLDSSNIKPMSNLIGVDRGENIPAVIALTDPEGCPLSRFKDSLGNPTHILRIGESYKEKQRTIQAKKEVEQRRAGGYSRKYASKAKNLADDMVRNTARDLLYYAVTQDAMLIFENLSRGFGRQGKRTFMAERQYTRMEDWLTAKLAYEGLPSKTYLSKTLAQYTSKTCSNCGFTITSADYDRVLEKLKKTATGWMTTINGKELKVEGQITYYNRYKRQNVVKDLSVELDRLSEESVNNDISSWTKGRSGEALSLLKKRFSHRPVQEKFVCLNCGFETHADEQAALNIARSWLFLRSQEYKKYQTNKTTGNTDKRAFVETWQSFYRKKLKEVWKPAV

SEQ ID NO: 35246 - protein, 978 aa, synthetic construct
  REGION 1..978: note = engineered CasX variant
QEIKRINKIRRRLVKDSNTKKAGKTGPMKTLLVRVMTPDLRERLENLRKKPENIPQPISNTSRANLNKLLTDYTEMKKAILHVYWEEFQKDPVGLMSRVAQPASKKIDQNKLKPEMDEKGNLTTAGFACSQCGQPLFVYKLEQVSEKGKAYTNYFGRCNVAEHEKLILLSQLKPEKDSDEAVTYSLGKFGQRALDFYSIHVTKESTHPVKPLAQIAGNRYASYPVGKALSDACMGTIASFLSKYQDIIIEHQKVVKGNQKRLESLRELAGKENLEYPSVTLPPQPHTKEGVDAYNEVIARVRMWVNLNLWQKLKLSRDDAKPLLRLKGFPSFPLVERQANEVDWWDMVCNVKKLINEKKEDGKVFWQNLAGYKRQEALRPYLSSEEDRKKGKKFARYQLGDLLLHLEKKHGEDWGKVYDEAWERIDKKVEGLSKHIKLEEERRSEDAQSKAALTDWLRAKASFVIEGLKEADKDEFCRCELKLQKWYGDLRGKPFAIEAENSILDISGFSKQYNCAFIWQKDGVKKLNLYLIINYFKGGKLRFKKIKPEAFEANRFYTVINKKSGEIVPMEVNFNFDDPNLIILPLAFGKRQGREFIWNDLLSLETGSLKLANGRVIEKTLYNRRTRQDEPALFVALTFERREVLDSSNIKPMNLIGVDRGENIPAVIALTDPEGCPLSRFKDSLGNPTHILRIRESYKEKQRTIQAKKEVEQRRAGGYSRKYASKAKNLADDMVRNTARDLLYYAVTQDAMLIFENLSRGFGRQGKRTFMAERQYTRMEDWLTAKLAYEGLPSKTYLSKTLAQYTSKTCSNCGFTITSADYDRVLEKLKKTATGWMTTINGKELKVEGQITYYNRYKRQNVVKDLSVELDRLSEESVNNDISSWTKGRSGEALSLLKKRFSHRPVQEKFVCLNCGFETHADEQAALNIARSWLFLRSQEYKKYQTNKTTGNTDKRAFVETWQSFYRKKLKEVWKPAV

SEQ ID NO: 35247 - protein, 978 aa, synthetic construct
  REGION 1..978: note = engineered CasX variant
QEIKRINKIRRRLVKDSNTKKAGKTGPMKTLLVRVMTPDLRERLENLRKKPENIPQPISNTSRANLNKLLTDYTEMKKAILHVYWEEFQKDPVGLMSRVAQPASKKIDQNKLKPEMDEKGNLTTAGFACSQCGQPLFVYKLEQVSEKGKAYTNYFGRCNVAEHEKLILLSQLKPEKDSDEAVTYSLGKFGQRALDFYSIHVTKESTHPVKPLAQIAGNRYASHPVGKALSDACMGTIASFLSKYQDIIIEHQKVVKGNQKRLESLRELAGKENLEYPSVTLPPQPHTKEGVDAYNEVIARVRMWVNLNLWQKLKLSRDDAKPLLRLKGFPSFPLVERQANEVDWWDMVCNVKKLINEKKEDGKVFWQNLAGYKRQEALRPYLSSEEDRKKGKKFARYQLGDLLLHLEKKHGEDWGKVYDEAWERIDKKVEGLSKHIKLEEERRSEDAQSKAALTDWLRAKASFVIEGLKEADKDEFCRCELKLQKWYGDLRGKPFAIEAENSILDISGFSKQYNCAFIWQKDGVKKLNLYLIINYFKGGKLRFKKIKPEAFEANRFYTVINKKSGEIVPMEVNFNFDDPNLIILPLAFGKRQGREFIWNDLLSLETGSLKLANGRVIEKTLYNRRTRQDEPALFVALTFERREVLDSSNIKPMNLIGVDRGENIPAVIALTDPEGCPLSRFKDSLGNPTHILRIRESYKEKQRTIQAKKEVEQRRAGGYSRKYASKAKNLADDMVRNTARDLLYYAVTQDAMLIFENLSRGFGRQGKRTFMAERQYTRMEDWLTAKLAYEGLPSKTYLSKTLAQYTSKTCSNCGFTITSADYDRVLEKLKKTATGWMTTINGKELKVEGQITYYNRYKRQNVVKDLSVELDRLSEESVNNDISSWTKGRSGEALSLLKKRFSHRPVQEKFVCLNCGFETHADEQAALNIARSWLFLRSQEYKKYQTNKTTGNTDKRAFVETWQSFYRKKLKEVWKPAV

SEQ ID NO: 35248 - protein, 978 aa, synthetic construct
  REGION 1..978: note = engineered CasX variant
QEIKRINKIRRRLVKDSNTKKAGKTGPMKTLLVRVMTPDLRERLENLRKKPENIPQPISNTSRANLNKLLTDYTEMKKAILHVYWEEFQKDPVGLMSRVAQPASKKIDQNKLKPEMDEKGNLTTAGFACSQCGQPLFVYKLEQVSEKGKAYTNYFGRCNVAEHEKLILLSQLKPEKDSDEAVTYSLGKFGQRALDFYSIHVTKESTHPVKPLAQIAGNRYASSPVGKALSDACMGTIASFLSKYQDIIIEHQKVVKGNQKRLESLRELAGKENLEYPSVTLPPQPHTKEGVDAYNEVIARVRMWVNLNLWQKLKLSRDDAKPLLRLKGFPSFPLVERQANEVDWWDMVCNVKKLINEKKEDGKVFWQNLAGYKRQEALRPYLSSEEDRKKGKKFARYQLGDLLLHLEKKHGEDWGKVYDEAWERIDKKVEGLSKHIKLEEERRSEDAQSKAALTDWLRAKASFVIEGLKEADKDEFCRCELKLQKWYGDLRGKPFAIEAENSILDISGFSKQYNCAFIWQKDGVKKLNLYLIINYFKGGKLRFKKIKPEAFEANRFYTVINKKSGEIVPMEVNFNFDDPNLIILPLAFGKRQGREFIWNDLLSLETGSLKLANGRVIEKTLYNRRTRQDEPALFVALTFERREVLDSSNIKPMNLIGVDRGENIPAVIALTDPEGCPLSRFKDSLGNPTHILRIRESYKEKQRTIQAKKEVEQRRAGGYSRKYASKAKNLADDMVRNTARDLLYYAVTQDAMLIFENLSRGFGRQGKRTFMAERQYTRMEDWLTAKLAYEGLPSKTYLSKTLAQYTSKTCSNCGFTITSADYDRVLEKLKKTATGWMTTINGKELKVEGQITYYNRYKRQNVVKDLSVELDRLSEESVNNDISSWTKGRSGEALSLLKKRFSHRPVQEKFVCLNCGFETHADEQAALNIARSWLFLRSQEYKKYQTNKTTGNTDKRAFVETWQSFYRKKLKEVWKPAV

SEQ ID NO: 35249 - protein, 978 aa, synthetic construct
  REGION 1..978: note = engineered CasX variant
QEIKRINKIRRRLVKDSNTKKAGKTGPMKTLLVRVMTPDLRERLENLRKKPENIPQPISNTSRANLNKLLTDYTEMKKAILHVYWEEFQKDPVGLMSRVAQPASKKIDQNKLKPEMDEKGNLTTAGFACSQCGQPLFVYKLEQVSEKGKAYTNYFGRCNVAEHEKLILLSQLKPEKDSDEAVTYSLGKFGQRALDFYSIHVTKESTHPVKPLAQIAGNRYASTPVGKALSDACMGTIASFLSKYQDIIIEHQKVVKGNQKRLESLRELAGKENLEYPSVTLPPQPHTKEGVDAYNEVIARVRMWVNLNLWQKLKLSRDDAKPLLRLKGFPSFPLVERQANEVDWWDMVCNVKKLINEKKEDGKVFWQNLAGYKRQEALRPYLSSEEDRKKGKKFARYQLGDLLLHLEKKHGEDWGKVYDEAWERIDKKVEGLSKHIKLEEERRSEDAQSKAALTDWLRAKASFVIEGLKEADKDEFCRCELKLQKWYGDLRGKPFAIEAENSILDISGFSKQYNCAFIWQKDGVKKLNLYLIINYFKGGKLRFKKIKPEAFEANRFYTVINKKSGEIVPMEVNFNFDDPNLIILPLAFGKRQGREFIWNDLLSLETGSLKLANGRVIEKTLYNRRTRQDEPALFVALTFERREVLDSSNIKPMNLIGVDRGENIPAVIALTDPEGCPLSRFKDSLGNPTHILRIRESYKEKQRTIQAKKEVEQRRAGGYSRKYASKAKNLADDMVRNTARDLLYYAVTQDAMLIFENLSRGFGRQGKRTFMAERQYTRMEDWLTAKLAYEGLPSKTYLSKTLAQYTSKTCSNCGFTITSADYDRVLEKLKKTATGWMTTINGKELKVEGQITYYNRYKRQNVVKDLSVELDRLSEESVNNDISSWTKGRSGEALSLLKKRFSHRPVQEKFVCLNCGFETHADEQAALNIARSWLFLRSQEYKKYQTNKTTGNTDKRAFVETWQSFYRKKLKEVWKPAV

SEQ ID NO: 35250 - protein, 978 aa, synthetic construct
  REGION 1..978: note = engineered CasX variant
QEIKRINKIRRRLVKDSNTKKAGKTGPMKTLLVRVMTPDLRERLENLRKKPENIPQPISNTSRANLNKLLTDYTEMKKAILHVYWEEFQKDPVGLMSRVAQPASKKIDQNKLKPEMDEKGNLTTAGFACSQCGQPLFVYKLEQVSEKGKAYTNYFGRCNVAEHEKLILLSQLKPEKDSDEAVTYSLGKFGQRALDFYSIHVTKESTHPVKPLAQIAGNRYASAPVGKALSDACMGTIASFLSKYQDIIIEHQKVVKGNQKRLESLRELAGKENLEYPSVTLPPQPHTKEGVDAYNEVIARVRMWVNLNLWQKLKLSRDDAKPLLRLKGFPSFPLVERQANEVDWWDMVCNVKKLINEKKEDGKVFWQNLAGYKRQEALRPYLSSEEDRKKGKKFARYQLGDLLLHLEKKHGEDWGKVYDEAWERIDKKVEGLSKHIKLEEERRSEDAQSKAALTDWLRAKASFVIEGLKEADKDEFCRCELKLQKWYGDLRGKPFAIEAENSILDISGFSKQYNCAFIWQKDGVKKLNLYLIINYFKGGKLRFKKIKPEAFEANRFYTVINKKSGEIVPMEVNFNFDDPNLIILPLAFGKRQGREFIWNDLLSLETGSLKLANGRVIEKTLYNRRTRQDEPALFVALTFERREVLDSSNIKPMNLIGVDRGENIPAVIALTDPEGCPLSRFKDSLGNPTHILRIRESYKEKQRTIQAKKEVEQRRAGGYSRKYASKAKNLADDMVRNTARDLLYYAVTQDAMLIFENLSRGFGRQGKRTFMAERQYTRMEDWLTAKLAYEGLPSKTYLSKTLAQYTSKTCSNCGFTITSADYDRVLEKLKKTATGWMTTINGKELKVEGQITYYNRYKRQNVVKDLSVELDRLSEESVNNDISSWTKGRSGEALSLLKKRFSHRPVQEKFVCLNCGFETHADEQAALNIARSWLFLRSQEYKKYQTNKTTGNTDKRAFVETWQSFYRKKLKEVWKPAV

SEQ ID NO: 35251 - protein, 978 aa, synthetic construct
  REGION 1..978: note = engineered CasX variant
QEIKRINKIRRRLVKDSNTKKAGKTGPMKTLLVRVMTPDLRERLENLRKKPENIPQPISNTSRANLNKLLTDYTEMKKAILHVYWEEFQKDPVGLMSRVAQPASKKIDQNKLKPEMDEKGNLTTAGFACSQCGQPLFVYKLEQVSEKGKAYTNYFGRCNVAEHEKLILLSQLKPEKDSDEAVTYSLGKFGQRALDFYSIHVTKESTHPVKPLAQIAGNRYASVPVGKALSDACMGTIASFLSKYQDIIIEHQKVVKGNQKRLESLRELAGKENLEYPSVTLPPQPHTKEGVDAYNEVIARVRMWVNLNLWQKLKLSRDDAKPLLRLKGFPSFPLVERQANEVDWWDMVCNVKKLINEKKEDGKVFWQNLAGYKRQEALRPYLSSEEDRKKGKKFARYQLGDLLLHLEKKHGEDWGKVYDEAWERIDKKVEGLSKHIKLEEERRSEDAQSKAALTDWLRAKASFVIEGLKEADKDEFCRCELKLQKWYGDLRGKPFAIEAENSILDISGFSKQYNCAFIWQKDGVKKLNLYLIINYFKGGKLRFKKIKPEAFEANRFYTVINKKSGEIVPMEVNFNFDDPNLIILPLAFGKRQGREFIWNDLLSLETGSLKLANGRVIEKTLYNRRTRQDEPALFVALTFERREVLDSSNIKPMNLIGVDRGENIPAVIALTDPEGCPLSRFKDSLGNPTHILRIRESYKEKQRTIQAKKEVEQRRAGGYSRKYASKAKNLADDMVRNTARDLLYYAVTQDAMLIFENLSRGFGRQGKRTFMAERQYTRMEDWLTAKLAYEGLPSKTYLSKTLAQYTSKTCSNCGFTITSADYDRVLEKLKKTATGWMTTINGKELKVEGQITYYNRYKRQNVVKDLSVELDRLSEESVNNDISSWTKGRSGEALSLLKKRFSHRPVQEKFVCLNCGFETHADEQAALNIARSWLFLRSQEYKKYQTNKTTGNTDKRAFVETWQSFYRKKLKEVWKPAV

SEQ ID NO: 35252 - protein, 978 aa, synthetic construct
  REGION 1..978: note = engineered CasX variant
QEIKRINKIRRRLVKDSNTKKAGKTGPMKTLLVRVMTPDLRERLENLRKKPENIPQPISNTSRANLNKLLTDYTEMKKAILHVYWEEFQKDPVGLMSRVAQPASKKIDQNKLKPEMDEKGNLTTAGFACSQCGQPLFVYKLEQVSEKGKAYTNYFGRCNVAEHEKLIKLSQLKPEKDSDEAVTYSLGKFGQRALDFYSIHVTKESTHPVKPLAQIAGNRYASGPVGKALSDACMGTIASFLSKYQDIIIEHQKVVKGNQKRLESLRELAGKENLEYPSVTLPPQPHTKEGVDAYNEVIARVRMWVNLNLWQKLKLSRDDAKPLLRLKGFPSFPLVERQANEVDWWDMVCNVKKLINEKKEDGKVFWQNLAGYKRQEALRPYLSSEEDRKKGKKFARYQLGDLLLHLEKKHGEDWGKVYDEAWERIDKKVEGLSKHIKLEEERRSEDAQSKAALTDWLRAKASFVIEGLKEADKDEFCRCELKLQKWYGDLRGKPFAIEAENSILDISGFSKQYNCAFIWQKDGVKKLNLYLIINYFKGGKLRFKKIKPEAFEANRFYTVINKKSGEIVPMEVNFNFDDPNLIILPLAFGKRQGREFIWNDLLSLETGSLKLANGRVIEKTLYNRRTRQDEPALFVALTFERREVLDSSNIKPMNLIGVDRGENIPAVIALTDPEGCPLSRFKDSLGNPTHILRIRESYKEKQRTIQAKKEVEQRRAGGYSRKYASKAKNLADDMVRNTARDLLYYAVTQDAMLIFENLSRGFGRQGKRTFMAERQYTRMEDWLTAKLAYEGLPSKTYLSKTLAQYTSKTCSNCGFTITSADYDRVLEKLKKTATGWMTTINGKELKVEGQITYYNRYKRQNVVKDLSVELDRLSEESVNNDISSWTKGRSGEALSLLKKRFSHRPVQEKFVCLNCGFETHADEQAALNIARSWLFLRSQEYKKYQTNKTTGNTDKRAFVETWQSFYRKKLKEVWKPAV

SEQ ID NO: 35253 - protein, 977 aa, synthetic construct
  REGION 1..977: note = engineered CasX variant
QEIKRINKIRRRLVKDSNTKKAGKTGPMKTLLVRVMTPDLRERLENLRKKPENIPQPISNTSRANLNKLLTDYTEMKKAILHVYWEEFQKDPVGLMSRVAQPASKKIDQNKLKPEMDEKGNLTTAGFACSQCGQPLFVYKLEQVSEKGKAYTNYFGRCNVAEHEKLILLSQLKPEKDSDEAVTYSLGKFGQRALDFYSIHVTKESTHPVKPLAQIAGNRYASPVGKALSDACMGTIASFLSKYQDIIIEHQKVVKGNQKRLESLRELAGKENLEYPSVTLPPQPHTKEGVDAYNEVIARVRMWVNLNLWQKLKLSRDDAKPLLRLKGFPSFPLVERQANEVDWWDMVCNVKKLINEKKEDGKVFWQNLAGYKRQEALRPYLSSEEDRKKGKKFARYQLGDLLLHLEKKHGEDWGKVYDEAWERIDKKVEGLSKHIKLEEERRSEDAQSKAALTDWLRAKASFVIEGLKEADKDEFCRCELKLQKWYGDLRGKPFAIEAENSILDISGFSKQYNCAFIWQKDGVKKLNLYLIINYFKGGKLRFKKIKPEAFEANRFYTVINKKSGEIVPMEVNFNFDDPNLIILPLAFGKRQGREFIWNDLLSLETGSLKLANGRVIEKTLYNRRTRQDEPALFVALTFERREVLDSSNIKPMNLIGVDRGENIPAVIALTDPEGCPLSRFKDSLGNPTHILRIRESYKEKQRTIQAKKEVEQRRAGGYSRKYASKAKNLADDMVRNTARDLLYYAVTQDAMLIFENLSRGFGRQGKRTFMAERQYTRMEDWLTAKLAYEGLPSKTYLSKTLAQYTSKTCSNCGFTITSADYDRVLEKLKKTATGWMTTINGKELKVEGQITYYNRYKRQNVVKDLSVELDRLSEESVNNDISSWTKGRSGEALSLLKKRFSHRPVQEKFVCLNCGFETHADEQAALNIARSWLFLRSQEYKKYQTNKTTGNTDKRAFVETWQSFYRKKLKEVWKPAV

SEQ ID NO: 35254 - protein, 978 aa, synthetic construct
  REGION 1..978: note = engineered CasX variant
QEIKRINKIRRRLVKDSNTKKAGKTGPMKTLLVRVMTPDLRERLENLRKKPENIPQPISNTSRANLNKLLTDYTEMKKAILHVYWEEFQKDPVGLMSRVAQPASKKIDQNKLKPEMDEKGNLTTAGFACSQCGQPLFVYKLEQVSEKGKAYTNYFGRCNVAEHEKLILLSQLKPEKDSDEAVTYSLGKFGQRALDFYSIHVTKESTHPVKPLAQIAGNRYASYPVGKALSDACMGTIASFLSKYQDIIIEHQKVVKGNQKRLESLRELAGKENLEYPSVTLPPQPHTKEGVDAYNEVIARVRMWVNLNLWQKLKLSRDDAKPLLRLKGFPSFPLVERQANEVDWWDMVCNVKKLINEKKEDGKVFWQNLAGYKRQEALRPYLSSEEDRKKGKKFARYQLGDLLLHLEKKHGEDWGKVYDEAWERIDKKVEGLSKHIKLEEERRSEDAQSKAALTDWLRAKASFVIEGLKEADKDEFCRCELKLQKWYGDLRGKPFAIEAENSILDISGFSKQYNCAFIWQKDGVKKLNLYLIINYFKGGKLRFKKIKPEAFEANRFYTVINKKSGEIVPMEVNFNFDDPNLIILPLAFGKRQGREFIWNDLLSLETGSLKLANGRVIEKTLYNRRTRQDEPALFVALTFERREVLDSSNIKPMNLIGVDRGENIPAVIALTDPEGCPLSRFKDSLGNPTHILRIGESYKEKQRTIQAKKEVEQRRAGGYSRKYASKAKNLADDMVRNTARDLLYYAVTQDAMLIFENLSRGFGRQGKRTFSAERQYTRMEDWLTAKLAYEGLPSKTYLSKTLAQYTSKTCSNCGFTITSADYDRVLEKLKKTATGWMTTINGKELKVEGQITYYNRYKRQNVVKDLSVELDRLSEESVNNDISSWTKGRSGEALSLLKKRFSHRPVQEKFVCLNCGFETHADEQAALNIARSWLFLRSQEYKKYQTNKTTGNTDKRAFVETWQSFYRKKLKEVWKPAV

SEQ ID NO: 35255 - protein, 978 aa, synthetic construct
  REGION 1..978: note = engineered CasX variant
QEIKRINKIRRRLVKDSNTKKAGKTGPMKTLLVRVMTPDLRERLENLRKKPENIPQPISNTSRANLNKLLTDYTEMKKAILHVYWEEFQKDPVGLMSRVAQPASKKIDQNKLKPEMDEKGNLTTAGFACSQCGQPLFVYKLEQVSEKGKAYTNYFGRCNVAEHEKLILLSQLKPEKDSDEAVTYSLGKFGQRALDFYSIHVTKESTHPVKPLAQIAGNRYASHPVGKALSDACMGTIASFLSKYQDIIIEHQKVVKGNQKRLESLRELAGKENLEYPSVTLPPQPHTKEGVDAYNEVIARVRMWVNLNLWQKLKLSRDDAKPLLRLKGFPSFPLVERQANEVDWWDMVCNVKKLINEKKEDGKVFWQNLAGYKRQEALRPYLSSEEDRKKGKKFARYQLGDLLLHLEKKHGEDWGKVYDEAWERIDKKVEGLSKHIKLEEERRSEDAQSKAALTDWLRAKASFVIEGLKEADKDEFCRCELKLQKWYGDLRGKPFAIEAENSILDISGFSKQYNCAFIWQKDGVKKLNLYLIINYFKGGKLRFKKIKPEAFEANRFYTVINKKSGEIVPMEVNFNFDDPNLIILPLAFGKRQGREFIWNDLLSLETGSLKLANGRVIEKTLYNRRTRQDEPALFVALTFERREVLDSSNIKPMNLIGVDRGENIPAVIALTDPEGCPLSRFKDSLGNPTHILRIGESYKEKQRTIQAKKEVEQRRAGGYSRKYASKAKNLADDMVRNTARDLLYYAVTQDAMLIFENLSRGFGRQGKRTFSAERQYTRMEDWLTAKLAYEGLPSKTYLSKTLAQYTSKTCSNCGFTITSADYDRVLEKLKKTATGWMTTINGKELKVEGQITYYNRYKRQNVVKDLSVELDRLSEESVNNDISSWTKGRSGEALSLLKKRFSHRPVQEKFVCLNCGFETHADEQAALNIARSWLFLRSQEYKKYQTNKTTGNTDKRAFVETWQSFYRKKLKEVWKPAV

SEQ ID NO: 35256 - protein, 978 aa, synthetic construct
  REGION 1..978: note = engineered CasX variant
QEIKRINKIRRRLVKDSNTKKAGKTGPMKTLLVRVMTPDLRERLENLRKKPENIPQPISNTSRANLNKLLTDYTEMKKAILHVYWEEFQKDPVGLMSRVAQPASKKIDQNKLKPEMDEKGNLTTAGFACSQCGQPLFVYKLEQVSEKGKAYTNYFGRCNVAEHEKLILLSQLKPEKDSDEAVTYSLGKFGQRALDFYSIHVTKESTHPVKPLAQIAGNRYASSPVGKALSDACMGTIASFLSKYQDIIIEHQKVVKGNQKRLESLRELAGKENLEYPSVTLPPQPHTKEGVDAYNEVIARVRMWVNLNLWQKLKLSRDDAKPLLRLKGFPSFPLVERQANEVDWWDMVCNVKKLINEKKEDGKVFWQNLAGYKRQEALRPYLSSEEDRKKGKKFARYQLGDLLLHLEKKHGEDWGKVYDEAWERIDKKVEGLSKHIKLEEERRSEDAQSKAALTDWLRAKASFVIEGLKEADKDEFCRCELKLQKWYGDLRGKPFAIEAENSILDISGFSKQYNCAFIWQKDGVKKLNLYLIINYFKGGKLRFKKIKPEAFEANRFYTVINKKSGEIVPMEVNFNFDDPNLIILPLAFGKRQGREFIWNDLLSLETGSLKLANGRVIEKTLYNRRTRQDEPALFVALTFERREVLDSSNIKPMNLIGVDRGENIPAVIALTDPEGCPLSRFKDSLGNPTHILRIGESYKEKQRTIQAKKEVEQRRAGGYSRKYASKAKNLADDMVRNTARDLLYYAVTQDAMLIFENLSRGFGRQGKRTFSAERQYTRMEDWLTAKLAYEGLPSKTYLSKTLAQYTSKTCSNCGFTITSADYDRVLEKLKKTATGWMTTINGKELKVEGQITYYNRYKRQNVVKDLSVELDRLSEESVNNDISSWTKGRSGEALSLLKKRFSHRPVQEKFVCLNCGFETHADEQAALNIARSWLFLRSQEYKKYQTNKTTGNTDKRAFVETWQSFYRKKLKEVWKPAV

SEQ ID NO: 35257 - protein, 978 aa, synthetic construct
  REGION 1..978: note = engineered CasX variant
QEIKRINKIRRRLVKDSNTKKAGKTGPMKTLLVRVMTPDLRERLENLRKKPENIPQPISNTSRANLNKLLTDYTEMKKAILHVYWEEFQKDPVGLMSRVAQPASKKIDQNKLKPEMDEKGNLTTAGFACSQCGQPLFVYKLEQVSEKGKAYTNYFGRCNVAEHEKLILLSQLKPEKDSDEAVTYSLGKFGQRALDFYSIHVTKESTHPVKPLAQIAGNRYASTPVGKALSDACMGTIASFLSKYQDIIIEHQKVVKGNQKRLESLRELAGKENLEYPSVTLPPQPHTKEGVDAYNEVIARVRMWVNLNLWQKLKLSRDDAKPLLRLKGFPSFPLVERQANEVDWWDMVCNVKKLINEKKEDGKVFWQNLAGYKRQEALRPYLSSEEDRKKGKKFARYQLGDLLLHLEKKHGEDWGKVYDEAWERIDKKVEGLSKHIKLEEERRSEDAQSKAALTDWLRAKASFVIEGLKEADKDEFCRCELKLQKWYGDLRGKPFAIEAENSILDISGFSKQYNCAFIWQKDGVKKLNLYLIINYFKGGKLRFKKIKPEAFEANRFYTVINKKSGEIVPMEVNFNFDDPNLIILPLAFGKRQGREFIWNDLLSLETGSLKLANGRVIEKTLYNRRTRQDEPALFVALTFERREVLDSSNIKPMNLIGVDRGENIPAVIALTDPEGCPLSRFKDSLGNPTHILRIGESYKEKQRTIQAKKEVEQRRAGGYSRKYASKAKNLADDMVRNTARDLLYYAVTQDAMLIFENLSRGFGRQGKRTFSAERQYTRMEDWLTAKLAYEGLPSKTYLSKTLAQYTSKTCSNCGFTITSADYDRVLEKLKKTATGWMTTINGKELKVEGQITYYNRYKRQNVVKDLSVELDRLSEESVNNDISSWTKGRSGEALSLLKKRFSHRPVQEKFVCLNCGFETHADEQAALNIARSWLFLRSQEYKKYQTNKTTGNTDKRAFVETWQSFYRKKLKEVWKPAV

SEQ ID NO: 35258 - protein, 978 aa, synthetic construct
  REGION 1..978: note = engineered CasX variant
QEIKRINKIRRRLVKDSNTKKAGKTGPMKTLLVRVMTPDLRERLENLRKKPENIPQPISNTSRANLNKLLTDYTEMKKAILHVYWEEFQKDPVGLMSRVAQPASKKIDQNKLKPEMDEKGNLTTAGFACSQCGQPLFVYKLEQVSEKGKAYTNYFGRCNVAEHEKLILLSQLKPEKDSDEAVTYSLGKFGQRALDFYSIHVTKESTHPVKPLAQIAGNRYASAPVGKALSDACMGTIASFLSKYQDIIIEHQKVVKGNQKRLESLRELAGKENLEYPSVTLPPQPHTKEGVDAYNEVIARVRMWVNLNLWQKLKLSRDDAKPLLRLKGFPSFPLVERQANEVDWWDMVCNVKKLINEKKEDGKVFWQNLAGYKRQEALRPYLSSEEDRKKGKKFARYQLGDLLLHLEKKHGEDWGKVYDEAWERIDKKVEGLSKHIKLEEERRSEDAQSKAALTDWLRAKASFVIEGLKEADKDEFCRCELKLQKWYGDLRGKPFAIEAENSILDISGFSKQYNCAFIWQKDGVKKLNLYLIINYFKGGKLRFKKIKPEAFEANRFYTVINKKSGEIVPMEVNFNFDDPNLIILPLAFGKRQGREFIWNDLLSLETGSLKLANGRVIEKTLYNRRTRQDEPALFVALTFERREVLDSSNIKPMNLIGVDRGENIPAVIALTDPEGCPLSRFKDSLGNPTHILRIGESYKEKQRTIQAKKEVEQRRAGGYSRKYASKAKNLADDMVRNTARDLLYYAVTQDAMLIFENLSRGFGRQGKRTFSAERQYTRMEDWLTAKLAYEGLPSKTYLSKTLAQYTSKTCSNCGFTITSADYDRVLEKLKKTATGWMTTINGKELKVEGQITYYNRYKRQNVVKDLSVELDRLSEESVNNDISSWTKGRSGEALSLLKKRFSHRPVQEKFVCLNCGFETHADEQAALNIARSWLFLRSQEYKKYQTNKTTGNTDKRAFVETWQSFYRKKLKEVWKPAV

SEQ ID NO: 35259 - protein, 978 aa, synthetic construct
  REGION 1..978: note = engineered CasX variant
QEIKRINKIRRRLVKDSNTKKAGKTGPMKTLLVRVMTPDLRERLENLRKKPENIPQPISNTSRANLNKLLTDYTEMKKAILHVYWEEFQKDPVGLMSRVAQPASKKIDQNKLKPEMDEKGNLTTAGFACSQCGQPLFVYKLEQVSEKGKAYTNYFGRCNVAEHEKLILLSQLKPEKDSDEAVTYSLGKFGQRALDFYSIHVTKESTHPVKPLAQIAGNRYASVPVGKALSDACMGTIASFLSKYQDIIIEHQKVVKGNQKRLESLRELAGKENLEYPSVTLPPQPHTKEGVDAYNEVIARVRMWVNLNLWQKLKLSRDDAKPLLRLKGFPSFPLVERQANEVDWWDMVCNVKKLINEKKEDGKVFWQNLAGYKRQEALRPYLSSEEDRKKGKKFARYQLGDLLLHLEKKHGEDWGKVYDEAWERIDKKVEGLSKHIKLEEERRSEDAQSKAALTDWLRAKASFVIEGLKEADKDEFCRCELKLQKWYGDLRGKPFAIEAENSILDISGFSKQYNCAFIWQKDGVKKLNLYLIINYFKGGKLRFKKIKPEAFEANRFYTVINKKSGEIVPMEVNFNFDDPNLIILPLAFGKRQGREFIWNDLLSLETGSLKLANGRVIEKTLYNRRTRQDEPALFVALTFERREVLDSSNIKPMNLIGVDRGENIPAVIALTDPEGCPLSRFKDSLGNPTHILRIGESYKEKQRTIQAKKEVEQRRAGGYSRKYASKAKNLADDMVRNTARDLLYYAVTQDAMLIFENLSRGFGRQGKRTFSAERQYTRMEDWLTAKLAYEGLPSKTYLSKTLAQYTSKTCSNCGFTITSADYDRVLEKLKKTATGWMTTINGKELKVEGQITYYNRYKRQNVVKDLSVELDRLSEESVNNDISSWTKGRSGEALSLLKKRFSHRPVQEKFVCLNCGFETHADEQAALNIARSWLFLRSQEYKKYQTNKTTGNTDKRAFVETWQSFYRKKLKEVWKPAV

SEQ ID NO: 35260 - protein, 978 aa, synthetic construct
  REGION 1..978: note = engineered CasX variant
QEIKRINKIRRRLVKDSNTKKAGKTGPMKTLLVRVMTPDLRERLENLRKKPENIPQPISNTSRANLNKLLTDYTEMKKAILHVYWEEFQKDPVGLMSRVAQPASKKIDQNKLKPEMDEKGNLTTAGFACSQCGQPLFVYKLEQVSEKGKAYTNYFGRCNVAEHEKLIKLSQLKPEKDSDEAVTYSLGKFGQRALDFYSIHVTKESTHPVKPLAQIAGNRYASGPVGKALSDACMGTIASFLSKYQDIIIEHQKVVKGNQKRLESLRELAGKENLEYPSVTLPPQPHTKEGVDAYNEVIARVRMWVNLNLWQKLKLSRDDAKPLLRLKGFPSFPLVERQANEVDWWDMVCNVKKLINEKKEDGKVFWQNLAGYKRQEALRPYLSSEEDRKKGKKFARYQLGDLLLHLEKKHGEDWGKVYDEAWERIDKKVEGLSKHIKLEEERRSEDAQSKAALTDWLRAKASFVIEGLKEADKDEFCRCELKLQKWYGDLRGKPFAIEAENSILDISGFSKQYNCAFIWQKDGVKKLNLYLIINYFKGGKLRFKKIKPEAFEANRFYTVINKKSGEIVPMEVNFNFDDPNLIILPLAFGKRQGREFIWNDLLSLETGSLKLANGRVIEKTLYNRRTRQDEPALFVALTFERREVLDSSNIKPMNLIGVDRGENIPAVIALTDPEGCPLSRFKDSLGNPTHILRIGESYKEKQRTIQAKKEVEQRRAGGYSRKYASKAKNLADDMVRNTARDLLYYAVTQDAMLIFENLSRGFGRQGKRTFSAERQYTRMEDWLTAKLAYEGLPSKTYLSKTLAQYTSKTCSNCGFTITSADYDRVLEKLKKTATGWMTTINGKELKVEGQITYYNRYKRQNVVKDLSVELDRLSEESVNNDISSWTKGRSGEALSLLKKRFSHRPVQEKFVCLNCGFETHADEQAALNIARSWLFLRSQEYKKYQTNKTTGNTDKRAFVETWQSFYRKKLKEVWKPAV

SEQ ID NO: 35261 - protein, 977 aa, synthetic construct
  REGION 1..977: note = engineered CasX variant
QEIKRINKIRRRLVKDSNTKKAGKTGPMKTLLVRVMTPDLRERLENLRKKPENIPQPISNTSRANLNKLLTDYTEMKKAILHVYWEEFQKDPVGLMSRVAQPASKKIDQNKLKPEMDEKGNLTTAGFACSQCGQPLFVYKLEQVSEKGKAYTNYFGRCNVAEHEKLILLSQLKPEKDSDEAVTYSLGKFGQRALDFYSIHVTKESTHPVKPLAQIAGNRYASPVGKALSDACMGTIASFLSKYQDIIIEHQKVVKGNQKRLESLRELAGKENLEYPSVTLPPQPHTKEGVDAYNEVIARVRMWVNLNLWQKLKLSRDDAKPLLRLKGFPSFPLVERQANEVDWWDMVCNVKKLINEKKEDGKVFWQNLAGYKRQEALRPYLSSEEDRKKGKKFARYQLGDLLLHLEKKHGEDWGKVYDEAWERIDKKVEGLSKHIKLEEERRSEDAQSKAALTDWLRAKASFVIEGLKEADKDEFCRCELKLQKWYGDLRGKPFAIEAENSILDISGFSKQYNCAFIWQKDGVKKLNLYLIINYFKGGKLRFKKIKPEAFEANRFYTVINKKSGEIVPMEVNFNFDDPNLIILPLAFGKRQGREFIWNDLLSLETGSLKLANGRVIEKTLYNRRTRQDEPALFVALTFERREVLDSSNIKPMNLIGVDRGENIPAVIALTDPEGCPLSRFKDSLGNPTHILRIGESYKEKQRTIQAKKEVEQRRAGGYSRKYASKAKNLADDMVRNTARDLLYYAVTQDAMLIFENLSRGFGRQGKRTFSAERQYTRMEDWLTAKLAYEGLPSKTYLSKTLAQYTSKTCSNCGFTITSADYDRVLEKLKKTATGWMTTINGKELKVEGQITYYNRYKRQNVVKDLSVELDRLSEESVNNDISSWTKGRSGEALSLLKKRFSHRPVQEKFVCLNCGFETHADEQAALNIARSWLFLRSQEYKKYQTNKTTGNTDKRAFVETWQSFYRKKLKEVWKPAV

SEQ ID NO: 35262 - protein, 978 aa, synthetic construct
  REGION 1..978: note = engineered CasX variant
QEIKRINKIRRRLVKDSNTKKAGKTGPMKTLLVRVMTPDLRERLENLRKKPENIPQPISNTSRANLNKLLTDYTEMKKAILHVYWEEFQKDPVGLMSRVAQPASKKIDQNKLKPEMDEKGNLTTAGFACSQCGQPLFVYKLEQVSEKGKAYTNYFGRCNVAEHEKLILLSQLKPEKDSDEAVTYSLGKFGQRALDFYSIHVTKESTHPVKPLAQIAGNRYASYPVGKALSDACMGTIASFLSKYQDIIIEHQKVVKGNQKRLESLRELAGKENLEYPSVTLPPQPHTKEGVDAYNEVIARVRMWVNLNLWQKLKLSRDDAKPLLRLKGFPSFPLVERQANEVDWWDMVCNVKKLINEKKEDGKVFWQNLAGYKRQEALRPYLSSEEDRKKGKKFARYQLGDLLLHLEKKHGEDWGKVYDEAWERIDKKVEGLSKHIKLEEERRSEDAQSKAALTDWLRAKASFVIEGLKEADKDEFCRCELKLQKWYGDLRGKPFAIEAENSILDISGFSKQYNCAFIWQKDGVKKLNLYLIINYFKGGKLRFKKIKPEAFEANRFYTVINKKSGEIVPMEVNFNFDDPNLIILPLAFGKRQGREFIWNDLLSLETGSLKLANGRVIEKTLYNRRTRQDEPALFVALTFERREVLDSSNIKPMNLIGVDRGENIPAVIALTDPEGCPLSRFKDSLGNPTHILRIGESYKEKQRTIQAKKEVEQRRAGGYSRKYASKAKNLADDMVRNTARDLLYYAVTQDAMLIFENLSRGFGRQGKRTFMAERQYTRMEDWLTAKLAYEGLPSKTYLSKTLAQYTSKTCSNCGFTITSADYDRVLEKLKKTATGWMTTINGKELKVEGQITYYNRYKRQNVVKDLSVELDRLSEESVNNDISSWDKGRSGEALSLLKKRFSHRPVQEKFVCLNCGFETHADEQAALNIARSWLFLRSQEYKKYQTNKTTGNTDKRAFVETWQSFYRKKLKEVWKPAV

SEQ ID NO: 35263 - protein, 978 aa, synthetic construct
  REGION 1..978: note = engineered CasX variant
QEIKRINKIRRRLVKDSNTKKAGKTGPMKTLLVRVMTPDLRERLENLRKKPENIPQPISNTSRANLNKLLTDYTEMKKAILHVYWEEFQKDPVGLMSRVAQPASKKIDQNKLKPEMDEKGNLTTAGFACSQCGQPLFVYKLEQVSEKGKAYTNYFGRCNVAEHEKLILLSQLKPEKDSDEAVTYSLGKFGQRALDFYSIHVTKESTHPVKPLAQIAGNRYASHPVGKALSDACMGTIASFLSKYQDIIIEHQKVVKGNQKRLESLRELAGKENLEYPSVTLPPQPHTKEGVDAYNEVIARVRMWVNLNLWQKLKLSRDDAKPLLRLKGFPSFPLVERQANEVDWWDMVCNVKKLINEKKEDGKVFWQNLAGYKRQEALRPYLSSEEDRKKGKKFARYQLGDLLLHLEKKHGEDWGKVYDEAWERIDKKVEGLSKHIKLEEERRSEDAQSKAALTDWLRAKASFVIEGLKEADKDEFCRCELKLQKWYGDLRGKPFAIEAENSILDISGFSKQYNCAFIWQKDGVKKLNLYLIINYFKGGKLRFKKIKPEAFEANRFYTVINKKSGEIVPMEVNFNFDDPNLIILPLAFGKRQGREFIWNDLLSLETGSLKLANGRVIEKTLYNRRTRQDEPALFVALTFERREVLDSSNIKPMNLIGVDRGENIPAVIALTDPEGCPLSRFKDSLGNPTHILRIGESYKEKQRTIQAKKEVEQRRAGGYSRKYASKAKNLADDMVRNTARDLLYYAVTQDAMLIFENLSRGFGRQGKRTFMAERQYTRMEDWLTAKLAYEGLPSKTYLSKTLAQYTSKTCSNCGFTITSADYDRVLEKLKKTATGWMTTINGKELKVEGQITYYNRYKRQNVVKDLSVELDRLSEESVNNDISSWDKGRSGEALSLLKKRFSHRPVQEKFVCLNCGFETHADEQAALNIARSWLFLRSQEYKKYQTNKTTGNTDKRAFVETWQSFYRKKLKEVWKPAV

SEQ ID NO: 35264 - protein, 978 aa, synthetic construct
  REGION 1..978: note = engineered CasX variant
QEIKRINKIRRRLVKDSNTKKAGKTGPMKTLLVRVMTPDLRERLENLRKKPENIPQPISNTSRANLNKLLTDYTEMKKAILHVYWEEFQKDPVGLMSRVAQPASKKIDQNKLKPEMDEKGNLTTAGFACSQCGQPLFVYKLEQVSEKGKAYTNYFGRCNVAEHEKLILLSQLKPEKDSDEAVTYSLGKFGQRALDFYSIHVTKESTHPVKPLAQIAGNRYASSPVGKALSDACMGTIASFLSKYQDIIIEHQKVVKGNQKRLESLRELAGKENLEYPSVTLPPQPHTKEGVDAYNEVIARVRMWVNLNLWQKLKLSRDDAKPLLRLKGFPSFPLVERQANEVDWWDMVCNVKKLINEKKEDGKVFWQNLAGYKRQEALRPYLSSEEDRKKGKKFARYQLGDLLLHLEKKHGEDWGKVYDEAWERIDKKVEGLSKHIKLEEERRSEDAQSKAALTDWLRAKASFVIEGLKEADKDEFCRCELKLQKWYGDLRGKPFAIEAENSILDISGFSKQYNCAFIWQKDGVKKLNLYLIINYFKGGKLRFKKIKPEAFEANRFYTVINKKSGEIVPMEVNFNFDDPNLIILPLAFGKRQGREFIWNDLLSLETGSLKLANGRVIEKTLYNRRTRQDEPALFVALTFERREVLDSSNIKPMNLIGVDRGENIPAVIALTDPEGCPLSRFKDSLGNPTHILRIGESYKEKQRTIQAKKEVEQRRAGGYSRKYASKAKNLADDMVRNTARDLLYYAVTQDAMLIFENLSRGFGRQGKRTFMAERQYTRMEDWLTAKLAYEGLPSKTYLSKTLAQYTSKTCSNCGFTITSADYDRVLEKLKKTATGWMTTINGKELKVEGQITYYNRYKRQNVVKDLSVELDRLSEESVNNDISSWDKGRSGEALSLLKKRFSHRPVQEKFVCLNCGFETHADEQAALNIARSWLFLRSQEYKKYQTNKTTGNTDKRAFVETWQSFYRKKLKEVWKPAV

SEQ ID NO: 35265 - protein, 978 aa, synthetic construct
  REGION 1..978: note = engineered CasX variant
QEIKRINKIRRRLVKDSNTKKAGKTGPMKTLLVRVMTPDLRERLENLRKKPENIPQPISNTSRANLNKLLTDYTEMKKAILHVYWEEFQKDPVGLMSRVAQPASKKIDQNKLKPEMDEKGNLTTAGFACSQCGQPLFVYKLEQVSEKGKAYTNYFGRCNVAEHEKLILLSQLKPEKDSDEAVTYSLGKFGQRALDFYSIHVTKESTHPVKPLAQIAGNRYASTPVGKALSDACMGTIASFLSKYQDIIIEHQKVVKGNQKRLESLRELAGKENLEYPSVTLPPQPHTKEGVDAYNEVIARVRMWVNLNLWQKLKLSRDDAKPLLRLKGFPSFPLVERQANEVDWWDMVCNVKKLINEKKEDGKVFWQNLAGYKRQEALRPYLSSEEDRKKGKKFARYQLGDLLLHLEKKHGEDWGKVYDEAWERIDKKVEGLSKHIKLEEERRSEDAQSKAALTDWLRAKASFVIEGLKEADKDEFCRCELKLQKWYGDLRGKPFAIEAENSILDISGFSKQYNCAFIWQKDGVKKLNLYLIINYFKGGKLRFKKIKPEAFEANRFYTVINKKSGEIVPMEVNFNFDDPNLIILPLAFGKRQGREFIWNDLLSLETGSLKLANGRVIEKTLYNRRTRQDEPALFVALTFERREVLDSSNIKPMNLIGVDRGENIPAVIALTDPEGCPLSRFKDSLGNPTHILRIGESYKEKQRTIQAKKEVEQRRAGGYSRKYASKAKNLADDMVRNTARDLLYYAVTQDAMLIFENLSRGFGRQGKRTFMAERQYTRMEDWLTAKLAYEGLPSKTYLSKTLAQYTSKTCSNCGFTITSADYDRVLEKLKKTATGWMTTINGKELKVEGQITYYNRYKRQNVVKDLSVELDRLSEESVNNDISSWDKGRSGEALSLLKKRFSHRPVQEKFVCLNCGFETHADEQAALNIARSWLFLRSQEYKKYQTNKTTGNTDKRAFVETWQSFYRKKLKEVWKPAV

SEQ ID NO: 35266 - protein, 978 aa, synthetic construct
  REGION 1..978: note = engineered CasX variant
QEIKRINKIRRRLVKDSNTKKAGKTGPMKTLLVRVMTPDLRERLENLRKKPENIPQPISNTSRANLNKLLTDYTEMKKAILHVYWEEFQKDPVGLMSRVAQPASKKIDQNKLKPEMDEKGNLTTAGFACSQCGQPLFVYKLEQVSEKGKAYTNYFGRCNVAEHEKLILLSQLKPEKDSDEAVTYSLGKFGQRALDFYSIHVTKESTHPVKPLAQIAGNRYASAPVGKALSDACMGTIASFLSKYQDIIIEHQKVVKGNQKRLESLRELAGKENLEYPSVTLPPQPHTKEGVDAYNEVIARVRMWVNLNLWQKLKLSRDDAKPLLRLKGFPSFPLVERQANEVDWWDMVCNVKKLINEKKEDGKVFWQNLAGYKRQEALRPYLSSEEDRKKGKKFARYQLGDLLLHLEKKHGEDWGKVYDEAWERIDKKVEGLSKHIKLEEERRSEDAQSKAALTDWLRAKASFVIEGLKEADKDEFCRCELKLQKWYGDLRGKPFAIEAENSILDISGFSKQYNCAFIWQKDGVKKLNLYLIINYFKGGKLRFKKIKPEAFEANRFYTVINKKSGEIVPMEVNFNFDDPNLIILPLAFGKRQGREFIWNDLLSLETGSLKLANGRVIEKTLYNRRTRQDEPALFVALTFERREVLDSSNIKPMNLIGVDRGENIPAVIALTDPEGCPLSRFKDSLGNPTHILRIGESYKEKQRTIQAKKEVEQRRAGGYSRKYASKAKNLADDMVRNTARDLLYYAVTQDAMLIFENLSRGFGRQGKRTFMAERQYTRMEDWLTAKLAYEGLPSKTYLSKTLAQYTSKTCSNCGFTITSADYDRVLEKLKKTATGWMTTINGKELKVEGQITYYNRYKRQNVVKDLSVELDRLSEESVNNDISSWDKGRSGEALSLLKKRFSHRPVQEKFVCLNCGFETHADEQAALNIARSWLFLRSQEYKKYQTNKTTGNTDKRAFVETWQSFYRKKLKEVWKPAV

SEQ ID NO: 35267 - protein, 978 aa, synthetic construct
  REGION 1..978: note = engineered CasX variant
QEIKRINKIRRRLVKDSNTKKAGKTGPMKTLLVRVMTPDLRERLENLRKKPENIPQPISNTSRANLNKLLTDYTEMKKAILHVYWEEFQKDPVGLMSRVAQPASKKIDQNKLKPEMDEKGNLTTAGFACSQCGQPLFVYKLEQVSEKGKAYTNYFGRCNVAEHEKLILLSQLKPEKDSDEAVTYSLGKFGQRALDFYSIHVTKESTHPVKPLAQIAGNRYASVPVGKALSDACMGTIASFLSKYQDIIIEHQKVVKGNQKRLESLRELAGKENLEYPSVTLPPQPHTKEGVDAYNEVIARVRMWVNLNLWQKLKLSRDDAKPLLRLKGFPSFPLVERQANEVDWWDMVCNVKKLINEKKEDGKVFWQNLAGYKRQEALRPYLSSEEDRKKGKKFARYQLGDLLLHLEKKHGEDWGKVYDEAWERIDKKVEGLSKHIKLEEERRSEDAQSKAALTDWLRAKASFVIEGLKEADKDEFCRCELKLQKWYGDLRGKPFAIEAENSILDISGFSKQYNCAFIWQKDGVKKLNLYLIINYFKGGKLRFKKIKPEAFEANRFYTVINKKSGEIVPMEVNFNFDDPNLIILPLAFGKRQGREFIWNDLLSLETGSLKLANGRVIEKTLYNRRTRQDEPALFVALTFERREVLDSSNIKPMNLIGVDRGENIPAVIALTDPEGCPLSRFKDSLGNPTHILRIGESYKEKQRTIQAKKEVEQRRAGGYSRKYASKAKNLADDMVRNTARDLLYYAVTQDAMLIFENLSRGFGRQGKRTFMAERQYTRMEDWLTAKLAYEGLPSKTYLSKTLAQYTSKTCSNCGFTITSADYDRVLEKLKKTATGWMTTINGKELKVEGQITYYNRYKRQNVVKDLSVELDRLSEESVNNDISSWDKGRSGEALSLLKKRFSHRPVQEKFVCLNCGFETHADEQAALNIARSWLFLRSQEYKKYQTNKTTGNTDKRAFVETWQSFYRKKLKEVWKPAV

SEQ ID NO: 35268 - protein, 978 aa, synthetic construct
  REGION 1..978: note = engineered CasX variant
QEIKRINKIRRRLVKDSNTKKAGKTGPMKTLLVRVMTPDLRERLENLRKKPENIPQPISNTSRANLNKLLTDYTEMKKAILHVYWEEFQKDPVGLMSRVAQPASKKIDQNKLKPEMDEKGNLTTAGFACSQCGQPLFVYKLEQVSEKGKAYTNYFGRCNVAEHEKLIKLSQLKPEKDSDEAVTYSLGKFGQRALDFYSIHVTKESTHPVKPLAQIAGNRYASGPVGKALSDACMGTIASFLSKYQDIIIEHQKVVKGNQKRLESLRELAGKENLEYPSVTLPPQPHTKEGVDAYNEVIARVRMWVNLNLWQKLKLSRDDAKPLLRLKGFPSFPLVERQANEVDWWDMVCNVKKLINEKKEDGKVFWQNLAGYKRQEALRPYLSSEEDRKKGKKFARYQLGDLLLHLEKKHGEDWGKVYDEAWERIDKKVEGLSKHIKLEEERRSEDAQSKAALTDWLRAKASFVIEGLKEADKDEFCRCELKLQKWYGDLRGKPFAIEAENSILDISGFSKQYNCAFIWQKDGVKKLNLYLIINYFKGGKLRFKKIKPEAFEANRFYTVINKKSGEIVPMEVNFNFDDPNLIILPLAFGKRQGREFIWNDLLSLETGSLKLANGRVIEKTLYNRRTRQDEPALFVALTFERREVLDSSNIKPMNLIGVDRGENIPAVIALTDPEGCPLSRFKDSLGNPTHILRIGESYKEKQRTIQAKKEVEQRRAGGYSRKYASKAKNLADDMVRNTARDLLYYAVTQDAMLIFENLSRGFGRQGKRTFMAERQYTRMEDWLTAKLAYEGLPSKTYLSKTLAQYTSKTCSNCGFTITSADYDRVLEKLKKTATGWMTTINGKELKVEGQITYYNRYKRQNVVKDLSVELDRLSEESVNNDISSWDKGRSGEALSLLKKRFSHRPVQEKFVCLNCGFETHADEQAALNIARSWLFLRSQEYKKYQTNKTTGNTDKRAFVETWQSFYRKKLKEVWKPAV

SEQ ID NO: 35269 - protein, 977 aa, synthetic construct
  REGION 1..977: note = engineered CasX variant
QEIKRINKIRRRLVKDSNTKKAGKTGPMKTLLVRVMTPDLRERLENLRKKPENIPQPISNTSRANLNKLLTDYTEMKKAILHVYWEEFQKDPVGLMSRVAQPASKKIDQNKLKPEMDEKGNLTTAGFACSQCGQPLFVYKLEQVSEKGKAYTNYFGRCNVAEHEKLILLSQLKPEKDSDEAVTYSLGKFGQRALDFYSIHVTKESTHPVKPLAQIAGNRYASPVGKALSDACMGTIASFLSKYQDIIIEHQKVVKGNQKRLESLRELAGKENLEYPSVTLPPQPHTKEGVDAYNEVIARVRMWVNLNLWQKLKLSRDDAKPLLRLKGFPSFPLVERQANEVDWWDMVCNVKKLINEKKEDGKVFWQNLAGYKRQEALRPYLSSEEDRKKGKKFARYQLGDLLLHLEKKHGEDWGKVYDEAWERIDKKVEGLSKHIKLEEERRSEDAQSKAALTDWLRAKASFVIEGLKEADKDEFCRCELKLQKWYGDLRGKPFAIEAENSILDISGFSKQYNCAFIWQKDGVKKLNLYLIINYFKGGKLRFKKIKPEAFEANRFYTVINKKSGEIVPMEVNFNFDDPNLIILPLAFGKRQGREFIWNDLLSLETGSLKLANGRVIEKTLYNRRTRQDEPALFVALTFERREVLDSSNIKPMNLIGVDRGENIPAVIALTDPEGCPLSRFKDSLGNPTHILRIGESYKEKQRTIQAKKEVEQRRAGGYSRKYASKAKNLADDMVRNTARDLLYYAVTQDAMLIFENLSRGFGRQGKRTFMAERQYTRMEDWLTAKLAYEGLPSKTYLSKTLAQYTSKTCSNCGFTITSADYDRVLEKLKKTATGWMTTINGKELKVEGQITYYNRYKRQNVVKDLSVELDRLSEESVNNDISSWDKGRSGEALSLLKKRFSHRPVQEKFVCLNCGFETHADEQAALNIARSWLFLRSQEYKKYQTNKTTGNTDKRAFVETWQSFYRKKLKEVWKPAV

SEQ ID NO: 35270 - protein, 978 aa, synthetic construct
  REGION 1..978: note = engineered CasX variant
QEIKRINKIRRRLVKDSNTKKAGKTGPMKTLLVRVMTPDLRERLENLRKKPENIPQPISNTSRANLNKLLTDYTEMKKAILHVYWEEFQVDPVGLMSRVAQPASKKIDQNKLKPEMDEKGNLTTAGFACSQCGQPLFVYKLEQVSEKGKAYTNYFGRCNVAEHEKLILLSQLKPEKDSDEAVTYSLGKFGQRALDFYSIHVTKESTHPVKPLAQIAGNRYASYPVGKALSDACMGTIASFLSKYQDIIIEHQKVVKGNQKRLESLRELAGKENLEYPSVTLPPQPHTKEGVDAYNEVIARVRMWVNLNLWQKLKLSRDDAKPLLRLKGFPSFPLVERQANEVDWWDMVCNVKKLINEKKEDGKVFWQNLAGYKRQEALRPYLSSEEDRKKGKKFARYQLGDLLLHLEKKHGEDWGKVYDEAWERIDKKVEGLSKHIKLEEERRSEDAQSKAALTDWLRAKASFVIEGLKEADKDEFCRCELKLQKWYGDLRGKPFAIEAENSILDISGFSKQYNCAFIWQKDGVKKLNLYLIINYFKGGKLRFKKIKPEAFEANRFYTVINKKSGEIVPMEVNFNFDDPNLIILPLAFGKRQGREFIWNDLLSLETGSLKLANGRVIEKTLYNRRTRQDEPALFVALTFERREVLDSSNIKPMNLIGVDRGENIPAVIALTDPEGCPLSRFKDSLGNPTHILRIGESYKEKQRTIQAKKEVEQRRAGGYSRKYASKAKNLADDMVRNTARDLLYYAVTQDAMLIFENLSRGFGRQGKRTFMAERQYTRMEDWLTAKLAYEGLPSKTYLSKTLAQYTSKTCSNCGFTITSADYDRVLEKLKKTATGWMTTINGKELKVEGQITYYNRYKRQNVVKDLSVELDRLSEESVNNDISSWTKGRSGEALSLLKKRFSHRPVQEKFVCLNCGFETHADEQAALNIARSWLFLRSQEYKKYQTNKTTGNTDKRAFVETWQSFYRKKLKEVWKPAV

SEQ ID NO: 35271 - protein, 978 aa, synthetic construct
  REGION 1..978: note = engineered CasX variant
QEIKRINKIRRRLVKDSNTKKAGKTGPMKTLLVRVMTPDLRERLENLRKKPENIPQPISNTSRANLNKLLTDYTEMKKAILHVYWEEFQVDPVGLMSRVAQPASKKIDQNKLKPEMDEKGNLTTAGFACSQCGQPLFVYKLEQVSEKGKAYTNYFGRCNVAEHEKLILLSQLKPEKDSDEAVTYSLGKFGQRALDFYSIHVTKESTHPVKPLAQIAGNRYASHPVGKALSDACMGTIASFLSKYQDIIIEHQKVVKGNQKRLESLRELAGKENLEYPSVTLPPQPHTKEGVDAYNEVIARVRMWVNLNLWQKLKLSRDDAKPLLRLKGFPSFPLVERQANEVDWWDMVCNVKKLINEKKEDGKVFWQNLAGYKRQEALRPYLSSEEDRKKGKKFARYQLGDLLLHLEKKHGEDWGKVYDEAWERIDKKVEGLSKHIKLEEERRSEDAQSKAALTDWLRAKASFVIEGLKEADKDEFCRCELKLQKWYGDLRGKPFAIEAENSILDISGFSKQYNCAFIWQKDGVKKLNLYLIINYFKGGKLRFKKIKPEAFEANRFYTVINKKSGEIVPMEVNFNFDDPNLIILPLAFGKRQGREFIWNDLLSLETGSLKLANGRVIEKTLYNRRTRQDEPALFVALTFERREVLDSSNIKPMNLIGVDRGENIPAVIALTDPEGCPLSRFKDSLGNPTHILRIGESYKEKQRTIQAKKEVEQRRAGGYSRKYASKAKNLADDMVRNTARDLLYYAVTQDAMLIFENLSRGFGRQGKRTFMAERQYTRMEDWLTAKLAYEGLPSKTYLSKTLAQYTSKTCSNCGFTITSADYDRVLEKLKKTATGWMTTINGKELKVEGQITYYNRYKRQNVVKDLSVELDRLSEESVNNDISSWTKGRSGEALSLLKKRFSHRPVQEKFVCLNCGFETHADEQAALNIARSWLFLRSQEYKKYQTNKTTGNTDKRAFVETWQSFYRKKLKEVWKPAV

SEQ ID NO: 35272 - protein, 978 aa, synthetic construct
  REGION 1..978: note = engineered CasX variant
QEIKRINKIRRRLVKDSNTKKAGKTGPMKTLLVRVMTPDLRERLENLRKKPENIPQPISNTSRANLNKLLTDYTEMKKAILHVYWEEFQVDPVGLMSRVAQPASKKIDQNKLKPEMDEKGNLTTAGFACSQCGQPLFVYKLEQVSEKGKAYTNYFGRCNVAEHEKLILLSQLKPEKDSDEAVTYSLGKFGQRALDFYSIHVTKESTHPVKPLAQIAGNRYASSPVGKALSDACMGTIASFLSKYQDIIIEHQKVVKGNQKRLESLRELAGKENLEYPSVTLPPQPHTKEGVDAYNEVIARVRMWVNLNLWQKLKLSRDDAKPLLRLKGFPSFPLVERQANEVDWWDMVCNVKKLINEKKEDGKVFWQNLAGYKRQEALRPYLSSEEDRKKGKKFARYQLGDLLLHLEKKHGEDWGKVYDEAWERIDKKVEGLSKHIKLEEERRSEDAQSKAALTDWLRAKASFVIEGLKEADKDEFCRCELKLQKWYGDLRGKPFAIEAENSILDISGFSKQYNCAFIWQKDGVKKLNLYLIINYFKGGKLRFKKIKPEAFEANRFYTVINKKSGEIVPMEVNFNFDDPNLIILPLAFGKRQGREFIWNDLLSLETGSLKLANGRVIEKTLYNRRTRQDEPALFVALTFERREVLDSSNIKPMNLIGVDRGENIPAVIALTDPEGCPLSRFKDSLGNPTHILRIGESYKEKQRTIQAKKEVEQRRAGGYSRKYASKAKNLADDMVRNTARDLLYYAVTQDAMLIFENLSRGFGRQGKRTFMAERQYTRMEDWLTAKLAYEGLPSKTYLSKTLAQYTSKTCSNCGFTITSADYDRVLEKLKKTATGWMTTINGKELKVEGQITYYNRYKRQNVVKDLSVELDRLSEESVNNDISSWTKGRSGEALSLLKKRFSHRPVQEKFVCLNCGFETHADEQAALNIARSWLFLRSQEYKKYQTNKTTGNTDKRAFVETWQSFYRKKLKEVWKPAV

SEQ ID NO: 35273 - protein, 978 aa, synthetic construct
  REGION 1..978: note = engineered CasX variant
QEIKRINKIRRRLVKDSNTKKAGKTGPMKTLLVRVMTPDLRERLENLRKKPENIPQPISNTSRANLNKLLTDYTEMKKAILHVYWEEFQVDPVGLMSRVAQPASKKIDQNKLKPEMDEKGNLTTAGFACSQCGQPLFVYKLEQVSEKGKAYTNYFGRCNVAEHEKLILLSQLKPEKDSDEAVTYSLGKFGQRALDFYSIHVTKESTHPVKPLAQIAGNRYASTPVGKALSDACMGTIASFLSKYQDIIIEHQKVVKGNQKRLESLRELAGKENLEYPSVTLPPQPHTKEGVDAYNEVIARVRMWVNLNLWQKLKLSRDDAKPLLRLKGFPSFPLVERQANEVDWWDMVCNVKKLINEKKEDGKVFWQNLAGYKRQEALRPYLSSEEDRKKGKKFARYQLGDLLLHLEKKHGEDWGKVYDEAWERIDKKVEGLSKHIKLEEERRSEDAQSKAALTDWLRAKASFVIEGLKEADKDEFCRCELKLQKWYGDLRGKPFAIEAENSILDISGFSKQYNCAFIWQKDGVKKLNLYLIINYFKGGKLRFKKIKPEAFEANRFYTVINKKSGEIVPMEVNFNFDDPNLIILPLAFGKRQGREFIWNDLLSLETGSLKLANGRVIEKTLYNRRTRQDEPALFVALTFERREVLDSSNIKPMNLIGVDRGENIPAVIALTDPEGCPLSRFKDSLGNPTHILRIGESYKEKQRTIQAKKEVEQRRAGGYSRKYASKAKNLADDMVRNTARDLLYYAVTQDAMLIFENLSRGFGRQGKRTFMAERQYTRMEDWLTAKLAYEGLPSKTYLSKTLAQYTSKTCSNCGFTITSADYDRVLEKLKKTATGWMTTINGKELKVEGQITYYNRYKRQNVVKDLSVELDRLSEESVNNDISSWTKGRSGEALSLLKKRFSHRPVQEKFVCLNCGFETHADEQAALNIARSWLFLRSQEYKKYQTNKTTGNTDKRAFVETWQSFYRKKLKEVWKPAV

SEQ ID NO: 35274 - protein, 978 aa, synthetic construct
  REGION 1..978: note = engineered CasX variant
QEIKRINKIRRRLVKDSNTKKAGKTGPMKTLLVRVMTPDLRERLENLRKKPENIPQPISNTSRANLNKLLTDYTEMKKAILHVYWEEFQVDPVGLMSRVAQPASKKIDQNKLKPEMDEKGNLTTAGFACSQCGQPLFVYKLEQVSEKGKAYTNYFGRCNVAEHEKLILLSQLKPEKDSDEAVTYSLGKFGQRALDFYSIHVTKESTHPVKPLAQIAGNRYASAPVGKALSDACMGTIASFLSKYQDIIIEHQKVVKGNQKRLESLRELAGKENLEYPSVTLPPQPHTKEGVDAYNEVIARVRMWVNLNLWQKLKLSRDDAKPLLRLKGFPSFPLVERQANEVDWWDMVCNVKKLINEKKEDGKVFWQNLAGYKRQEALRPYLSSEEDRKKGKKFARYQLGDLLLHLEKKHGEDWGKVYDEAWERIDKKVEGLSKHIKLEEERRSEDAQSKAALTDWLRAKASFVIEGLKEADKDEFCRCELKLQKWYGDLRGKPFAIEAENSILDISGFSKQYNCAFIWQKDGVKKLNLYLIINYFKGGKLRFKKIKPEAFEANRFYTVINKKSGEIVPMEVNFNFDDPNLIILPLAFGKRQGREFIWNDLLSLETGSLKLANGRVIEKTLYNRRTRQDEPALFVALTFERREVLDSSNIKPMNLIGVDRGENIPAVIALTDPEGCPLSRFKDSLGNPTHILRIGESYKEKQRTIQAKKEVEQRRAGGYSRKYASKAKNLADDMVRNTARDLLYYAVTQDAMLIFENLSRGFGRQGKRTFMAERQYTRMEDWLTAKLAYEGLPSKTYLSKTLAQYTSKTCSNCGFTITSADYDRVLEKLKKTATGWMTTINGKELKVEGQITYYNRYKRQNVVKDLSVELDRLSEESVNNDISSWTKGRSGEALSLLKKRFSHRPVQEKFVCLNCGFETHADEQAALNIARSWLFLRSQEYKKYQTNKTTGNTDKRAFVETWQSFYRKKLKEVWKPAV

SEQ ID NO: 35275 - protein, 978 aa, synthetic construct
  REGION 1..978: note = engineered CasX variant
QEIKRINKIRRRLVKDSNTKKAGKTGPMKTLLVRVMTPDLRERLENLRKKPENIPQPISNTSRANLNKLLTDYTEMKKAILHVYWEEFQVDPVGLMSRVAQPASKKIDQNKLKPEMDEKGNLTTAGFACSQCGQPLFVYKLEQVSEKGKAYTNYFGRCNVAEHEKLILLSQLKPEKDSDEAVTYSLGKFGQRALDFYSIHVTKESTHPVKPLAQIAGNRYASVPVGKALSDACMGTIASFLSKYQDIIIEHQKVVKGNQKRLESLRELAGKENLEYPSVTLPPQPHTKEGVDAYNEVIARVRMWVNLNLWQKLKLSRDDAKPLLRLKGFPSFPLVERQANEVDWWDMVCNVKKLINEKKEDGKVFWQNLAGYKRQEALRPYLSSEEDRKKGKKFARYQLGDLLLHLEKKHGEDWGKVYDEAWERIDKKVEGLSKHIKLEEERRSEDAQSKAALTDWLRAKASFVIEGLKEADKDEFCRCELKLQKWYGDLRGKPFAIEAENSILDISGFSKQYNCAFIWQKDGVKKLNLYLIINYFKGGKLRFKKIKPEAFEANRFYTVINKKSGEIVPMEVNFNFDDPNLIILPLAFGKRQGREFIWNDLLSLETGSLKLANGRVIEKTLYNRRTRQDEPALFVALTFERREVLDSSNIKPMNLIGVDRGENIPAVIALTDPEGCPLSRFKDSLGNPTHILRIGESYKEKQRTIQAKKEVEQRRAGGYSRKYASKAKNLADDMVRNTARDLLYYAVTQDAMLIFENLSRGFGRQGKRTFMAERQYTRMEDWLTAKLAYEGLPSKTYLSKTLAQYTSKTCSNCGFTITSADYDRVLEKLKKTATGWMTTINGKELKVEGQITYYNRYKRQNVVKDLSVELDRLSEESVNNDISSWTKGRSGEALSLLKKRFSHRPVQEKFVCLNCGFETHADEQAALNIARSWLFLRSQEYKKYQTNKTTGNTDKRAFVETWQSFYRKKLKEVWKPAV

SEQ ID NO: 35276 - protein, 978 aa, synthetic construct
  REGION 1..978: note = engineered CasX variant
QEIKRINKIRRRLVKDSNTKKAGKTGPMKTLLVRVMTPDLRERLENLRKKPENIPQPISNTSRANLNKLLTDYTEMKKAILHVYWEEFQVDPVGLMSRVAQPASKKIDQNKLKPEMDEKGNLTTAGFACSQCGQPLFVYKLEQVSEKGKAYTNYFGRCNVAEHEKLIKLSQLKPEKDSDEAVTYSLGKFGQRALDFYSIHVTKESTHPVKPLAQIAGNRYASGPVGKALSDACMGTIASFLSKYQDIIIEHQKVVKGNQKRLESLRELAGKENLEYPSVTLPPQPHTKEGVDAYNEVIARVRMWVNLNLWQKLKLSRDDAKPLLRLKGFPSFPLVERQANEVDWWDMVCNVKKLINEKKEDGKVFWQNLAGYKRQEALRPYLSSEEDRKKGKKFARYQLGDLLLHLEKKHGEDWGKVYDEAWERIDKKVEGLSKHIKLEEERRSEDAQSKAALTDWLRAKASFVIEGLKEADKDEFCRCELKLQKWYGDLRGKPFAIEAENSILDISGFSKQYNCAFIWQKDGVKKLNLYLIINYFKGGKLRFKKIKPEAFEANRFYTVINKKSGEIVPMEVNFNFDDPNLIILPLAFGKRQGREFIWNDLLSLETGSLKLANGRVIEKTLYNRRTRQDEPALFVALTFERREVLDSSNIKPMNLIGVDRGENIPAVIALTDPEGCPLSRFKDSLGNPTHILRIGESYKEKQRTIQAKKEVEQRRAGGYSRKYASKAKNLADDMVRNTARDLLYYAVTQDAMLIFENLSRGFGRQGKRTFMAERQYTRMEDWLTAKLAYEGLPSKTYLSKTLAQYTSKTCSNCGFTITSADYDRVLEKLKKTATGWMTTINGKELKVEGQITYYNRYKRQNVVKDLSVELDRLSEESVNNDISSWTKGRSGEALSLLKKRFSHRPVQEKFVCLNCGFETHADEQAALNIARSWLFLRSQEYKKYQTNKTTGNTDKRAFVETWQSFYRKKLKEVWKPAV

SEQ ID NO: 35277 - protein, 977 aa, synthetic construct
  REGION 1..977: note = engineered CasX variant
QEIKRINKIRRRLVKDSNTKKAGKTGPMKTLLVRVMTPDLRERLENLRKKPENIPQPISNTSRANLNKLLTDYTEMKKAILHVYWEEFQVDPVGLMSRVAQPASKKIDQNKLKPEMDEKGNLTTAGFACSQCGQPLFVYKLEQVSEKGKAYTNYFGRCNVAEHEKLILLSQLKPEKDSDEAVTYSLGKFGQRALDFYSIHVTKESTHPVKPLAQIAGNRYASPVGKALSDACMGTIASFLSKYQDIIIEHQKVVKGNQKRLESLRELAGKENLEYPSVTLPPQPHTKEGVDAYNEVIARVRMWVNLNLWQKLKLSRDDAKPLLRLKGFPSFPLVERQANEVDWWDMVCNVKKLINEKKEDGKVFWQNLAGYKRQEALRPYLSSEEDRKKGKKFARYQLGDLLLHLEKKHGEDWGKVYDEAWERIDKKVEGLSKHIKLEEERRSEDAQSKAALTDWLRAKASFVIEGLKEADKDEFCRCELKLQKWYGDLRGKPFAIEAENSILDISGFSKQYNCAFIWQKDGVKKLNLYLIINYFKGGKLRFKKIKPEAFEANRFYTVINKKSGEIVPMEVNFNFDDPNLIILPLAFGKRQGREFIWNDLLSLETGSLKLANGRVIEKTLYNRRTRQDEPALFVALTFERREVLDSSNIKPMNLIGVDRGENIPAVIALTDPEGCPLSRFKDSLGNPTHILRIGESYKEKQRTIQAKKEVEQRRAGGYSRKYASKAKNLADDMVRNTARDLLYYAVTQDAMLIFENLSRGFGRQGKRTFMAERQYTRMEDWLTAKLAYEGLPSKTYLSKTLAQYTSKTCSNCGFTITSADYDRVLEKLKKTATGWMTTINGKELKVEGQITYYNRYKRQNVVKDLSVELDRLSEESVNNDISSWTKGRSGEALSLLKKRFSHRPVQEKFVCLNCGFETHADEQAALNIARSWLFLRSQEYKKYQTNKTTGNTDKRAFVETWQSFYRKKLKEVWKPAV

SEQ ID NO: 35278 - protein, 978 aa, synthetic construct
  REGION 1..978: note = engineered CasX variant
QEIKRLNKIRRRLVKDSNTKKAGKTGPMKTLLVRVMTPDLRERLENLRKKPENIPQPISNTSRANLNKLLTDYTEMKKAILHVYWEEFQKDPVGLMSRVAQPASKKIDQNKLKPEMDEKGNLTTAGFACSQCGQPLFVYKLEQVSEKGKAYTNYFGRCNVAEHEKLILLSQLKPEKDSDEAVTYSLGKFGQRALDFYSIHVTKESTHPVKPLAQIAGNRYASYPVGKALSDACMGTIASFLSKYQDIIIEHQKVVKGNQKRLESLRELAGKENLEYPSVTLPPQPHTKEGVDAYNEVIARVRMWVNLNLWQKLKLSRDDAKPLLRLKGFPSFPLVERQANEVDWWDMVCNVKKLINEKKEDGKVFWQNLAGYKRQEALRPYLSSEEDRKKGKKFARYQLGDLLLHLEKKHGEDWGKVYDEAWERIDKKVEGLSKHIKLEEERRSEDAQSKAALTDWLRAKASFVIEGLKEADKDEFCRCELKLQKWYGDLRGKPFAIEAENSILDISGFSKQYNCAFIWQKDGVKKLNLYLIINYFKGGKLRFKKIKPEAFEANRFYTVINKKSGEIVPMEVNFNFDDPNLIILPLAFGKRQGREFIWNDLLSLETGSLKLANGRVIEKTLYNRRTRQDEPALFVALTFERREVLDSSNIKPMNLIGVDRGENIPAVIALTDPEGCPLSRFKDSLGNPTHILRIGESYKEKQRTIQAKKEVEQRRAGGYSRKYASKAKNLADDMVRNTARDLLYYAVTQDAMLIFENLSRGFGRQGKRTFMAERQYTRMEDWLTAKLAYEGLPSKTYLSKTLAQYTSKTCSNCGFTITSADYDRVLEKLKKTATGWMTTINGKELKVEGQITYYNRYKRQNVVKDLSVELDRLSEESVNNDISSWTKGRSGEALSLLKKRFSHRPVQEKFVCLNCGFETHADEQAALNIARSWLFLRSQEYKKYQTNKTTGNTDKRAFVETWQSFYRKKLKEVWKPAV

SEQ ID NO: 35279 - protein, 978 aa, synthetic construct
  REGION 1..978: note = engineered CasX variant
QEIKRLNKIRRRLVKDSNTKKAGKTGPMKTLLVRVMTPDLRERLENLRKKPENIPQPISNTSRANLNKLLTDYTEMKKAILHVYWEEFQKDPVGLMSRVAQPASKKIDQNKLKPEMDEKGNLTTAGFACSQCGQPLFVYKLEQVSEKGKAYTNYFGRCNVAEHEKLILLSQLKPEKDSDEAVTYSLGKFGQRALDFYSIHVTKESTHPVKPLAQIAGNRYASHPVGKALSDACMGTIASFLSKYQDIIIEHQKVVKGNQKRLESLRELAGKENLEYPSVTLPPQPHTKEGVDAYNEVIARVRMWVNLNLWQKLKLSRDDAKPLLRLKGFPSFPLVERQANEVDWWDMVCNVKKLINEKKEDGKVFWQNLAGYKRQEALRPYLSSEEDRKKGKKFARYQLGDLLLHLEKKHGEDWGKVYDEAWERIDKKVEGLSKHIKLEEERRSEDAQSKAALTDWLRAKASFVIEGLKEADKDEFCRCELKLQKWYGDLRGKPFAIEAENSILDISGFSKQYNCAFIWQKDGVKKLNLYLIINYFKGGKLRFKKIKPEAFEANRFYTVINKKSGEIVPMEVNFNFDDPNLIILPLAFGKRQGREFIWNDLLSLETGSLKLANGRVIEKTLYNRRTRQDEPALFVALTFERREVLDSSNIKPMNLIGVDRGENIPAVIALTDPEGCPLSRFKDSLGNPTHILRIGESYKEKQRTIQAKKEVEQRRAGGYSRKYASKAKNLADDMVRNTARDLLYYAVTQDAMLIFENLSRGFGRQGKRTFMAERQYTRMEDWLTAKLAYEGLPSKTYLSKTLAQYTSKTCSNCGFTITSADYDRVLEKLKKTATGWMTTINGKELKVEGQITYYNRYKRQNVVKDLSVELDRLSEESVNNDISSWTKGRSGEALSLLKKRFSHRPVQEKFVCLNCGFETHADEQAALNIARSWLFLRSQEYKKYQTNKTTGNTDKRAFVETWQSFYRKKLKEVWKPAV

SEQ ID NO: 35280 - protein, 978 aa, synthetic construct
  REGION 1..978: note = engineered CasX variant
QEIKRLNKIRRRLVKDSNTKKAGKTGPMKTLLVRVMTPDLRERLENLRKKPENIPQPISNTSRANLNKLLTDYTEMKKAILHVYWEEFQKDPVGLMSRVAQPASKKIDQNKLKPEMDEKGNLTTAGFACSQCGQPLFVYKLEQVSEKGKAYTNYFGRCNVAEHEKLILLSQLKPEKDSDEAVTYSLGKFGQRALDFYSIHVTKESTHPVKPLAQIAGNRYASSPVGKALSDACMGTIASFLSKYQDIIIEHQKVVKGNQKRLESLRELAGKENLEYPSVTLPPQPHTKEGVDAYNEVIARVRMWVNLNLWQKLKLSRDDAKPLLRLKGFPSFPLVERQANEVDWWDMVCNVKKLINEKKEDGKVFWQNLAGYKRQEALRPYLSSEEDRKKGKKFARYQLGDLLLHLEKKHGEDWGKVYDEAWERIDKKVEGLSKHIKLEEERRSEDAQSKAALTDWLRAKASFVIEGLKEADKDEFCRCELKLQKWYGDLRGKPFAIEAENSILDISGFSKQYNCAFIWQKDGVKKLNLYLIINYFKGGKLRFKKIKPEAFEANRFYTVINKKSGEIVPMEVNFNFDDPNLIILPLAFGKRQGREFIWNDLLSLETGSLKLANGRVIEKTLYNRRTRQDEPALFVALTFERREVLDSSNIKPMNLIGVDRGENIPAVIALTDPEGCPLSRFKDSLGNPTHILRIGESYKEKQRTIQAKKEVEQRRAGGYSRKYASKAKNLADDMVRNTARDLLYYAVTQDAMLIFENLSRGFGRQGKRTFMAERQYTRMEDWLTAKLAYEGLPSKTYLSKTLAQYTSKTCSNCGFTITSADYDRVLEKLKKTATGWMTTINGKELKVEGQITYYNRYKRQNVVKDLSVELDRLSEESVNNDISSWTKGRSGEALSLLKKRFSHRPVQEKFVCLNCGFETHADEQAALNIARSWLFLRSQEYKKYQTNKTTGNTDKRAFVETWQSFYRKKLKEVWKPAV

SEQ ID NO: 35281 - protein, 978 aa, synthetic construct
  REGION 1..978: note = engineered CasX variant
QEIKRLNKIRRRLVKDSNTKKAGKTGPMKTLLVRVMTPDLRERLENLRKKPENIPQPISNTSRANLNKLLTDYTEMKKAILHVYWEEFQKDPVGLMSRVAQPASKKIDQNKLKPEMDEKGNLTTAGFACSQCGQPLFVYKLEQVSEKGKAYTNYFGRCNVAEHEKLILLSQLKPEKDSDEAVTYSLGKFGQRALDFYSIHVTKESTHPVKPLAQIAGNRYASTPVGKALSDACMGTIASFLSKYQDIIIEHQKVVKGNQKRLESLRELAGKENLEYPSVTLPPQPHTKEGVDAYNEVIARVRMWVNLNLWQKLKLSRDDAKPLLRLKGFPSFPLVERQANEVDWWDMVCNVKKLINEKKEDGKVFWQNLAGYKRQEALRPYLSSEEDRKKGKKFARYQLGDLLLHLEKKHGEDWGKVYDEAWERIDKKVEGLSKHIKLEEERRSEDAQSKAALTDWLRAKASFVIEGLKEADKDEFCRCELKLQKWYGDLRGKPFAIEAENSILDISGFSKQYNCAFIWQKDGVKKLNLYLIINYFKGGKLRFKKIKPEAFEANRFYTVINKKSGEIVPMEVNFNFDDPNLIILPLAFGKRQGREFIWNDLLSLETGSLKLANGRVIEKTLYNRRTRQDEPALFVALTFERREVLDSSNIKPMNLIGVDRGENIPAVIALTDPEGCPLSRFKDSLGNPTHILRIGESYKEKQRTIQAKKEVEQRRAGGYSRKYASKAKNLADDMVRNTARDLLYYAVTQDAMLIFENLSRGFGRQGKRTFMAERQYTRMEDWLTAKLAYEGLPSKTYLSKTLAQYTSKTCSNCGFTITSADYDRVLEKLKKTATGWMTTINGKELKVEGQITYYNRYKRQNVVKDLSVELDRLSEESVNNDISSWTKGRSGEALSLLKKRFSHRPVQEKFVCLNCGFETHADEQAALNIARSWLFLRSQEYKKYQTNKTTGNTDKRAFVETWQSFYRKKLKEVWKPAV

SEQ ID NO: 35282 - protein, 978 aa, synthetic construct
  REGION 1..978: note = engineered CasX variant
QEIKRLNKIRRRLVKDSNTKKAGKTGPMKTLLVRVMTPDLRERLENLRKKPENIPQPISNTSRANLNKLLTDYTEMKKAILHVYWEEFQKDPVGLMSRVAQPASKKIDQNKLKPEMDEKGNLTTAGFACSQCGQPLFVYKLEQVSEKGKAYTNYFGRCNVAEHEKLILLSQLKPEKDSDEAVTYSLGKFGQRALDFYSIHVTKESTHPVKPLAQIAGNRYASAPVGKALSDACMGTIASFLSKYQDIIIEHQKVVKGNQKRLESLRELAGKENLEYPSVTLPPQPHTKEGVDAYNEVIARVRMWVNLNLWQKLKLSRDDAKPLLRLKGFPSFPLVERQANEVDWWDMVCNVKKLINEKKEDGKVFWQNLAGYKRQEALRPYLSSEEDRKKGKKFARYQLGDLLLHLEKKHGEDWGKVYDEAWERIDKKVEGLSKHIKLEEERRSEDAQSKAALTDWLRAKASFVIEGLKEADKDEFCRCELKLQKWYGDLRGKPFAIEAENSILDISGFSKQYNCAFIWQKDGVKKLNLYLIINYFKGGKLRFKKIKPEAFEANRFYTVINKKSGEIVPMEVNFNFDDPNLIILPLAFGKRQGREFIWNDLLSLETGSLKLANGRVIEKTLYNRRTRQDEPALFVALTFERREVLDSSNIKPMNLIGVDRGENIPAVIALTDPEGCPLSRFKDSLGNPTHILRIGESYKEKQRTIQAKKEVEQRRAGGYSRKYASKAKNLADDMVRNTARDLLYYAVTQDAMLIFENLSRGFGRQGKRTFMAERQYTRMEDWLTAKLAYEGLPSKTYLSKTLAQYTSKTCSNCGFTITSADYDRVLEKLKKTATGWMTTINGKELKVEGQITYYNRYKRQNVVKDLSVELDRLSEESVNNDISSWTKGRSGEALSLLKKRFSHRPVQEKFVCLNCGFETHADEQAALNIARSWLFLRSQEYKKYQTNKTTGNTDKRAFVETWQSFYRKKLKEVWKPAV

SEQ ID NO: 35283 - protein, 978 aa, synthetic construct
  REGION 1..978: note = engineered CasX variant
QEIKRLNKIRRRLVKDSNTKKAGKTGPMKTLLVRVMTPDLRERLENLRKKPENIPQPISNTSRANLNKLLTDYTEMKKAILHVYWEEFQKDPVGLMSRVAQPASKKIDQNKLKPEMDEKGNLTTAGFACSQCGQPLFVYKLEQVSEKGKAYTNYFGRCNVAEHEKLILLSQLKPEKDSDEAVTYSLGKFGQRALDFYSIHVTKESTHPVKPLAQIAGNRYASVPVGKALSDACMGTIASFLSKYQDIIIEHQKVVKGNQKRLESLRELAGKENLEYPSVTLPPQPHTKEGVDAYNEVIARVRMWVNLNLWQKLKLSRDDAKPLLRLKGFPSFPLVERQANEVDWWDMVCNVKKLINEKKEDGKVFWQNLAGYKRQEALRPYLSSEEDRKKGKKFARYQLGDLLLHLEKKHGEDWGKVYDEAWERIDKKVEGLSKHIKLEEERRSEDAQSKAALTDWLRAKASFVIEGLKEADKDEFCRCELKLQKWYGDLRGKPFAIEAENSILDISGFSKQYNCAFIWQKDGVKKLNLYLIINYFKGGKLRFKKIKPEAFEANRFYTVINKKSGEIVPMEVNFNFDDPNLIILPLAFGKRQGREFIWNDLLSLETGSLKLANGRVIEKTLYNRRTRQDEPALFVALTFERREVLDSSNIKPMNLIGVDRGENIPAVIALTDPEGCPLSRFKDSLGNPTHILRIGESYKEKQRTIQAKKEVEQRRAGGYSRKYASKAKNLADDMVRNTARDLLYYAVTQDAMLIFENLSRGFGRQGKRTFMAERQYTRMEDWLTAKLAYEGLPSKTYLSKTLAQYTSKTCSNCGFTITSADYDRVLEKLKKTATGWMTTINGKELKVEGQITYYNRYKRQNVVKDLSVELDRLSEESVNNDISSWTKGRSGEALSLLKKRFSHRPVQEKFVCLNCGFETHADEQAALNIARSWLFLRSQEYKKYQTNKTTGNTDKRAFVETWQSFYRKKLKEVWKPAV

SEQ ID NO: 35284 - protein, 978 aa, synthetic construct
  REGION 1..978: note = engineered CasX variant
QEIKRLNKIRRRLVKDSNTKKAGKTGPMKTLLVRVMTPDLRERLENLRKKPENIPQPISNTSRANLNKLLTDYTEMKKAILHVYWEEFQKDPVGLMSRVAQPASKKIDQNKLKPEMDEKGNLTTAGFACSQCGQPLFVYKLEQVSEKGKAYTNYFGRCNVAEHEKLIKLSQLKPEKDSDEAVTYSLGKFGQRALDFYSIHVTKESTHPVKPLAQIAGNRYASGPVGKALSDACMGTIASFLSKYQDIIIEHQKVVKGNQKRLESLRELAGKENLEYPSVTLPPQPHTKEGVDAYNEVIARVRMWVNLNLWQKLKLSRDDAKPLLRLKGFPSFPLVERQANEVDWWDMVCNVKKLINEKKEDGKVFWQNLAGYKRQEALRPYLSSEEDRKKGKKFARYQLGDLLLHLEKKHGEDWGKVYDEAWERIDKKVEGLSKHIKLEEERRSEDAQSKAALTDWLRAKASFVIEGLKEADKDEFCRCELKLQKWYGDLRGKPFAIEAENSILDISGFSKQYNCAFIWQKDGVKKLNLYLIINYFKGGKLRFKKIKPEAFEANRFYTVINKKSGEIVPMEVNFNFDDPNLIILPLAFGKRQGREFIWNDLLSLETGSLKLANGRVIEKTLYNRRTRQDEPALFVALTFERREVLDSSNIKPMNLIGVDRGENIPAVIALTDPEGCPLSRFKDSLGNPTHILRIGESYKEKQRTIQAKKEVEQRRAGGYSRKYASKAKNLADDMVRNTARDLLYYAVTQDAMLIFENLSRGFGRQGKRTFMAERQYTRMEDWLTAKLAYEGLPSKTYLSKTLAQYTSKTCSNCGFTITSADYDRVLEKLKKTATGWMTTINGKELKVEGQITYYNRYKRQNVVKDLSVELDRLSEESVNNDISSWTKGRSGEALSLLKKRFSHRPVQEKFVCLNCGFETHADEQAALNIARSWLFLRSQEYKKYQTNKTTGNTDKRAFVETWQSFYRKKLKEVWKPAV

SEQ ID NO: 35285 - protein, 977 aa, synthetic construct
  REGION 1..977: note = engineered CasX variant
QEIKRLNKIRRRLVKDSNTKKAGKTGPMKTLLVRVMTPDLRERLENLRKKPENIPQPISNTSRANLNKLLTDYTEMKKAILHVYWEEFQKDPVGLMSRVAQPASKKIDQNKLKPEMDEKGNLTTAGFACSQCGQPLFVYKLEQVSEKGKAYTNYFGRCNVAEHEKLILLSQLKPEKDSDEAVTYSLGKFGQRALDFYSIHVTKESTHPVKPLAQIAGNRYASPVGKALSDACMGTIASFLSKYQDIIIEHQKVVKGNQKRLESLRELAGKENLEYPSVTLPPQPHTKEGVDAYNEVIARVRMWVNLNLWQKLKLSRDDAKPLLRLKGFPSFPLVERQANEVDWWDMVCNVKKLINEKKEDGKVFWQNLAGYKRQEALRPYLSSEEDRKKGKKFARYQLGDLLLHLEKKHGEDWGKVYDEAWERIDKKVEGLSKHIKLEEERRSEDAQSKAALTDWLRAKASFVIEGLKEADKDEFCRCELKLQKWYGDLRGKPFAIEAENSILDISGFSKQYNCAFIWQKDGVKKLNLYLIINYFKGGKLRFKKIKPEAFEANRFYTVINKKSGEIVPMEVNFNFDDPNLIILPLAFGKRQGREFIWNDLLSLETGSLKLANGRVIEKTLYNRRTRQDEPALFVALTFERREVLDSSNIKPMNLIGVDRGENIPAVIALTDPEGCPLSRFKDSLGNPTHILRIGESYKEKQRTIQAKKEVEQRRAGGYSRKYASKAKNLADDMVRNTARDLLYYAVTQDAMLIFENLSRGFGRQGKRTFMAERQYTRMEDWLTAKLAYEGLPSKTYLSKTLAQYTSKTCSNCGFTITSADYDRVLEKLKKTATGWMTTINGKELKVEGQITYYNRYKRQNVVKDLSVELDRLSEESVNNDISSWTKGRSGEALSLLKKRFSHRPVQEKFVCLNCGFETHADEQAALNIARSWLFLRSQEYKKYQTNKTTGNTDKRAFVETWQSFYRKKLKEVWKPAV

SEQ ID NO: 35286 - protein, 978 aa, synthetic construct
  REGION 1..978: note = engineered CasX variant
QEIKRINKIRRRLVKDSNTKKAGKTGPMKTLLVRVMTPDLRERLENLRKKPENIPQPISNTSRANLNKLLTDYTEMKKAILHVYWEEFQKDPVGLMSRVAQPASKKIDQNKLKPEMDEKGNLTTAGFACSQCGQPLFVYKLEQVSEKGKAYTNYVGRCNVAEHEKLILLSQLKPEKDSDEAVTYSLGKFGQRALDFYSIHVTKESTHPVKPLAQIAGNRYASYPVGKALSDACMGTIASFLSKYQDIIIEHQKVVKGNQKRLESLRELAGKENLEYPSVTLPPQPHTKEGVDAYNEVIARVRMWVNLNLWQKLKLSRDDAKPLLRLKGFPSFPLVERQANEVDWWDMVCNVKKLINEKKEDGKVFWQNLAGYKRQEALRPYLSSEEDRKKGKKFARYQLGDLLLHLEKKHGEDWGKVYDEAWERIDKKVEGLSKHIKLEEERRSEDAQSKAALTDWLRAKASFVIEGLKEADKDEFCRCELKLQKWYGDLRGKPFAIEAENSILDISGFSKQYNCAFIWQKDGVKKLNLYLIINYFKGGKLRFKKIKPEAFEANRFYTVINKKSGEIVPMEVNFNFDDPNLIILPLAFGKRQGREFIWNDLLSLETGSLKLANGRVIEKTLYNRRTRQDEPALFVALTFERREVLDSSNIKPMNLIGVDRGENIPAVIALTDPEGCPLSRFKDSLGNPTHILRIGESYKEKQRTIQAKKEVEQRRAGGYSRKYASKAKNLADDMVRNTARDLLYYAVTQDAMLIFENLSRGFGRQGKRTFMAERQYTRMEDWLTAKLAYEGLPSKTYLSKTLAQYTSKTCSNCGFTITSADYDRVLEKLKKTATGWMTTINGKELKVEGQITYYNRYKRQNVVKDLSVELDRLSEESVNNDISSWTKGRSGEALSLLKKRFSHRPVQEKFVCLNCGFETHADEQAALNIARSWLFLRSQEYKKYQTNKTTGNTDKRAFVETWQSFYRKKLKEVWKPAV

SEQ ID NO: 35287 - protein, 978 aa, synthetic construct
  REGION 1..978: note = engineered CasX variant
QEIKRINKIRRRLVKDSNTKKAGKTGPMKTLLVRVMTPDLRERLENLRKKPENIPQPISNTSRANLNKLLTDYTEMKKAILHVYWEEFQKDPVGLMSRVAQPASKKIDQNKLKPEMDEKGNLTTAGFACSQCGQPLFVYKLEQVSEKGKAYTNYVGRCNVAEHEKLILLSQLKPEKDSDEAVTYSLGKFGQRALDFYSIHVTKESTHPVKPLAQIAGNRYASHPVGKALSDACMGTIASFLSKYQDIIIEHQKVVKGNQKRLESLRELAGKENLEYPSVTLPPQPHTKEGVDAYNEVIARVRMWVNLNLWQKLKLSRDDAKPLLRLKGFPSFPLVERQANEVDWWDMVCNVKKLINEKKEDGKVFWQNLAGYKRQEALRPYLSSEEDRKKGKKFARYQLGDLLLHLEKKHGEDWGKVYDEAWERIDKKVEGLSKHIKLEEERRSEDAQSKAALTDWLRAKASFVIEGLKEADKDEFCRCELKLQKWYGDLRGKPFAIEAENSILDISGFSKQYNCAFIWQKDGVKKLNLYLIINYFKGGKLRFKKIKPEAFEANRFYTVINKKSGEIVPMEVNFNFDDPNLIILPLAFGKRQGREFIWNDLLSLETGSLKLANGRVIEKTLYNRRTRQDEPALFVALTFERREVLDSSNIKPMNLIGVDRGENIPAVIALTDPEGCPLSRFKDSLGNPTHILRIGESYKEKQRTIQAKKEVEQRRAGGYSRKYASKAKNLADDMVRNTARDLLYYAVTQDAMLIFENLSRGFGRQGKRTFMAERQYTRMEDWLTAKLAYEGLPSKTYLSKTLAQYTSKTCSNCGFTITSADYDRVLEKLKKTATGWMTTINGKELKVEGQITYYNRYKRQNVVKDLSVELDRLSEESVNNDISSWTKGRSGEALSLLKKRFSHRPVQEKFVCLNCGFETHADEQAALNIARSWLFLRSQEYKKYQTNKTTGNTDKRAFVETWQSFYRKKLKEVWKPAV

SEQ ID NO: 35288 - protein, 978 aa, synthetic construct
  REGION 1..978: note = engineered CasX variant
QEIKRINKIRRRLVKDSNTKKAGKTGPMKTLLVRVMTPDLRERLENLRKKPENIPQPISNTSRANLNKLLTDYTEMKKAILHVYWEEFQKDPVGLMSRVAQPASKKIDQNKLKPEMDEKGNLTTAGFACSQCGQPLFVYKLEQVSEKGKAYTNYVGRCNVAEHEKLILLSQLKPEKDSDEAVTYSLGKFGQRALDFYSIHVTKESTHPVKPLAQIAGNRYASSPVGKALSDACMGTIASFLSKYQDIIIEHQKVVKGNQKRLESLRELAGKENLEYPSVTLPPQPHTKEGVDAYNEVIARVRMWVNLNLWQKLKLSRDDAKPLLRLKGFPSFPLVERQANEVDWWDMVCNVKKLINEKKEDGKVFWQNLAGYKRQEALRPYLSSEEDRKKGKKFARYQLGDLLLHLEKKHGEDWGKVYDEAWERIDKKVEGLSKHIKLEEERRSEDAQSKAALTDWLRAKASFVIEGLKEADKDEFCRCELKLQKWYGDLRGKPFAIEAENSILDISGFSKQYNCAFIWQKDGVKKLNLYLIINYFKGGKLRFKKIKPEAFEANRFYTVINKKSGEIVPMEVNFNFDDPNLIILPLAFGKRQGREFIWNDLLSLETGSLKLANGRVIEKTLYNRRTRQDEPALFVALTFERREVLDSSNIKPMNLIGVDRGENIPAVIALTDPEGCPLSRFKDSLGNPTHILRIGESYKEKQRTIQAKKEVEQRRAGGYSRKYASKAKNLADDMVRNTARDLLYYAVTQDAMLIFENLSRGFGRQGKRTFMAERQYTRMEDWLTAKLAYEGLPSKTYLSKTLAQYTSKTCSNCGFTITSADYDRVLEKLKKTATGWMTTINGKELKVEGQITYYNRYKRQNVVKDLSVELDRLSEESVNNDISSWTKGRSGEALSLLKKRFSHRPVQEKFVCLNCGFETHADEQAALNIARSWLFLRSQEYKKYQTNKTTGNTDKRAFVETWQSFYRKKLKEVWKPAV

SEQ ID NO: 35289 - protein, 978 aa, synthetic construct
  REGION 1..978: note = engineered CasX variant
QEIKRINKIRRRLVKDSNTKKAGKTGPMKTLLVRVMTPDLRERLENLRKKPENIPQPISNTSRANLNKLLTDYTEMKKAILHVYWEEFQKDPVGLMSRVAQPASKKIDQNKLKPEMDEKGNLTTAGFACSQCGQPLFVYKLEQVSEKGKAYTNYVGRCNVAEHEKLILLSQLKPEKDSDEAVTYSLGKFGQRALDFYSIHVTKESTHPVKPLAQIAGNRYASTPVGKALSDACMGTIASFLSKYQDIIIEHQKVVKGNQKRLESLRELAGKENLEYPSVTLPPQPHTKEGVDAYNEVIARVRMWVNLNLWQKLKLSRDDAKPLLRLKGFPSFPLVERQANEVDWWDMVCNVKKLINEKKEDGKVFWQNLAGYKRQEALRPYLSSEEDRKKGKKFARYQLGDLLLHLEKKHGEDWGKVYDEAWERIDKKVEGLSKHIKLEEERRSEDAQSKAALTDWLRAKASFVIEGLKEADKDEFCRCELKLQKWYGDLRGKPFAIEAENSILDISGFSKQYNCAFIWQKDGVKKLNLYLIINYFKGGKLRFKKIKPEAFEANRFYTVINKKSGEIVPMEVNFNFDDPNLIILPLAFGKRQGREFIWNDLLSLETGSLKLANGRVIEKTLYNRRTRQDEPALFVALTFERREVLDSSNIKPMNLIGVDRGENIPAVIALTDPEGCPLSRFKDSLGNPTHILRIGESYKEKQRTIQAKKEVEQRRAGGYSRKYASKAKNLADDMVRNTARDLLYYAVTQDAMLIFENLSRGFGRQGKRTFMAERQYTRMEDWLTAKLAYEGLPSKTYLSKTLAQYTSKTCSNCGFTITSADYDRVLEKLKKTATGWMTTINGKELKVEGQITYYNRYKRQNVVKDLSVELDRLSEESVNNDISSWTKGRSGEALSLLKKRFSHRPVQEKFVCLNCGFETHADEQAALNIARSWLFLRSQEYKKYQTNKTTGNTDKRAFVETWQSFYRKKLKEVWKPAV

SEQ ID NO: 35290 - protein, 978 aa, synthetic construct
  REGION 1..978: note = engineered CasX variant
QEIKRINKIRRRLVKDSNTKKAGKTGPMKTLLVRVMTPDLRERLENLRKKPENIPQPISNTSRANLNKLLTDYTEMKKAILHVYWEEFQKDPVGLMSRVAQPASKKIDQNKLKPEMDEKGNLTTAGFACSQCGQPLFVYKLEQVSEKGKAYTNYVGRCNVAEHEKLILLSQLKPEKDSDEAVTYSLGKFGQRALDFYSIHVTKESTHPVKPLAQIAGNRYASAPVGKALSDACMGTIASFLSKYQDIIIEHQKVVKGNQKRLESLRELAGKENLEYPSVTLPPQPHTKEGVDAYNEVIARVRMWVNLNLWQKLKLSRDDAKPLLRLKGFPSFPLVERQANEVDWWDMVCNVKKLINEKKEDGKVFWQNLAGYKRQEALRPYLSSEEDRKKGKKFARYQLGDLLLHLEKKHGEDWGKVYDEAWERIDKKVEGLSKHIKLEEERRSEDAQSKAALTDWLRAKASFVIEGLKEADKDEFCRCELKLQKWYGDLRGKPFAIEAENSILDISGFSKQYNCAFIWQKDGVKKLNLYLIINYFKGGKLRFKKIKPEAFEANRFYTVINKKSGEIVPMEVNFNFDDPNLIILPLAFGKRQGREFIWNDLLSLETGSLKLANGRVIEKTLYNRRTRQDEPALFVALTFERREVLDSSNIKPMNLIGVDRGENIPAVIALTDPEGCPLSRFKDSLGNPTHILRIGESYKEKQRTIQAKKEVEQRRAGGYSRKYASKAKNLADDMVRNTARDLLYYAVTQDAMLIFENLSRGFGRQGKRTFMAERQYTRMEDWLTAKLAYEGLPSKTYLSKTLAQYTSKTCSNCGFTITSADYDRVLEKLKKTATGWMTTINGKELKVEGQITYYNRYKRQNVVKDLSVELDRLSEESVNNDISSWTKGRSGEALSLLKKRFSHRPVQEKFVCLNCGFETHADEQAALNIARSWLFLRSQEYKKYQTNKTTGNTDKRAFVETWQSFYRKKLKEVWKPAV

SEQ ID NO: 35291 - protein, 978 aa, synthetic construct
  REGION 1..978: note = engineered CasX variant
QEIKRINKIRRRLVKDSNTKKAGKTGPMKTLLVRVMTPDLRERLENLRKKPENIPQPISNTSRANLNKLLTDYTEMKKAILHVYWEEFQKDPVGLMSRVAQPASKKIDQNKLKPEMDEKGNLTTAGFACSQCGQPLFVYKLEQVSEKGKAYTNYVGRCNVAEHEKLILLSQLKPEKDSDEAVTYSLGKFGQRALDFYSIHVTKESTHPVKPLAQIAGNRYASVPVGKALSDACMGTIASFLSKYQDIIIEHQKVVKGNQKRLESLRELAGKENLEYPSVTLPPQPHTKEGVDAYNEVIARVRMWVNLNLWQKLKLSRDDAKPLLRLKGFPSFPLVERQANEVDWWDMVCNVKKLINEKKEDGKVFWQNLAGYKRQEALRPYLSSEEDRKKGKKFARYQLGDLLLHLEKKHGEDWGKVYDEAWERIDKKVEGLSKHIKLEEERRSEDAQSKAALTDWLRAKASFVIEGLKEADKDEFCRCELKLQKWYGDLRGKPFAIEAENSILDISGFSKQYNCAFIWQKDGVKKLNLYLIINYFKGGKLRFKKIKPEAFEANRFYTVINKKSGEIVPMEVNFNFDDPNLIILPLAFGKRQGREFIWNDLLSLETGSLKLANGRVIEKTLYNRRTRQDEPALFVALTFERREVLDSSNIKPMNLIGVDRGENIPAVIALTDPEGCPLSRFKDSLGNPTHILRIGESYKEKQRTIQAKKEVEQRRAGGYSRKYASKAKNLADDMVRNTARDLLYYAVTQDAMLIFENLSRGFGRQGKRTFMAERQYTRMEDWLTAKLAYEGLPSKTYLSKTLAQYTSKTCSNCGFTITSADYDRVLEKLKKTATGWMTTINGKELKVEGQITYYNRYKRQNVVKDLSVELDRLSEESVNNDISSWTKGRSGEALSLLKKRFSHRPVQEKFVCLNCGFETHADEQAALNIARSWLFLRSQEYKKYQTNKTTGNTDKRAFVETWQSFYRKKLKEVWKPAV

SEQ ID NO: 35292 - protein, 978 aa, synthetic construct
  REGION 1..978: note = engineered CasX variant
QEIKRINKIRRRLVKDSNTKKAGKTGPMKTLLVRVMTPDLRERLENLRKKPENIPQPISNTSRANLNKLLTDYTEMKKAILHVYWEEFQKDPVGLMSRVAQPASKKIDQNKLKPEMDEKGNLTTAGFACSQCGQPLFVYKLEQVSEKGKAYTNYVGRCNVAEHEKLIKLSQLKPEKDSDEAVTYSLGKFGQRALDFYSIHVTKESTHPVKPLAQIAGNRYASGPVGKALSDACMGTIASFLSKYQDIIIEHQKVVKGNQKRLESLRELAGKENLEYPSVTLPPQPHTKEGVDAYNEVIARVRMWVNLNLWQKLKLSRDDAKPLLRLKGFPSFPLVERQANEVDWWDMVCNVKKLINEKKEDGKVFWQNLAGYKRQEALRPYLSSEEDRKKGKKFARYQLGDLLLHLEKKHGEDWGKVYDEAWERIDKKVEGLSKHIKLEEERRSEDAQSKAALTDWLRAKASFVIEGLKEADKDEFCRCELKLQKWYGDLRGKPFAIEAENSILDISGFSKQYNCAFIWQKDGVKKLNLYLIINYFKGGKLRFKKIKPEAFEANRFYTVINKKSGEIVPMEVNFNFDDPNLIILPLAFGKRQGREFIWNDLLSLETGSLKLANGRVIEKTLYNRRTRQDEPALFVALTFERREVLDSSNIKPMNLIGVDRGENIPAVIALTDPEGCPLSRFKDSLGNPTHILRIGESYKEKQRTIQAKKEVEQRRAGGYSRKYASKAKNLADDMVRNTARDLLYYAVTQDAMLIFENLSRGFGRQGKRTFMAERQYTRMEDWLTAKLAYEGLPSKTYLSKTLAQYTSKTCSNCGFTITSADYDRVLEKLKKTATGWMTTINGKELKVEGQITYYNRYKRQNVVKDLSVELDRLSEESVNNDISSWTKGRSGEALSLLKKRFSHRPVQEKFVCLNCGFETHADEQAALNIARSWLFLRSQEYKKYQTNKTTGNTDKRAFVETWQSFYRKKLKEVWKPAV

SEQ ID NO: 35293 - protein, 977 aa, synthetic construct
  REGION 1..977: note = engineered CasX variant
QEIKRINKIRRRLVKDSNTKKAGKTGPMKTLLVRVMTPDLRERLENLRKKPENIPQPISNTSRANLNKLLTDYTEMKKAILHVYWEEFQKDPVGLMSRVAQPASKKIDQNKLKPEMDEKGNLTTAGFACSQCGQPLFVYKLEQVSEKGKAYTNYVGRCNVAEHEKLILLSQLKPEKDSDEAVTYSLGKFGQRALDFYSIHVTKESTHPVKPLAQIAGNRYASPVGKALSDACMGTIASFLSKYQDIIIEHQKVVKGNQKRLESLRELAGKENLEYPSVTLPPQPHTKEGVDAYNEVIARVRMWVNLNLWQKLKLSRDDAKPLLRLKGFPSFPLVERQANEVDWWDMVCNVKKLINEKKEDGKVFWQNLAGYKRQEALRPYLSSEEDRKKGKKFARYQLGDLLLHLEKKHGEDWGKVYDEAWERIDKKVEGLSKHIKLEEERRSEDAQSKAALTDWLRAKASFVIEGLKEADKDEFCRCELKLQKWYGDLRGKPFAIEAENSILDISGFSKQYNCAFIWQKDGVKKLNLYLIINYFKGGKLRFKKIKPEAFEANRFYTVINKKSGEIVPMEVNFNFDDPNLIILPLAFGKRQGREFIWNDLLSLETGSLKLANGRVIEKTLYNRRTRQDEPALFVALTFERREVLDSSNIKPMNLIGVDRGENIPAVIALTDPEGCPLSRFKDSLGNPTHILRIGESYKEKQRTIQAKKEVEQRRAGGYSRKYASKAKNLADDMVRNTARDLLYYAVTQDAMLIFENLSRGFGRQGKRTFMAERQYTRMEDWLTAKLAYEGLPSKTYLSKTLAQYTSKTCSNCGFTITSADYDRVLEKLKKTATGWMTTINGKELKVEGQITYYNRYKRQNVVKDLSVELDRLSEESVNNDISSWTKGRSGEALSLLKKRFSHRPVQEKFVCLNCGFETHADEQAALNIARSWLFLRSQEYKKYQTNKTTGNTDKRAFVETWQSFYRKKLKEVWKPAV

SEQ ID NO: 35294 - protein, 978 aa, synthetic construct
  REGION 1..978: note = engineered CasX variant
QEIKRINKIRRRLVKDSNTKKAGKTGPMKTLLVRVMTPDLRERLENLRKKPENIPQPISNTSRANLNKLLTDYTEMKKAILHVYWEEFQKDPVGLMSRVAQPASKKIDQNKLKPEMDEKGNLTTAGFACSQCGQPLFVYKLEQVSEKGKAYTNYFGRCNVAEHEKLILLSQLKPEKDSDEAVTYSLGKFGQRALDFYSIHVTKESTHPVKPLAQIAGNRYASYPVGKALSDACMGTIASFLSKYQDIIIEHQKVVKGNQKRLESLRELAGKENLEYPSVTLPPQPHTKEGVDAYNEVIARVRMWVNLNLWQKLKLSRDDAKPLLRLKGFPSFPLVERQANEVDWWDMVCNVKKLINEKKEDGKVFWQNLAGYKRQEALRPYLSSEEDRKKGKKFARYQLGDLLLHLEKKHGEDWGKVYDEAWERIDKKVEGLSKHIKLEEERRSEDAQSKAALTDWLRAKASFVIEGLKEADKDEFCRCELKLQKWYGDLRGKPFAIEAENSILDISGFSKQYNCAFIWQKDGVKKLNLYLIINYFKGGKLRFKKIKPEAFEANRFYTVINKKSGEIVPMEVNFNFDDPNLIILPLAFGKRQGREFIWNDLLSLETGSLKLANGRVIEKTLYNRRTRQDEPALFVALTFERREVLDSSNIKPMNLIGVDRGENIPAVIALTDPEGCPLSRFKDSLGNPTHILRIGESYKEKQRTIQAKKEVEQRRAGGYSRKYASKAKNLADDMVRNTARDLLYYAVTQDAMLIFENLSRGFGRQGKRTFMAERQYTRMEDWLTAKLAYEGLASKTYLSKTLAQYTSKTCSNCGFTITSADYDRVLEKLKKTATGWMTTINGKELKVEGQITYYNRYKRQNVVKDLSVELDRLSEESVNNDISSWTKGRSGEALSLLKKRFSHRPVQEKFVCLNCGFETHADEQAALNIARSWLFLRSQEYKKYQTNKTTGNTDKRAFVETWQSFYRKKLKEVWKPAV

SEQ ID NO: 35295 - protein, 978 aa, synthetic construct
  REGION 1..978: note = engineered CasX variant
QEIKRINKIRRRLVKDSNTKKAGKTGPMKTLLVRVMTPDLRERLENLRKKPENIPQPISNTSRANLNKLLTDYTEMKKAILHVYWEEFQKDPVGLMSRVAQPASKKIDQNKLKPEMDEKGNLTTAGFACSQCGQPLFVYKLEQVSEKGKAYTNYFGRCNVAEHEKLILLSQLKPEKDSDEAVTYSLGKFGQRALDFYSIHVTKESTHPVKPLAQIAGNRYASHPVGKALSDACMGTIASFLSKYQDIIIEHQKVVKGNQKRLESLRELAGKENLEYPSVTLPPQPHTKEGVDAYNEVIARVRMWVNLNLWQKLKLSRDDAKPLLRLKGFPSFPLVERQANEVDWWDMVCNVKKLINEKKEDGKVFWQNLAGYKRQEALRPYLSSEEDRKKGKKFARYQLGDLLLHLEKKHGEDWGKVYDEAWERIDKKVEGLSKHIKLEEERRSEDAQSKAALTDWLRAKASFVIEGLKEADKDEFCRCELKLQKWYGDLRGKPFAIEAENSILDISGFSKQYNCAFIWQKDGVKKLNLYLIINYFKGGKLRFKKIKPEAFEANRFYTVINKKSGEIVPMEVNFNFDDPNLIILPLAFGKRQGREFIWNDLLSLETGSLKLANGRVIEKTLYNRRTRQDEPALFVALTFERREVLDSSNIKPMNLIGVDRGENIPAVIALTDPEGCPLSRFKDSLGNPTHILRIGESYKEKQRTIQAKKEVEQRRAGGYSRKYASKAKNLADDMVRNTARDLLYYAVTQDAMLIFENLSRGFGRQGKRTFMAERQYTRMEDWLTAKLAYEGLASKTYLSKTLAQYTSKTCSNCGFTITSADYDRVLEKLKKTATGWMTTINGKELKVEGQITYYNRYKRQNVVKDLSVELDRLSEESVNNDISSWTKGRSGEALSLLKKRFSHRPVQEKFVCLNCGFETHADEQAALNIARSWLFLRSQEYKKYQTNKTTGNTDKRAFVETWQSFYRKKLKEVWKPAV

SEQ ID NO: 35296 - protein, 978 aa, synthetic construct
  REGION 1..978: note = engineered CasX variant
QEIKRINKIRRRLVKDSNTKKAGKTGPMKTLLVRVMTPDLRERLENLRKKPENIPQPISNTSRANLNKLLTDYTEMKKAILHVYWEEFQKDPVGLMSRVAQPASKKIDQNKLKPEMDEKGNLTTAGFACSQCGQPLFVYKLEQVSEKGKAYTNYFGRCNVAEHEKLILLSQLKPEKDSDEAVTYSLGKFGQRALDFYSIHVTKESTHPVKPLAQIAGNRYASSPVGKALSDACMGTIASFLSKYQDIIIEHQKVVKGNQKRLESLRELAGKENLEYPSVTLPPQPHTKEGVDAYNEVIARVRMWVNLNLWQKLKLSRDDAKPLLRLKGFPSFPLVERQANEVDWWDMVCNVKKLINEKKEDGKVFWQNLAGYKRQEALRPYLSSEEDRKKGKKFARYQLGDLLLHLEKKHGEDWGKVYDEAWERIDKKVEGLSKHIKLEEERRSEDAQSKAALTDWLRAKASFVIEGLKEADKDEFCRCELKLQKWYGDLRGKPFAIEAENSILDISGFSKQYNCAFIWQKDGVKKLNLYLIINYFKGGKLRFKKIKPEAFEANRFYTVINKKSGEIVPMEVNFNFDDPNLIILPLAFGKRQGREFIWNDLLSLETGSLKLANGRVIEKTLYNRRTRQDEPALFVALTFERREVLDSSNIKPMNLIGVDRGENIPAVIALTDPEGCPLSRFKDSLGNPTHILRIGESYKEKQRTIQAKKEVEQRRAGGYSRKYASKAKNLADDMVRNTARDLLYYAVTQDAMLIFENLSRGFGRQGKRTFMAERQYTRMEDWLTAKLAYEGLASKTYLSKTLAQYTSKTCSNCGFTITSADYDRVLEKLKKTATGWMTTINGKELKVEGQITYYNRYKRQNVVKDLSVELDRLSEESVNNDISSWTKGRSGEALSLLKKRFSHRPVQEKFVCLNCGFETHADEQAALNIARSWLFLRSQEYKKYQTNKTTGNTDKRAFVETWQSFYRKKLKEVWKPAV

SEQ ID NO: 35297 - protein, 978 aa, synthetic construct
  REGION 1..978: note = engineered CasX variant
QEIKRINKIRRRLVKDSNTKKAGKTGPMKTLLVRVMTPDLRERLENLRKKPENIPQPISNTSRANLNKLLTDYTEMKKAILHVYWEEFQKDPVGLMSRVAQPASKKIDQNKLKPEMDEKGNLTTAGFACSQCGQPLFVYKLEQVSEKGKAYTNYFGRCNVAEHEKLILLSQLKPEKDSDEAVTYSLGKFGQRALDFYSIHVTKESTHPVKPLAQIAGNRYASTPVGKALSDACMGTIASFLSKYQDIIIEHQKVVKGNQKRLESLRELAGKENLEYPSVTLPPQPHTKEGVDAYNEVIARVRMWVNLNLWQKLKLSRDDAKPLLRLKGFPSFPLVERQANEVDWWDMVCNVKKLINEKKEDGKVFWQNLAGYKRQEALRPYLSSEEDRKKGKKFARYQLGDLLLHLEKKHGEDWGKVYDEAWERIDKKVEGLSKHIKLEEERRSEDAQSKAALTDWLRAKASFVIEGLKEADKDEFCRCELKLQKWYGDLRGKPFAIEAENSILDISGFSKQYNCAFIWQKDGVKKLNLYLIINYFKGGKLRFKKIKPEAFEANRFYTVINKKSGEIVPMEVNFNFDDPNLIILPLAFGKRQGREFIWNDLLSLETGSLKLANGRVIEKTLYNRRTRQDEPALFVALTFERREVLDSSNIKPMNLIGVDRGENIPAVIALTDPEGCPLSRFKDSLGNPTHILRIGESYKEKQRTIQAKKEVEQRRAGGYSRKYASKAKNLADDMVRNTARDLLYYAVTQDAMLIFENLSRGFGRQGKRTFMAERQYTRMEDWLTAKLAYEGLASKTYLSKTLAQYTSKTCSNCGFTITSADYDRVLEKLKKTATGWMTTINGKELKVEGQITYYNRYKRQNVVKDLSVELDRLSEESVNNDISSWTKGRSGEALSLLKKRFSHRPVQEKFVCLNCGFETHADEQAALNIARSWLFLRSQEYKKYQTNKTTGNTDKRAFVETWQSFYRKKLKEVWKPAV

SEQ ID NO: 35298 - protein, 978 aa, synthetic construct
  REGION 1..978: note = engineered CasX variant
QEIKRINKIRRRLVKDSNTKKAGKTGPMKTLLVRVMTPDLRERLENLRKKPENIPQPISNTSRANLNKLLTDYTEMKKAILHVYWEEFQKDPVGLMSRVAQPASKKIDQNKLKPEMDEKGNLTTAGFACSQCGQPLFVYKLEQVSEKGKAYTNYFGRCNVAEHEKLILLSQLKPEKDSDEAVTYSLGKFGQRALDFYSIHVTKESTHPVKPLAQIAGNRYASAPVGKALSDACMGTIASFLSKYQDIIIEHQKVVKGNQKRLESLRELAGKENLEYPSVTLPPQPHTKEGVDAYNEVIARVRMWVNLNLWQKLKLSRDDAKPLLRLKGFPSFPLVERQANEVDWWDMVCNVKKLINEKKEDGKVFWQNLAGYKRQEALRPYLSSEEDRKKGKKFARYQLGDLLLHLEKKHGEDWGKVYDEAWERIDKKVEGLSKHIKLEEERRSEDAQSKAALTDWLRAKASFVIEGLKEADKDEFCRCELKLQKWYGDLRGKPFAIEAENSILDISGFSKQYNCAFIWQKDGVKKLNLYLIINYFKGGKLRFKKIKPEAFEANRFYTVINKKSGEIVPMEVNFNFDDPNLIILPLAFGKRQGREFIWNDLLSLETGSLKLANGRVIEKTLYNRRTRQDEPALFVALTFERREVLDSSNIKPMNLIGVDRGENIPAVIALTDPEGCPLSRFKDSLGNPTHILRIGESYKEKQRTIQAKKEVEQRRAGGYSRKYASKAKNLADDMVRNTARDLLYYAVTQDAMLIFENLSRGFGRQGKRTFMAERQYTRMEDWLTAKLAYEGLASKTYLSKTLAQYTSKTCSNCGFTITSADYDRVLEKLKKTATGWMTTINGKELKVEGQITYYNRYKRQNVVKDLSVELDRLSEESVNNDISSWTKGRSGEALSLLKKRFSHRPVQEKFVCLNCGFETHADEQAALNIARSWLFLRSQEYKKYQTNKTTGNTDKRAFVETWQSFYRKKLKEVWKPAV

SEQ ID NO: 35299 - protein, 978 aa, synthetic construct
  REGION 1..978: note = engineered CasX variant
QEIKRINKIRRRLVKDSNTKKAGKTGPMKTLLVRVMTPDLRERLENLRKKPENIPQPISNTSRANLNKLLTDYTEMKKAILHVYWEEFQKDPVGLMSRVAQPASKKIDQNKLKPEMDEKGNLTTAGFACSQCGQPLFVYKLEQVSEKGKAYTNYFGRCNVAEHEKLILLSQLKPEKDSDEAVTYSLGKFGQRALDFYSIHVTKESTHPVKPLAQIAGNRYASVPVGKALSDACMGTIASFLSKYQDIIIEHQKVVKGNQKRLESLRELAGKENLEYPSVTLPPQPHTKEGVDAYNEVIARVRMWVNLNLWQKLKLSRDDAKPLLRLKGFPSFPLVERQANEVDWWDMVCNVKKLINEKKEDGKVFWQNLAGYKRQEALRPYLSSEEDRKKGKKFARYQLGDLLLHLEKKHGEDWGKVYDEAWERIDKKVEGLSKHIKLEEERRSEDAQSKAALTDWLRAKASFVIEGLKEADKDEFCRCELKLQKWYGDLRGKPFAIEAENSILDISGFSKQYNCAFIWQKDGVKKLNLYLIINYFKGGKLRFKKIKPEAFEANRFYTVINKKSGEIVPMEVNFNFDDPNLIILPLAFGKRQGREFIWNDLLSLETGSLKLANGRVIEKTLYNRRTRQDEPALFVALTFERREVLDSSNIKPMNLIGVDRGENIPAVIALTDPEGCPLSRFKDSLGNPTHILRIGESYKEKQRTIQAKKEVEQRRAGGYSRKYASKAKNLADDMVRNTARDLLYYAVTQDAMLIFENLSRGFGRQGKRTFMAERQYTRMEDWLTAKLAYEGLASKTYLSKTLAQYTSKTCSNCGFTITSADYDRVLEKLKKTATGWMTTINGKELKVEGQITYYNRYKRQNVVKDLSVELDRLSEESVNNDISSWTKGRSGEALSLLKKRFSHRPVQEKFVCLNCGFETHADEQAALNIARSWLFLRSQEYKKYQTNKTTGNTDKRAFVETWQSFYRKKLKEVWKPAV

SEQ ID NO: 35300 - protein, 978 aa, synthetic construct
  REGION 1..978: note = engineered CasX variant
QEIKRINKIRRRLVKDSNTKKAGKTGPMKTLLVRVMTPDLRERLENLRKKPENIPQPISNTSRANLNKLLTDYTEMKKAILHVYWEEFQKDPVGLMSRVAQPASKKIDQNKLKPEMDEKGNLTTAGFACSQCGQPLFVYKLEQVSEKGKAYTNYFGRCNVAEHEKLIKLSQLKPEKDSDEAVTYSLGKFGQRALDFYSIHVTKESTHPVKPLAQIAGNRYASGPVGKALSDACMGTIASFLSKYQDIIIEHQKVVKGNQKRLESLRELAGKENLEYPSVTLPPQPHTKEGVDAYNEVIARVRMWVNLNLWQKLKLSRDDAKPLLRLKGFPSFPLVERQANEVDWWDMVCNVKKLINEKKEDGKVFWQNLAGYKRQEALRPYLSSEEDRKKGKKFARYQLGDLLLHLEKKHGEDWGKVYDEAWERIDKKVEGLSKHIKLEEERRSEDAQSKAALTDWLRAKASFVIEGLKEADKDEFCRCELKLQKWYGDLRGKPFAIEAENSILDISGFSKQYNCAFIWQKDGVKKLNLYLIINYFKGGKLRFKKIKPEAFEANRFYTVINKKSGEIVPMEVNFNFDDPNLIILPLAFGKRQGREFIWNDLLSLETGSLKLANGRVIEKTLYNRRTRQDEPALFVALTFERREVLDSSNIKPMNLIGVDRGENIPAVIALTDPEGCPLSRFKDSLGNPTHILRIGESYKEKQRTIQAKKEVEQRRAGGYSRKYASKAKNLADDMVRNTARDLLYYAVTQDAMLIFENLSRGFGRQGKRTFMAERQYTRMEDWLTAKLAYEGLASKTYLSKTLAQYTSKTCSNCGFTITSADYDRVLEKLKKTATGWMTTINGKELKVEGQITYYNRYKRQNVVKDLSVELDRLSEESVNNDISSWTKGRSGEALSLLKKRFSHRPVQEKFVCLNCGFETHADEQAALNIARSWLFLRSQEYKKYQTNKTTGNTDKRAFVETWQSFYRKKLKEVWKPAV

SEQ ID NO: 35301 - protein, 977 aa, synthetic construct
  REGION 1..977: note = engineered CasX variant
QEIKRINKIRRRLVKDSNTKKAGKTGPMKTLLVRVMTPDLRERLENLRKKPENIPQPISNTSRANLNKLLTDYTEMKKAILHVYWEEFQKDPVGLMSRVAQPASKKIDQNKLKPEMDEKGNLTTAGFACSQCGQPLFVYKLEQVSEKGKAYTNYFGRCNVAEHEKLILLSQLKPEKDSDEAVTYSLGKFGQRALDFYSIHVTKESTHPVKPLAQIAGNRYASPVGKALSDACMGTIASFLSKYQDIIIEHQKVVKGNQKRLESLRELAGKENLEYPSVTLPPQPHTKEGVDAYNEVIARVRMWVNLNLWQKLKLSRDDAKPLLRLKGFPSFPLVERQANEVDWWDMVCNVKKLINEKKEDGKVFWQNLAGYKRQEALRPYLSSEEDRKKGKKFARYQLGDLLLHLEKKHGEDWGKVYDEAWERIDKKVEGLSKHIKLEEERRSEDAQSKAALTDWLRAKASFVIEGLKEADKDEFCRCELKLQKWYGDLRGKPFAIEAENSILDISGFSKQYNCAFIWQKDGVKKLNLYLIINYFKGGKLRFKKIKPEAFEANRFYTVINKKSGEIVPMEVNFNFDDPNLIILPLAFGKRQGREFIWNDLLSLETGSLKLANGRVIEKTLYNRRTRQDEPALFVALTFERREVLDSSNIKPMNLIGVDRGENIPAVIALTDPEGCPLSRFKDSLGNPTHILRIGESYKEKQRTIQAKKEVEQRRAGGYSRKYASKAKNLADDMVRNTARDLLYYAVTQDAMLIFENLSRGFGRQGKRTFMAERQYTRMEDWLTAKLAYEGLASKTYLSKTLAQYTSKTCSNCGFTITSADYDRVLEKLKKTATGWMTTINGKELKVEGQITYYNRYKRQNVVKDLSVELDRLSEESVNNDISSWTKGRSGEALSLLKKRFSHRPVQEKFVCLNCGFETHADEQAALNIARSWLFLRSQEYKKYQTNKTTGNTDKRAFVETWQSFYRKKLKEVWKPAV

SEQ ID NO: 35302 - protein, 978 aa, synthetic construct
  REGION 1..978: note = engineered CasX variant
QEIKRINKIRRRLVKDSNTKKAGKTGPMKTLLVRVMTPDLRERLENLRKKPENIPQPISNTSRANLNKLLTDYTEMKKAILHVYWEEFQKDPVGLMSRVAQPASKKIDQNKLKPEMDEKGNLTTAGFACSQCGQPLFVYKLEQVSEKGKAYTNYFGRCNVAEHEKLILLSQLKPEKDSDEAVTYSLGKFGQRALDFYSIHVTKESTHPVKPLAQIAGNRYASYPVGKALSDACMGTIASFLSKYQDIIIEHQKVVKGNQKRLESLRELAGKENLEYPSVTLPPQPHTKEGVDAYNEVIARVRMWVNLNLWQKLKLSRDDAKPLLRLKGFPSFPLVERQANEVDWWDMVCNVKKLINEKKEDGKVFWQNLAGYKRQEALRPYLSSEEDRKKGKKFARYQLGDLLLHLEKKHGEDWGKVYDEAWERIDKKVEGLSKHIKLEEERRSEDAQSKAALTDWLRAKASFVIEGLKEADKDEFCRCELKLQKWYGDLRGKPFAIEAENSILDISGFSKQYNCAFIWQKDGVKKLNLYLIINYFKGGKLRFKKIKPEAFEANRFYTVINKKSGEIVPMEVNFNFDDPNLIILPLAFGKRQGREFIWNDLLSLETGSLKLANGRVIEKTLYNRRTRQDEPALFVALTFERREVLDSSNIKPMNLIGVDRGENIPAVIALTDPEGCPLSRFKDSLGNPTHILRIGESYKEKQRTIQAKKEVEQRRAGGYSRKYASKAKNLADDMVRNTARDLLYYAVTQDAMLIFENLSRGFGRQGKRTFMAERQYTRMEDWLTAKLAYEGLPSKVYLSKTLAQYTSKTCSNCGFTITSADYDRVLEKLKKTATGWMTTINGKELKVEGQITYYNRYKRQNVVKDLSVELDRLSEESVNNDISSWTKGRSGEALSLLKKRFSHRPVQEKFVCLNCGFETHADEQAALNIARSWLFLRSQEYKKYQTNKTTGNTDKRAFVETWQSFYRKKLKEVWKPAV

SEQ ID NO: 35303 - protein, 978 aa, synthetic construct
  REGION 1..978: note = engineered CasX variant
QEIKRINKIRRRLVKDSNTKKAGKTGPMKTLLVRVMTPDLRERLENLRKKPENIPQPISNTSRANLNKLLTDYTEMKKAILHVYWEEFQKDPVGLMSRVAQPASKKIDQNKLKPEMDEKGNLTTAGFACSQCGQPLFVYKLEQVSEKGKAYTNYFGRCNVAEHEKLILLSQLKPEKDSDEAVTYSLGKFGQRALDFYSIHVTKESTHPVKPLAQIAGNRYASHPVGKALSDACMGTIASFLSKYQDIIIEHQKVVKGNQKRLESLRELAGKENLEYPSVTLPPQPHTKEGVDAYNEVIARVRMWVNLNLWQKLKLSRDDAKPLLRLKGFPSFPLVERQANEVDWWDMVCNVKKLINEKKEDGKVFWQNLAGYKRQEALRPYLSSEEDRKKGKKFARYQLGDLLLHLEKKHGEDWGKVYDEAWERIDKKVEGLSKHIKLEEERRSEDAQSKAALTDWLRAKASFVIEGLKEADKDEFCRCELKLQKWYGDLRGKPFAIEAENSILDISGFSKQYNCAFIWQKDGVKKLNLYLIINYFKGGKLRFKKIKPEAFEANRFYTVINKKSGEIVPMEVNFNFDDPNLIILPLAFGKRQGREFIWNDLLSLETGSLKLANGRVIEKTLYNRRTRQDEPALFVALTFERREVLDSSNIKPMNLIGVDRGENIPAVIALTDPEGCPLSRFKDSLGNPTHILRIGESYKEKQRTIQAKKEVEQRRAGGYSRKYASKAKNLADDMVRNTARDLLYYAVTQDAMLIFENLSRGFGRQGKRTFMAERQYTRMEDWLTAKLAYEGLPSKVYLSKTLAQYTSKTCSNCGFTITSADYDRVLEKLKKTATGWMTTINGKELKVEGQITYYNRYKRQNVVKDLSVELDRLSEESVNNDISSWTKGRSGEALSLLKKRFSHRPVQEKFVCLNCGFETHADEQAALNIARSWLFLRSQEYKKYQTNKTTGNTDKRAFVETWQSFYRKKLKEVWKPAV

SEQ ID NO: 35304 - protein, 978 aa, synthetic construct
  REGION 1..978: note = engineered CasX variant
QEIKRINKIRRRLVKDSNTKKAGKTGPMKTLLVRVMTPDLRERLENLRKKPENIPQPISNTSRANLNKLLTDYTEMKKAILHVYWEEFQKDPVGLMSRVAQPASKKIDQNKLKPEMDEKGNLTTAGFACSQCGQPLFVYKLEQVSEKGKAYTNYFGRCNVAEHEKLILLSQLKPEKDSDEAVTYSLGKFGQRALDFYSIHVTKESTHPVKPLAQIAGNRYASSPVGKALSDACMGTIASFLSKYQDIIIEHQKVVKGNQKRLESLRELAGKENLEYPSVTLPPQPHTKEGVDAYNEVIARVRMWVNLNLWQKLKLSRDDAKPLLRLKGFPSFPLVERQANEVDWWDMVCNVKKLINEKKEDGKVFWQNLAGYKRQEALRPYLSSEEDRKKGKKFARYQLGDLLLHLEKKHGEDWGKVYDEAWERIDKKVEGLSKHIKLEEERRSEDAQSKAALTDWLRAKASFVIEGLKEADKDEFCRCELKLQKWYGDLRGKPFAIEAENSILDISGFSKQYNCAFIWQKDGVKKLNLYLIINYFKGGKLRFKKIKPEAFEANRFYTVINKKSGEIVPMEVNFNFDDPNLIILPLAFGKRQGREFIWNDLLSLETGSLKLANGRVIEKTLYNRRTRQDEPALFVALTFERREVLDSSNIKPMNLIGVDRGENIPAVIALTDPEGCPLSRFKDSLGNPTHILRIGESYKEKQRTIQAKKEVEQRRAGGYSRKYASKAKNLADDMVRNTARDLLYYAVTQDAMLIFENLSRGFGRQGKRTFMAERQYTRMEDWLTAKLAYEGLPSKVYLSKTLAQYTSKTCSNCGFTITSADYDRVLEKLKKTATGWMTTINGKELKVEGQITYYNRYKRQNVVKDLSVELDRLSEESVNNDISSWTKGRSGEALSLLKKRFSHRPVQEKFVCLNCGFETHADEQAALNIARSWLFLRSQEYKKYQTNKTTGNTDKRAFVETWQSFYRKKLKEVWKPAV

SEQ ID NO: 35305 - protein, 978 aa, synthetic construct
  REGION 1..978: note = engineered CasX variant
QEIKRINKIRRRLVKDSNTKKAGKTGPMKTLLVRVMTPDLRERLENLRKKPENIPQPISNTSRANLNKLLTDYTEMKKAILHVYWEEFQKDPVGLMSRVAQPASKKIDQNKLKPEMDEKGNLTTAGFACSQCGQPLFVYKLEQVSEKGKAYTNYFGRCNVAEHEKLILLSQLKPEKDSDEAVTYSLGKFGQRALDFYSIHVTKESTHPVKPLAQIAGNRYASTPVGKALSDACMGTIASFLSKYQDIIIEHQKVVKGNQKRLESLRELAGKENLEYPSVTLPPQPHTKEGVDAYNEVIARVRMWVNLNLWQKLKLSRDDAKPLLRLKGFPSFPLVERQANEVDWWDMVCNVKKLINEKKEDGKVFWQNLAGYKRQEALRPYLSSEEDRKKGKKFARYQLGDLLLHLEKKHGEDWGKVYDEAWERIDKKVEGLSKHIKLEEERRSEDAQSKAALTDWLRAKASFVIEGLKEADKDEFCRCELKLQKWYGDLRGKPFAIEAENSILDISGFSKQYNCAFIWQKDGVKKLNLYLIINYFKGGKLRFKKIKPEAFEANRFYTVINKKSGEIVPMEVNFNFDDPNLIILPLAFGKRQGREFIWNDLLSLETGSLKLANGRVIEKTLYNRRTRQDEPALFVALTFERREVLDSSNIKPMNLIGVDRGENIPAVIALTDPEGCPLSRFKDSLGNPTHILRIGESYKEKQRTIQAKKEVEQRRAGGYSRKYASKAKNLADDMVRNTARDLLYYAVTQDAMLIFENLSRGFGRQGKRTFMAERQYTRMEDWLTAKLAYEGLPSKVYLSKTLAQYTSKTCSNCGFTITSADYDRVLEKLKKTATGWMTTINGKELKVEGQITYYNRYKRQNVVKDLSVELDRLSEESVNNDISSWTKGRSGEALSLLKKRFSHRPVQEKFVCLNCGFETHADEQAALNIARSWLFLRSQEYKKYQTNKTTGNTDKRAFVETWQSFYRKKLKEVWKPAV

SEQ ID NO: 35306 - protein, 978 aa, synthetic construct
  REGION 1..978: note = engineered CasX variant
QEIKRINKIRRRLVKDSNTKKAGKTGPMKTLLVRVMTPDLRERLENLRKKPENIPQPISNTSRANLNKLLTDYTEMKKAILHVYWEEFQKDPVGLMSRVAQPASKKIDQNKLKPEMDEKGNLTTAGFACSQCGQPLFVYKLEQVSEKGKAYTNYFGRCNVAEHEKLILLSQLKPEKDSDEAVTYSLGKFGQRALDFYSIHVTKESTHPVKPLAQIAGNRYASAPVGKALSDACMGTIASFLSKYQDIIIEHQKVVKGNQKRLESLRELAGKENLEYPSVTLPPQPHTKEGVDAYNEVIARVRMWVNLNLWQKLKLSRDDAKPLLRLKGFPSFPLVERQANEVDWWDMVCNVKKLINEKKEDGKVFWQNLAGYKRQEALRPYLSSEEDRKKGKKFARYQLGDLLLHLEKKHGEDWGKVYDEAWERIDKKVEGLSKHIKLEEERRSEDAQSKAALTDWLRAKASFVIEGLKEADKDEFCRCELKLQKWYGDLRGKPFAIEAENSILDISGFSKQYNCAFIWQKDGVKKLNLYLIINYFKGGKLRFKKIKPEAFEANRFYTVINKKSGEIVPMEVNFNFDDPNLIILPLAFGKRQGREFIWNDLLSLETGSLKLANGRVIEKTLYNRRTRQDEPALFVALTFERREVLDSSNIKPMNLIGVDRGENIPAVIALTDPEGCPLSRFKDSLGNPTHILRIGESYKEKQRTIQAKKEVEQRRAGGYSRKYASKAKNLADDMVRNTARDLLYYAVTQDAMLIFENLSRGFGRQGKRTFMAERQYTRMEDWLTAKLAYEGLPSKVYLSKTLAQYTSKTCSNCGFTITSADYDRVLEKLKKTATGWMTTINGKELKVEGQITYYNRYKRQNVVKDLSVELDRLSEESVNNDISSWTKGRSGEALSLLKKRFSHRPVQEKFVCLNCGFETHADEQAALNIARSWLFLRSQEYKKYQTNKTTGNTDKRAFVETWQSFYRKKLKEVWKPAV

SEQ ID NO: 35307 - protein, 978 aa, synthetic construct
  REGION 1..978: note = engineered CasX variant
QEIKRINKIRRRLVKDSNTKKAGKTGPMKTLLVRVMTPDLRERLENLRKKPENIPQPISNTSRANLNKLLTDYTEMKKAILHVYWEEFQKDPVGLMSRVAQPASKKIDQNKLKPEMDEKGNLTTAGFACSQCGQPLFVYKLEQVSEKGKAYTNYFGRCNVAEHEKLILLSQLKPEKDSDEAVTYSLGKFGQRALDFYSIHVTKESTHPVKPLAQIAGNRYASVPVGKALSDACMGTIASFLSKYQDIIIEHQKVVKGNQKRLESLRELAGKENLEYPSVTLPPQPHTKEGVDAYNEVIARVRMWVNLNLWQKLKLSRDDAKPLLRLKGFPSFPLVERQANEVDWWDMVCNVKKLINEKKEDGKVFWQNLAGYKRQEALRPYLSSEEDRKKGKKFARYQLGDLLLHLEKKHGEDWGKVYDEAWERIDKKVEGLSKHIKLEEERRSEDAQSKAALTDWLRAKASFVIEGLKEADKDEFCRCELKLQKWYGDLRGKPFAIEAENSILDISGFSKQYNCAFIWQKDGVKKLNLYLIINYFKGGKLRFKKIKPEAFEANRFYTVINKKSGEIVPMEVNFNFDDPNLIILPLAFGKRQGREFIWNDLLSLETGSLKLANGRVIEKTLYNRRTRQDEPALFVALTFERREVLDSSNIKPMNLIGVDRGENIPAVIALTDPEGCPLSRFKDSLGNPTHILRIGESYKEKQRTIQAKKEVEQRRAGGYSRKYASKAKNLADDMVRNTARDLLYYAVTQDAMLIFENLSRGFGRQGKRTFMAERQYTRMEDWLTAKLAYEGLPSKVYLSKTLAQYTSKTCSNCGFTITSADYDRVLEKLKKTATGWMTTINGKELKVEGQITYYNRYKRQNVVKDLSVELDRLSEESVNNDISSWTKGRSGEALSLLKKRFSHRPVQEKFVCLNCGFETHADEQAALNIARSWLFLRSQEYKKYQTNKTTGNTDKRAFVETWQSFYRKKLKEVWKPAV

SEQ ID NO: 35308 - protein, 978 aa, synthetic construct
  REGION 1..978: note = engineered CasX variant
QEIKRINKIRRRLVKDSNTKKAGKTGPMKTLLVRVMTPDLRERLENLRKKPENIPQPISNTSRANLNKLLTDYTEMKKAILHVYWEEFQKDPVGLMSRVAQPASKKIDQNKLKPEMDEKGNLTTAGFACSQCGQPLFVYKLEQVSEKGKAYTNYFGRCNVAEHEKLIKLSQLKPEKDSDEAVTYSLGKFGQRALDFYSIHVTKESTHPVKPLAQIAGNRYASGPVGKALSDACMGTIASFLSKYQDIIIEHQKVVKGNQKRLESLRELAGKENLEYPSVTLPPQPHTKEGVDAYNEVIARVRMWVNLNLWQKLKLSRDDAKPLLRLKGFPSFPLVERQANEVDWWDMVCNVKKLINEKKEDGKVFWQNLAGYKRQEALRPYLSSEEDRKKGKKFARYQLGDLLLHLEKKHGEDWGKVYDEAWERIDKKVEGLSKHIKLEEERRSEDAQSKAALTDWLRAKASFVIEGLKEADKDEFCRCELKLQKWYGDLRGKPFAIEAENSILDISGFSKQYNCAFIWQKDGVKKLNLYLIINYFKGGKLRFKKIKPEAFEANRFYTVINKKSGEIVPMEVNFNFDDPNLIILPLAFGKRQGREFIWNDLLSLETGSLKLANGRVIEKTLYNRRTRQDEPALFVALTFERREVLDSSNIKPMNLIGVDRGENIPAVIALTDPEGCPLSRFKDSLGNPTHILRIGESYKEKQRTIQAKKEVEQRRAGGYSRKYASKAKNLADDMVRNTARDLLYYAVTQDAMLIFENLSRGFGRQGKRTFMAERQYTRMEDWLTAKLAYEGLPSKVYLSKTLAQYTSKTCSNCGFTITSADYDRVLEKLKKTATGWMTTINGKELKVEGQITYYNRYKRQNVVKDLSVELDRLSEESVNNDISSWTKGRSGEALSLLKKRFSHRPVQEKFVCLNCGFETHADEQAALNIARSWLFLRSQEYKKYQTNKTTGNTDKRAFVETWQSFYRKKLKEVWKPAV

SEQ ID NO: 35309 - protein, 977 aa, synthetic construct
  REGION 1..977: note = engineered CasX variant
QEIKRINKIRRRLVKDSNTKKAGKTGPMKTLLVRVMTPDLRERLENLRKKPENIPQPISNTSRANLNKLLTDYTEMKKAILHVYWEEFQKDPVGLMSRVAQPASKKIDQNKLKPEMDEKGNLTTAGFACSQCGQPLFVYKLEQVSEKGKAYTNYFGRCNVAEHEKLILLSQLKPEKDSDEAVTYSLGKFGQRALDFYSIHVTKESTHPVKPLAQIAGNRYASPVGKALSDACMGTIASFLSKYQDIIIEHQKVVKGNQKRLESLRELAGKENLEYPSVTLPPQPHTKEGVDAYNEVIARVRMWVNLNLWQKLKLSRDDAKPLLRLKGFPSFPLVERQANEVDWWDMVCNVKKLINEKKEDGKVFWQNLAGYKRQEALRPYLSSEEDRKKGKKFARYQLGDLLLHLEKKHGEDWGKVYDEAWERIDKKVEGLSKHIKLEEERRSEDAQSKAALTDWLRAKASFVIEGLKEADKDEFCRCELKLQKWYGDLRGKPFAIEAENSILDISGFSKQYNCAFIWQKDGVKKLNLYLIINYFKGGKLRFKKIKPEAFEANRFYTVINKKSGEIVPMEVNFNFDDPNLIILPLAFGKRQGREFIWNDLLSLETGSLKLANGRVIEKTLYNRRTRQDEPALFVALTFERREVLDSSNIKPMNLIGVDRGENIPAVIALTDPEGCPLSRFKDSLGNPTHILRIGESYKEKQRTIQAKKEVEQRRAGGYSRKYASKAKNLADDMVRNTARDLLYYAVTQDAMLIFENLSRGFGRQGKRTFMAERQYTRMEDWLTAKLAYEGLPSKVYLSKTLAQYTSKTCSNCGFTITSADYDRVLEKLKKTATGWMTTINGKELKVEGQITYYNRYKRQNVVKDLSVELDRLSEESVNNDISSWTKGRSGEALSLLKKRFSHRPVQEKFVCLNCGFETHADEQAALNIARSWLFLRSQEYKKYQTNKTTGNTDKRAFVETWQSFYRKKLKEVWKPAV

SEQ ID NO: 35310 - protein, 979 aa, synthetic construct
  REGION 1..979: note = engineered CasX variant
QEIKRINKIRRRLVKDSNTKKAGKTGPMKTLLVRVMTPDLRERLENLRKKPENIPQPISNTSRANLNKLLTDYTEMKKAILHVYWEEFQKDPVGLMSRVAQPASKKIDQNKLKPEMDEKGNLTTAGFACSQCGQPLFVYKLEQVSEKGKAYTNYFGRCNVAEHEKLILLSQLKPEKDSDEAVTYSLGKFGQRALDFYSIHVTKESTHPVKPLAQIAGNRYASYPVGKALSDACMGTIASFLSKYQDIIIEHQKVVKGNQKRLESLRELAGKENLEYPSVTLPPQPHTKEGVDAYNEVIARVRMWVNLNLWQKLKLSRDDAKPLLRLKGFPSFPLVERQANEVDWWDMVCNVKKLINEKKEDGKVFWQNLAGYKRQEALRPYLSSEEDRKKGKKFARYQLGDLLLHLEKKHGEDWGKVYDEAWERIDKKVEGLSKHIKLEEERRSEDAQSKAALTDWLRAKASFVIEGLKEADKDEFCRCELKLQKWYGDLRGKPFAIEAENSILDISGFSKQYNCAFIWQKDGVKKLNLYLIINYFKGGKLRFKKIKPEAFEANRFYTVINKKSGEIVPMEVNFNFDDPNLIILPLAFGKRQGREFIWNDLLSLETGSLKLANGRVIEKTLYNRRTRQDEPALFVALTFERREVLDSSNIKPMNLIGVDRGENIPAVIALTDPEGCPLSRFKDSLGNPTHILRIGESYKEKQRTIQAKKEVEQRRAGGYSRKYASKAKNLADDMVRNTARDLLYYAVTQDAMLIFENLSRGFGRQGKRTFMAERQYTRMEDWLTAKLAYEGPLPSKTYLSKTLAQYTSKTCSNCGFTITSADYDRVLEKLKKTATGWMTTINGKELKVEGQITYYNRYKRQNVVKDLSVELDRLSEESVNNDISSWTKGRSGEALSLLKKRFSHRPVQEKFVCLNCGFETHADEQAALNIARSWLFLRSQEYKKYQTNKTTGNTDKRAFVETWQSFYRKKLKEVWKPAV

SEQ ID NO: 35311 - protein, 979 aa, synthetic construct
  REGION 1..979: note = engineered CasX variant
QEIKRINKIRRRLVKDSNTKKAGKTGPMKTLLVRVMTPDLRERLENLRKKPENIPQPISNTSRANLNKLLTDYTEMKKAILHVYWEEFQKDPVGLMSRVAQPASKKIDQNKLKPEMDEKGNLTTAGFACSQCGQPLFVYKLEQVSEKGKAYTNYFGRCNVAEHEKLILLSQLKPEKDSDEAVTYSLGKFGQRALDFYSIHVTKESTHPVKPLAQIAGNRYASHPVGKALSDACMGTIASFLSKYQDIIIEHQKVVKGNQKRLESLRELAGKENLEYPSVTLPPQPHTKEGVDAYNEVIARVRMWVNLNLWQKLKLSRDDAKPLLRLKGFPSFPLVERQANEVDWWDMVCNVKKLINEKKEDGKVFWQNLAGYKRQEALRPYLSSEEDRKKGKKFARYQLGDLLLHLEKKHGEDWGKVYDEAWERIDKKVEGLSKHIKLEEERRSEDAQSKAALTDWLRAKASFVIEGLKEADKDEFCRCELKLQKWYGDLRGKPFAIEAENSILDISGFSKQYNCAFIWQKDGVKKLNLYLIINYFKGGKLRFKKIKPEAFEANRFYTVINKKSGEIVPMEVNFNFDDPNLIILPLAFGKRQGREFIWNDLLSLETGSLKLANGRVIEKTLYNRRTRQDEPALFVALTFERREVLDSSNIKPMNLIGVDRGENIPAVIALTDPEGCPLSRFKDSLGNPTHILRIGESYKEKQRTIQAKKEVEQRRAGGYSRKYASKAKNLADDMVRNTARDLLYYAVTQDAMLIFENLSRGFGRQGKRTFMAERQYTRMEDWLTAKLAYEGPLPSKTYLSKTLAQYTSKTCSNCGFTITSADYDRVLEKLKKTATGWMTTINGKELKVEGQITYYNRYKRQNVVKDLSVELDRLSEESVNNDISSWTKGRSGEALSLLKKRFSHRPVQEKFVCLNCGFETHADEQAALNIARSWLFLRSQEYKKYQTNKTTGNTDKRAFVETWQSFYRKKLKEVWKPAV

SEQ ID NO: 35312 - protein, 979 aa, synthetic construct
  REGION 1..979: note = engineered CasX variant
QEIKRINKIRRRLVKDSNTKKAGKTGPMKTLLVRVMTPDLRERLENLRKKPENIPQPISNTSRANLNKLLTDYTEMKKAILHVYWEEFQKDPVGLMSRVAQPASKKIDQNKLKPEMDEKGNLTTAGFACSQCGQPLFVYKLEQVSEKGKAYTNYFGRCNVAEHEKLILLSQLKPEKDSDEAVTYSLGKFGQRALDFYSIHVTKESTHPVKPLAQIAGNRYASSPVGKALSDACMGTIASFLSKYQDIIIEHQKVVKGNQKRLESLRELAGKENLEYPSVTLPPQPHTKEGVDAYNEVIARVRMWVNLNLWQKLKLSRDDAKPLLRLKGFPSFPLVERQANEVDWWDMVCNVKKLINEKKEDGKVFWQNLAGYKRQEALRPYLSSEEDRKKGKKFARYQLGDLLLHLEKKHGEDWGKVYDEAWERIDKKVEGLSKHIKLEEERRSEDAQSKAALTDWLRAKASFVIEGLKEADKDEFCRCELKLQKWYGDLRGKPFAIEAENSILDISGFSKQYNCAFIWQKDGVKKLNLYLIINYFKGGKLRFKKIKPEAFEANRFYTVINKKSGEIVPMEVNFNFDDPNLIILPLAFGKRQGREFIWNDLLSLETGSLKLANGRVIEKTLYNRRTRQDEPALFVALTFERREVLDSSNIKPMNLIGVDRGENIPAVIALTDPEGCPLSRFKDSLGNPTHILRIGESYKEKQRTIQAKKEVEQRRAGGYSRKYASKAKNLADDMVRNTARDLLYYAVTQDAMLIFENLSRGFGRQGKRTFMAERQYTRMEDWLTAKLAYEGPLPSKTYLSKTLAQYTSKTCSNCGFTITSADYDRVLEKLKKTATGWMTTINGKELKVEGQITYYNRYKRQNVVKDLSVELDRLSEESVNNDISSWTKGRSGEALSLLKKRFSHRPVQEKFVCLNCGFETHADEQAALNIARSWLFLRSQEYKKYQTNKTTGNTDKRAFVETWQSFYRKKLKEVWKPAV

SEQ ID NO: 35313 - protein, 979 aa, synthetic construct
  REGION 1..979: note = engineered CasX variant
QEIKRINKIRRRLVKDSNTKKAGKTGPMKTLLVRVMTPDLRERLENLRKKPENIPQPISNTSRANLNKLLTDYTEMKKAILHVYWEEFQKDPVGLMSRVAQPASKKIDQNKLKPEMDEKGNLTTAGFACSQCGQPLFVYKLEQVSEKGKAYTNYFGRCNVAEHEKLILLSQLKPEKDSDEAVTYSLGKFGQRALDFYSIHVTKESTHPVKPLAQIAGNRYASTPVGKALSDACMGTIASFLSKYQDIIIEHQKVVKGNQKRLESLRELAGKENLEYPSVTLPPQPHTKEGVDAYNEVIARVRMWVNLNLWQKLKLSRDDAKPLLRLKGFPSFPLVERQANEVDWWDMVCNVKKLINEKKEDGKVFWQNLAGYKRQEALRPYLSSEEDRKKGKKFARYQLGDLLLHLEKKHGEDWGKVYDEAWERIDKKVEGLSKHIKLEEERRSEDAQSKAALTDWLRAKASFVIEGLKEADKDEFCRCELKLQKWYGDLRGKPFAIEAENSILDISGFSKQYNCAFIWQKDGVKKLNLYLIINYFKGGKLRFKKIKPEAFEANRFYTVINKKSGEIVPMEVNFNFDDPNLIILPLAFGKRQGREFIWNDLLSLETGSLKLANGRVIEKTLYNRRTRQDEPALFVALTFERREVLDSSNIKPMNLIGVDRGENIPAVIALTDPEGCPLSRFKDSLGNPTHILRIGESYKEKQRTIQAKKEVEQRRAGGYSRKYASKAKNLADDMVRNTARDLLYYAVTQDAMLIFENLSRGFGRQGKRTFMAERQYTRMEDWLTAKLAYEGPLPSKTYLSKTLAQYTSKTCSNCGFTITSADYDRVLEKLKKTATGWMTTINGKELKVEGQITYYNRYKRQNVVKDLSVELDRLSEESVNNDISSWTKGRSGEALSLLKKRFSHRPVQEKFVCLNCGFETHADEQAALNIARSWLFLRSQEYKKYQTNKTTGNTDKRAFVETWQSFYRKKLKEVWKPAV

SEQ ID NO: 35314 - protein, 979 aa, synthetic construct
  REGION 1..979: note = engineered CasX variant
QEIKRINKIRRRLVKDSNTKKAGKTGPMKTLLVRVMTPDLRERLENLRKKPENIPQPISNTSRANLNKLLTDYTEMKKAILHVYWEEFQKDPVGLMSRVAQPASKKIDQNKLKPEMDEKGNLTTAGFACSQCGQPLFVYKLEQVSEKGKAYTNYFGRCNVAEHEKLILLSQLKPEKDSDEAVTYSLGKFGQRALDFYSIHVTKESTHPVKPLAQIAGNRYASAPVGKALSDACMGTIASFLSKYQDIIIEHQKVVKGNQKRLESLRELAGKENLEYPSVTLPPQPHTKEGVDAYNEVIARVRMWVNLNLWQKLKLSRDDAKPLLRLKGFPSFPLVERQANEVDWWDMVCNVKKLINEKKEDGKVFWQNLAGYKRQEALRPYLSSEEDRKKGKKFARYQLGDLLLHLEKKHGEDWGKVYDEAWERIDKKVEGLSKHIKLEEERRSEDAQSKAALTDWLRAKASFVIEGLKEADKDEFCRCELKLQKWYGDLRGKPFAIEAENSILDISGFSKQYNCAFIWQKDGVKKLNLYLIINYFKGGKLRFKKIKPEAFEANRFYTVINKKSGEIVPMEVNFNFDDPNLIILPLAFGKRQGREFIWNDLLSLETGSLKLANGRVIEKTLYNRRTRQDEPALFVALTFERREVLDSSNIKPMNLIGVDRGENIPAVIALTDPEGCPLSRFKDSLGNPTHILRIGESYKEKQRTIQAKKEVEQRRAGGYSRKYASKAKNLADDMVRNTARDLLYYAVTQDAMLIFENLSRGFGRQGKRTFMAERQYTRMEDWLTAKLAYEGPLPSKTYLSKTLAQYTSKTCSNCGFTITSADYDRVLEKLKKTATGWMTTINGKELKVEGQITYYNRYKRQNVVKDLSVELDRLSEESVNNDISSWTKGRSGEALSLLKKRFSHRPVQEKFVCLNCGFETHADEQAALNIARSWLFLRSQEYKKYQTNKTTGNTDKRAFVETWQSFYRKKLKEVWKPAV

SEQ ID NO: 35315 - protein, 979 aa, synthetic construct
  REGION 1..979: note = engineered CasX variant
QEIKRINKIRRRLVKDSNTKKAGKTGPMKTLLVRVMTPDLRERLENLRKKPENIPQPISNTSRANLNKLLTDYTEMKKAILHVYWEEFQKDPVGLMSRVAQPASKKIDQNKLKPEMDEKGNLTTAGFACSQCGQPLFVYKLEQVSEKGKAYTNYFGRCNVAEHEKLILLSQLKPEKDSDEAVTYSLGKFGQRALDFYSIHVTKESTHPVKPLAQIAGNRYASVPVGKALSDACMGTIASFLSKYQDIIIEHQKVVKGNQKRLESLRELAGKENLEYPSVTLPPQPHTKEGVDAYNEVIARVRMWVNLNLWQKLKLSRDDAKPLLRLKGFPSFPLVERQANEVDWWDMVCNVKKLINEKKEDGKVFWQNLAGYKRQEALRPYLSSEEDRKKGKKFARYQLGDLLLHLEKKHGEDWGKVYDEAWERIDKKVEGLSKHIKLEEERRSEDAQSKAALTDWLRAKASFVIEGLKEADKDEFCRCELKLQKWYGDLRGKPFAIEAENSILDISGFSKQYNCAFIWQKDGVKKLNLYLIINYFKGGKLRFKKIKPEAFEANRFYTVINKKSGEIVPMEVNFNFDDPNLIILPLAFGKRQGREFIWNDLLSLETGSLKLANGRVIEKTLYNRRTRQDEPALFVALTFERREVLDSSNIKPMNLIGVDRGENIPAVIALTDPEGCPLSRFKDSLGNPTHILRIGESYKEKQRTIQAKKEVEQRRAGGYSRKYASKAKNLADDMVRNTARDLLYYAVTQDAMLIFENLSRGFGRQGKRTFMAERQYTRMEDWLTAKLAYEGPLPSKTYLSKTLAQYTSKTCSNCGFTITSADYDRVLEKLKKTATGWMTTINGKELKVEGQITYYNRYKRQNVVKDLSVELDRLSEESVNNDISSWTKGRSGEALSLLKKRFSHRPVQEKFVCLNCGFETHADEQAALNIARSWLFLRSQEYKKYQTNKTTGNTDKRAFVETWQSFYRKKLKEVWKPAV

SEQ ID NO: 35316 - protein, 979 aa, synthetic construct
  REGION 1..979: note = engineered CasX variant
QEIKRINKIRRRLVKDSNTKKAGKTGPMKTLLVRVMTPDLRERLENLRKKPENIPQPISNTSRANLNKLLTDYTEMKKAILHVYWEEFQKDPVGLMSRVAQPASKKIDQNKLKPEMDEKGNLTTAGFACSQCGQPLFVYKLEQVSEKGKAYTNYFGRCNVAEHEKLIKLSQLKPEKDSDEAVTYSLGKFGQRALDFYSIHVTKESTHPVKPLAQIAGNRYASGPVGKALSDACMGTIASFLSKYQDIIIEHQKVVKGNQKRLESLRELAGKENLEYPSVTLPPQPHTKEGVDAYNEVIARVRMWVNLNLWQKLKLSRDDAKPLLRLKGFPSFPLVERQANEVDWWDMVCNVKKLINEKKEDGKVFWQNLAGYKRQEALRPYLSSEEDRKKGKKFARYQLGDLLLHLEKKHGEDWGKVYDEAWERIDKKVEGLSKHIKLEEERRSEDAQSKAALTDWLRAKASFVIEGLKEADKDEFCRCELKLQKWYGDLRGKPFAIEAENSILDISGFSKQYNCAFIWQKDGVKKLNLYLIINYFKGGKLRFKKIKPEAFEANRFYTVINKKSGEIVPMEVNFNFDDPNLIILPLAFGKRQGREFIWNDLLSLETGSLKLANGRVIEKTLYNRRTRQDEPALFVALTFERREVLDSSNIKPMNLIGVDRGENIPAVIALTDPEGCPLSRFKDSLGNPTHILRIGESYKEKQRTIQAKKEVEQRRAGGYSRKYASKAKNLADDMVRNTARDLLYYAVTQDAMLIFENLSRGFGRQGKRTFMAERQYTRMEDWLTAKLAYEGPLPSKTYLSKTLAQYTSKTCSNCGFTITSADYDRVLEKLKKTATGWMTTINGKELKVEGQITYYNRYKRQNVVKDLSVELDRLSEESVNNDISSWTKGRSGEALSLLKKRFSHRPVQEKFVCLNCGFETHADEQAALNIARSWLFLRSQEYKKYQTNKTTGNTDKRAFVETWQSFYRKKLKEVWKPAV

SEQ ID NO: 35317 - protein, 978 aa, synthetic construct
  REGION 1..978: note = engineered CasX variant
QEIKRINKIRRRLVKDSNTKKAGKTGPMKTLLVRVMTPDLRERLENLRKKPENIPQPISNTSRANLNKLLTDYTEMKKAILHVYWEEFQKDPVGLMSRVAQPASKKIDQNKLKPEMDEKGNLTTAGFACSQCGQPLFVYKLEQVSEKGKAYTNYFGRCNVAEHEKLILLSQLKPEKDSDEAVTYSLGKFGQRALDFYSIHVTKESTHPVKPLAQIAGNRYASPVGKALSDACMGTIASFLSKYQDIIIEHQKVVKGNQKRLESLRELAGKENLEYPSVTLPPQPHTKEGVDAYNEVIARVRMWVNLNLWQKLKLSRDDAKPLLRLKGFPSFPLVERQANEVDWWDMVCNVKKLINEKKEDGKVFWQNLAGYKRQEALRPYLSSEEDRKKGKKFARYQLGDLLLHLEKKHGEDWGKVYDEAWERIDKKVEGLSKHIKLEEERRSEDAQSKAALTDWLRAKASFVIEGLKEADKDEFCRCELKLQKWYGDLRGKPFAIEAENSILDISGFSKQYNCAFIWQKDGVKKLNLYLIINYFKGGKLRFKKIKPEAFEANRFYTVINKKSGEIVPMEVNFNFDDPNLIILPLAFGKRQGREFIWNDLLSLETGSLKLANGRVIEKTLYNRRTRQDEPALFVALTFERREVLDSSNIKPMNLIGVDRGENIPAVIALTDPEGCPLSRFKDSLGNPTHILRIGESYKEKQRTIQAKKEVEQRRAGGYSRKYASKAKNLADDMVRNTARDLLYYAVTQDAMLIFENLSRGFGRQGKRTFMAERQYTRMEDWLTAKLAYEGPLPSKTYLSKTLAQYTSKTCSNCGFTITSADYDRVLEKLKKTATGWMTTINGKELKVEGQITYYNRYKRQNVVKDLSVELDRLSEESVNNDISSWTKGRSGEALSLLKKRFSHRPVQEKFVCLNCGFETHADEQAALNIARSWLFLRSQEYKKYQTNKTTGNTDKRAFVETWQSFYRKKLKEVWKPAV

SEQ ID NO: 35318 - protein, 979 aa, synthetic construct
  REGION 1..979: note = engineered CasX variant
QEIKRINKIRRRLVKDSNTKKAGKTGPMKTLLVRVMTPDLRERLENLRKKPENIPQPISNTSRANLNKLLTDYTEMKKAILHVYWEEFQKDPVGLMSRVAQPASKKIDQNKLKPEMDEKGNLTTAGFACSQCGQPLFVYKLEQVSEKGKAYTNYFGRCNVAEHEKLILLSQLKPEKDSDEAVTYSLGKFGQRALDFYSIHVTKESTHPVKPLAQIAGNRYASYPVGKALSDACMGTIASFLSKYQDIIIEHQKVVKGNQKRLESLRELAGKENLEYPSVTLPPQPHTKEGVDAYNEVIARVRMWVNLNLWQKLKLSRDDAKPLLRLKGFPSFPLVERQANEVDWWDMVCNVKKLINEKKEDGKVFWQNLAGYKRQEALRPYLSSEEDVRKKGKKFARYQLGDLLLHLEKKHGEDWGKVYDEAWERIDKKVEGLSKHIKLEEERRSEDAQSKAALTDWLRAKASFVIEGLKEADKDEFCRCELKLQKWYGDLRGKPFAIEAENSILDISGFSKQYNCAFIWQKDGVKKLNLYLIINYFKGGKLRFKKIKPEAFEANRFYTVINKKSGEIVPMEVNFNFDDPNLIILPLAFGKRQGREFIWNDLLSLETGSLKLANGRVIEKTLYNRRTRQDEPALFVALTFERREVLDSSNIKPMNLIGVDRGENIPAVIALTDPEGCPLSRFKDSLGNPTHILRIGESYKEKQRTIQAKKEVEQRRAGGYSRKYASKAKNLADDMVRNTARDLLYYAVTQDAMLIFENLSRGFGRQGKRTFMAERQYTRMEDWLTAKLAYEGLPSKTYLSKTLAQYTSKTCSNCGFTITSADYDRVLEKLKKTATGWMTTINGKELKVEGQITYYNRYKRQNVVKDLSVELDRLSEESVNNDISSWTKGRSGEALSLLKKRFSHRPVQEKFVCLNCGFETHADEQAALNIARSWLFLRSQEYKKYQTNKTTGNTDKRAFVETWQSFYRKKLKEVWKPAV

SEQ ID NO: 35319 - protein, 979 aa, synthetic construct
  REGION 1..979: note = engineered CasX variant
QEIKRINKIRRRLVKDSNTKKAGKTGPMKTLLVRVMTPDLRERLENLRKKPENIPQPISNTSRANLNKLLTDYTEMKKAILHVYWEEFQKDPVGLMSRVAQPASKKIDQNKLKPEMDEKGNLTTAGFACSQCGQPLFVYKLEQVSEKGKAYTNYFGRCNVAEHEKLILLSQLKPEKDSDEAVTYSLGKFGQRALDFYSIHVTKESTHPVKPLAQIAGNRYASHPVGKALSDACMGTIASFLSKYQDIIIEHQKVVKGNQKRLESLRELAGKENLEYPSVTLPPQPHTKEGVDAYNEVIARVRMWVNLNLWQKLKLSRDDAKPLLRLKGFPSFPLVERQANEVDWWDMVCNVKKLINEKKEDGKVFWQNLAGYKRQEALRPYLSSEEDVRKKGKKFARYQLGDLLLHLEKKHGEDWGKVYDEAWERIDKKVEGLSKHIKLEEERRSEDAQSKAALTDWLRAKASFVIEGLKEADKDEFCRCELKLQKWYGDLRGKPFAIEAENSILDISGFSKQYNCAFIWQKDGVKKLNLYLIINYFKGGKLRFKKIKPEAFEANRFYTVINKKSGEIVPMEVNFNFDDPNLIILPLAFGKRQGREFIWNDLLSLETGSLKLANGRVIEKTLYNRRTRQDEPALFVALTFERREVLDSSNIKPMNLIGVDRGENIPAVIALTDPEGCPLSRFKDSLGNPTHILRIGESYKEKQRTIQAKKEVEQRRAGGYSRKYASKAKNLADDMVRNTARDLLYYAVTQDAMLIFENLSRGFGRQGKRTFMAERQYTRMEDWLTAKLAYEGLPSKTYLSKTLAQYTSKTCSNCGFTITSADYDRVLEKLKKTATGWMTTINGKELKVEGQITYYNRYKRQNVVKDLSVELDRLSEESVNNDISSWTKGRSGEALSLLKKRFSHRPVQEKFVCLNCGFETHADEQAALNIARSWLFLRSQEYKKYQTNKTTGNTDKRAFVETWQSFYRKKLKEVWKPAV

SEQ ID NO: 35320 - protein, 979 aa, synthetic construct
  REGION 1..979: note = engineered CasX variant
QEIKRINKIRRRLVKDSNTKKAGKTGPMKTLLVRVMTPDLRERLENLRKKPENIPQPISNTSRANLNKLLTDYTEMKKAILHVYWEEFQKDPVGLMSRVAQPASKKIDQNKLKPEMDEKGNLTTAGFACSQCGQPLFVYKLEQVSEKGKAYTNYFGRCNVAEHEKLILLSQLKPEKDSDEAVTYSLGKFGQRALDFYSIHVTKESTHPVKPLAQIAGNRYASSPVGKALSDACMGTIASFLSKYQDIIIEHQKVVKGNQKRLESLRELAGKENLEYPSVTLPPQPHTKEGVDAYNEVIARVRMWVNLNLWQKLKLSRDDAKPLLRLKGFPSFPLVERQANEVDWWDMVCNVKKLINEKKEDGKVFWQNLAGYKRQEALRPYLSSEEDVRKKGKKFARYQLGDLLLHLEKKHGEDWGKVYDEAWERIDKKVEGLSKHIKLEEERRSEDAQSKAALTDWLRAKASFVIEGLKEADKDEFCRCELKLQKWYGDLRGKPFAIEAENSILDISGFSKQYNCAFIWQKDGVKKLNLYLIINYFKGGKLRFKKIKPEAFEANRFYTVINKKSGEIVPMEVNFNFDDPNLIILPLAFGKRQGREFIWNDLLSLETGSLKLANGRVIEKTLYNRRTRQDEPALFVALTFERREVLDSSNIKPMNLIGVDRGENIPAVIALTDPEGCPLSRFKDSLGNPTHILRIGESYKEKQRTIQAKKEVEQRRAGGYSRKYASKAKNLADDMVRNTARDLLYYAVTQDAMLIFENLSRGFGRQGKRTFMAERQYTRMEDWLTAKLAYEGLPSKTYLSKTLAQYTSKTCSNCGFTITSADYDRVLEKLKKTATGWMTTINGKELKVEGQITYYNRYKRQNVVKDLSVELDRLSEESVNNDISSWTKGRSGEALSLLKKRFSHRPVQEKFVCLNCGFETHADEQAALNIARSWLFLRSQEYKKYQTNKTTGNTDKRAFVETWQSFYRKKLKEVWKPAV

SEQ ID NO: 35321 - protein, 979 aa, synthetic construct
  REGION 1..979: note = engineered CasX variant
QEIKRINKIRRRLVKDSNTKKAGKTGPMKTLLVRVMTPDLRERLENLRKKPENIPQPISNTSRANLNKLLTDYTEMKKAILHVYWEEFQKDPVGLMSRVAQPASKKIDQNKLKPEMDEKGNLTTAGFACSQCGQPLFVYKLEQVSEKGKAYTNYFGRCNVAEHEKLILLSQLKPEKDSDEAVTYSLGKFGQRALDFYSIHVTKESTHPVKPLAQIAGNRYASTPVGKALSDACMGTIASFLSKYQDIIIEHQKVVKGNQKRLESLRELAGKENLEYPSVTLPPQPHTKEGVDAYNEVIARVRMWVNLNLWQKLKLSRDDAKPLLRLKGFPSFPLVERQANEVDWWDMVCNVKKLINEKKEDGKVFWQNLAGYKRQEALRPYLSSEEDVRKKGKKFARYQLGDLLLHLEKKHGEDWGKVYDEAWERIDKKVEGLSKHIKLEEERRSEDAQSKAALTDWLRAKASFVIEGLKEADKDEFCRCELKLQKWYGDLRGKPFAIEAENSILDISGFSKQYNCAFIWQKDGVKKLNLYLIINYFKGGKLRFKKIKPEAFEANRFYTVINKKSGEIVPMEVNFNFDDPNLIILPLAFGKRQGREFIWNDLLSLETGSLKLANGRVIEKTLYNRRTRQDEPALFVALTFERREVLDSSNIKPMNLIGVDRGENIPAVIALTDPEGCPLSRFKDSLGNPTHILRIGESYKEKQRTIQAKKEVEQRRAGGYSRKYASKAKNLADDMVRNTARDLLYYAVTQDAMLIFENLSRGFGRQGKRTFMAERQYTRMEDWLTAKLAYEGLPSKTYLSKTLAQYTSKTCSNCGFTITSADYDRVLEKLKKTATGWMTTINGKELKVEGQITYYNRYKRQNVVKDLSVELDRLSEESVNNDISSWTKGRSGEALSLLKKRFSHRPVQEKFVCLNCGFETHADEQAALNIARSWLFLRSQEYKKYQTNKTTGNTDKRAFVETWQSFYRKKLKEVWKPAV

SEQ ID NO: 35322 - protein, 979 aa, synthetic construct
  REGION 1..979: note = engineered CasX variant
QEIKRINKIRRRLVKDSNTKKAGKTGPMKTLLVRVMTPDLRERLENLRKKPENIPQPISNTSRANLNKLLTDYTEMKKAILHVYWEEFQKDPVGLMSRVAQPASKKIDQNKLKPEMDEKGNLTTAGFACSQCGQPLFVYKLEQVSEKGKAYTNYFGRCNVAEHEKLILLSQLKPEKDSDEAVTYSLGKFGQRALDFYSIHVTKESTHPVKPLAQIAGNRYASAPVGKALSDACMGTIASFLSKYQDIIIEHQKVVKGNQKRLESLRELAGKENLEYPSVTLPPQPHTKEGVDAYNEVIARVRMWVNLNLWQKLKLSRDDAKPLLRLKGFPSFPLVERQANEVDWWDMVCNVKKLINEKKEDGKVFWQNLAGYKRQEALRPYLSSEEDVRKKGKKFARYQLGDLLLHLEKKHGEDWGKVYDEAWERIDKKVEGLSKHIKLEEERRSEDAQSKAALTDWLRAKASFVIEGLKEADKDEFCRCELKLQKWYGDLRGKPFAIEAENSILDISGFSKQYNCAFIWQKDGVKKLNLYLIINYFKGGKLRFKKIKPEAFEANRFYTVINKKSGEIVPMEVNFNFDDPNLIILPLAFGKRQGREFIWNDLLSLETGSLKLANGRVIEKTLYNRRTRQDEPALFVALTFERREVLDSSNIKPMNLIGVDRGENIPAVIALTDPEGCPLSRFKDSLGNPTHILRIGESYKEKQRTIQAKKEVEQRRAGGYSRKYASKAKNLADDMVRNTARDLLYYAVTQDAMLIFENLSRGFGRQGKRTFMAERQYTRMEDWLTAKLAYEGLPSKTYLSKTLAQYTSKTCSNCGFTITSADYDRVLEKLKKTATGWMTTINGKELKVEGQITYYNRYKRQNVVKDLSVELDRLSEESVNNDISSWTKGRSGEALSLLKKRFSHRPVQEKFVCLNCGFETHADEQAALNIARSWLFLRSQEYKKYQTNKTTGNTDKRAFVETWQSFYRKKLKEVWKPAV

SEQ ID NO: 35323 - protein, 979 aa, synthetic construct
  REGION 1..979: note = engineered CasX variant
QEIKRINKIRRRLVKDSNTKKAGKTGPMKTLLVRVMTPDLRERLENLRKKPENIPQPISNTSRANLNKLLTDYTEMKKAILHVYWEEFQKDPVGLMSRVAQPASKKIDQNKLKPEMDEKGNLTTAGFACSQCGQPLFVYKLEQVSEKGKAYTNYFGRCNVAEHEKLILLSQLKPEKDSDEAVTYSLGKFGQRALDFYSIHVTKESTHPVKPLAQIAGNRYASVPVGKALSDACMGTIASFLSKYQDIIIEHQKVVKGNQKRLESLRELAGKENLEYPSVTLPPQPHTKEGVDAYNEVIARVRMWVNLNLWQKLKLSRDDAKPLLRLKGFPSFPLVERQANEVDWWDMVCNVKKLINEKKEDGKVFWQNLAGYKRQEALRPYLSSEEDVRKKGKKFARYQLGDLLLHLEKKHGEDWGKVYDEAWERIDKKVEGLSKHIKLEEERRSEDAQSKAALTDWLRAKASFVIEGLKEADKDEFCRCELKLQKWYGDLRGKPFAIEAENSILDISGFSKQYNCAFIWQKDGVKKLNLYLIINYFKGGKLRFKKIKPEAFEANRFYTVINKKSGEIVPMEVNFNFDDPNLIILPLAFGKRQGREFIWNDLLSLETGSLKLANGRVIEKTLYNRRTRQDEPALFVALTFERREVLDSSNIKPMNLIGVDRGENIPAVIALTDPEGCPLSRFKDSLGNPTHILRIGESYKEKQRTIQAKKEVEQRRAGGYSRKYASKAKNLADDMVRNTARDLLYYAVTQDAMLIFENLSRGFGRQGKRTFMAERQYTRMEDWLTAKLAYEGLPSKTYLSKTLAQYTSKTCSNCGFTITSADYDRVLEKLKKTATGWMTTINGKELKVEGQITYYNRYKRQNVVKDLSVELDRLSEESVNNDISSWTKGRSGEALSLLKKRFSHRPVQEKFVCLNCGFETHADEQAALNIARSWLFLRSQEYKKYQTNKTTGNTDKRAFVETWQSFYRKKLKEVWKPAV

SEQ ID NO: 35324 - protein, 979 aa, synthetic construct
  REGION 1..979: note = engineered CasX variant
QEIKRINKIRRRLVKDSNTKKAGKTGPMKTLLVRVMTPDLRERLENLRKKPENIPQPISNTSRANLNKLLTDYTEMKKAILHVYWEEFQKDPVGLMSRVAQPASKKIDQNKLKPEMDEKGNLTTAGFACSQCGQPLFVYKLEQVSEKGKAYTNYFGRCNVAEHEKLIKLSQLKPEKDSDEAVTYSLGKFGQRALDFYSIHVTKESTHPVKPLAQIAGNRYASGPVGKALSDACMGTIASFLSKYQDIIIEHQKVVKGNQKRLESLRELAGKENLEYPSVTLPPQPHTKEGVDAYNEVIARVRMWVNLNLWQKLKLSRDDAKPLLRLKGFPSFPLVERQANEVDWWDMVCNVKKLINEKKEDGKVFWQNLAGYKRQEALRPYLSSEEDVRKKGKKFARYQLGDLLLHLEKKHGEDWGKVYDEAWERIDKKVEGLSKHIKLEEERRSEDAQSKAALTDWLRAKASFVIEGLKEADKDEFCRCELKLQKWYGDLRGKPFAIEAENSILDISGFSKQYNCAFIWQKDGVKKLNLYLIINYFKGGKLRFKKIKPEAFEANRFYTVINKKSGEIVPMEVNFNFDDPNLIILPLAFGKRQGREFIWNDLLSLETGSLKLANGRVIEKTLYNRRTRQDEPALFVALTFERREVLDSSNIKPMNLIGVDRGENIPAVIALTDPEGCPLSRFKDSLGNPTHILRIGESYKEKQRTIQAKKEVEQRRAGGYSRKYASKAKNLADDMVRNTARDLLYYAVTQDAMLIFENLSRGFGRQGKRTFMAERQYTRMEDWLTAKLAYEGLPSKTYLSKTLAQYTSKTCSNCGFTITSADYDRVLEKLKKTATGWMTTINGKELKVEGQITYYNRYKRQNVVKDLSVELDRLSEESVNNDISSWTKGRSGEALSLLKKRFSHRPVQEKFVCLNCGFETHADEQAALNIARSWLFLRSQEYKKYQTNKTTGNTDKRAFVETWQSFYRKKLKEVWKPAV

SEQ ID NO: 35325 - protein, 978 aa, synthetic construct
  REGION 1..978: note = engineered CasX variant
QEIKRINKIRRRLVKDSNTKKAGKTGPMKTLLVRVMTPDLRERLENLRKKPENIPQPISNTSRANLNKLLTDYTEMKKAILHVYWEEFQKDPVGLMSRVAQPASKKIDQNKLKPEMDEKGNLTTAGFACSQCGQPLFVYKLEQVSEKGKAYTNYFGRCNVAEHEKLILLSQLKPEKDSDEAVTYSLGKFGQRALDFYSIHVTKESTHPVKPLAQIAGNRYASPVGKALSDACMGTIASFLSKYQDIIIEHQKVVKGNQKRLESLRELAGKENLEYPSVTLPPQPHTKEGVDAYNEVIARVRMWVNLNLWQKLKLSRDDAKPLLRLKGFPSFPLVERQANEVDWWDMVCNVKKLINEKKEDGKVFWQNLAGYKRQEALRPYLSSEEDVRKKGKKFARYQLGDLLLHLEKKHGEDWGKVYDEAWERIDKKVEGLSKHIKLEEERRSEDAQSKAALTDWLRAKASFVIEGLKEADKDEFCRCELKLQKWYGDLRGKPFAIEAENSILDISGFSKQYNCAFIWQKDGVKKLNLYLIINYFKGGKLRFKKIKPEAFEANRFYTVINKKSGEIVPMEVNFNFDDPNLIILPLAFGKRQGREFIWNDLLSLETGSLKLANGRVIEKTLYNRRTRQDEPALFVALTFERREVLDSSNIKPMNLIGVDRGENIPAVIALTDPEGCPLSRFKDSLGNPTHILRIGESYKEKQRTIQAKKEVEQRRAGGYSRKYASKAKNLADDMVRNTARDLLYYAVTQDAMLIFENLSRGFGRQGKRTFMAERQYTRMEDWLTAKLAYEGLPSKTYLSKTLAQYTSKTCSNCGFTITSADYDRVLEKLKKTATGWMTTINGKELKVEGQITYYNRYKRQNVVKDLSVELDRLSEESVNNDISSWTKGRSGEALSLLKKRFSHRPVQEKFVCLNCGFETHADEQAALNIARSWLFLRSQEYKKYQTNKTTGNTDKRAFVETWQSFYRKKLKEVWKPAV

SEQ ID NO: 35326 - protein, 978 aa, synthetic construct
  REGION 1..978: note = engineered CasX variant
QEIKRINKIRRRLVKDSNTKKAGKTGPMKTLLVRVMTPDLRERLENLRKKPENIPQPISNTSRANLNKLLTDYTEMKKAILHVYWEEFQKDPVGLMSRVAQPASKKIDQNKLKPEMDEKGNLTTAGFACSQCGQPLFVYKLEQVSEKGKAYTNYFGRCNVAEHEKLILLSQLKPEKDSDEAVTYSLGKFGQRALDFYSIHVTKESTHPVKPLAQIAGNRYASYPVGKALSDACMGTIASFLSKYQDIIIEHQKVVKGNQKRLESLRELAGKENLEYPSVTLPPQPHTKEGVDAYNEVIARVRMWVNLNLWQKLKLSRDDAKPLLRLKGFPSFPLVERQANEVDWWDMVCNVKKLINEKKEDGKVFWQNLAGYKRQEALRPYLSSEEDRKKGKKFARYQLGDLLLHLEKKHGEDWGKVYDEAWERIDKKVEGLSKHIKLEEERRSEDAQSKAALTDWLRAKASFVIEGLKEADKDEFCRCELKLQKWYGDLRGKPFAIEAENSILDISGFSKQYNCAFIWQKDGVKKLNLYLIINYFKGGKLRFKKIKPEAFEANRFYTVINKKSGEIVPMEVNFNFDDPNLIILPLAFGKRQGREFIWNDLLSLETGSLKLANGRVIEKTLYNRRTRQDEPALFVALTFERREVLDSSNIKPMNLIGVDRGENIPAVIALTDPEGCPLSRFKDSLGNPTHILRIGESYKEKQRTIQAKKEVEQRRAGGYSRKYASKAKNLADDMVRNTARDLLYYAVTQDAMLIFENLSRGFGRQGKRTFMAERQYTRMEDWLTAKLAYEGLPSKTYLSKTLAQYTSKTCSNCGFTITSADYDRMLEKLKKTATGWMTTINGKELKVEGQITYYNRYKRQNVVKDLSVELDRLSEESVNNDISSWTKGRSGEALSLLKKRFSHRPVQEKFVCLNCGFETHADEQAALNIARSWLFLRSQEYKKYQTNKTTGNTDKRAFVETWQSFYRKKLKEVWKPAV

SEQ ID NO: 35327 - protein, 978 aa, synthetic construct
  REGION 1..978: note = engineered CasX variant
QEIKRINKIRRRLVKDSNTKKAGKTGPMKTLLVRVMTPDLRERLENLRKKPENIPQPISNTSRANLNKLLTDYTEMKKAILHVYWEEFQKDPVGLMSRVAQPASKKIDQNKLKPEMDEKGNLTTAGFACSQCGQPLFVYKLEQVSEKGKAYTNYFGRCNVAEHEKLILLSQLKPEKDSDEAVTYSLGKFGQRALDFYSIHVTKESTHPVKPLAQIAGNRYASHPVGKALSDACMGTIASFLSKYQDIIIEHQKVVKGNQKRLESLRELAGKENLEYPSVTLPPQPHTKEGVDAYNEVIARVRMWVNLNLWQKLKLSRDDAKPLLRLKGFPSFPLVERQANEVDWWDMVCNVKKLINEKKEDGKVFWQNLAGYKRQEALRPYLSSEEDRKKGKKFARYQLGDLLLHLEKKHGEDWGKVYDEAWERIDKKVEGLSKHIKLEEERRSEDAQSKAALTDWLRAKASFVIEGLKEADKDEFCRCELKLQKWYGDLRGKPFAIEAENSILDISGFSKQYNCAFIWQKDGVKKLNLYLIINYFKGGKLRFKKIKPEAFEANRFYTVINKKSGEIVPMEVNFNFDDPNLIILPLAFGKRQGREFIWNDLLSLETGSLKLANGRVIEKTLYNRRTRQDEPALFVALTFERREVLDSSNIKPMNLIGVDRGENIPAVIALTDPEGCPLSRFKDSLGNPTHILRIGESYKEKQRTIQAKKEVEQRRAGGYSRKYASKAKNLADDMVRNTARDLLYYAVTQDAMLIFENLSRGFGRQGKRTFMAERQYTRMEDWLTAKLAYEGLPSKTYLSKTLAQYTSKTCSNCGFTITSADYDRMLEKLKKTATGWMTTINGKELKVEGQITYYNRYKRQNVVKDLSVELDRLSEESVNNDISSWTKGRSGEALSLLKKRFSHRPVQEKFVCLNCGFETHADEQAALNIARSWLFLRSQEYKKYQTNKTTGNTDKRAFVETWQSFYRKKLKEVWKPAV

SEQ ID NO: 35328 - protein, 978 aa, synthetic construct
  REGION 1..978: note = engineered CasX variant
QEIKRINKIRRRLVKDSNTKKAGKTGPMKTLLVRVMTPDLRERLENLRKKPENIPQPISNTSRANLNKLLTDYTEMKKAILHVYWEEFQKDPVGLMSRVAQPASKKIDQNKLKPEMDEKGNLTTAGFACSQCGQPLFVYKLEQVSEKGKAYTNYFGRCNVAEHEKLILLSQLKPEKDSDEAVTYSLGKFGQRALDFYSIHVTKESTHPVKPLAQIAGNRYASSPVGKALSDACMGTIASFLSKYQDIIIEHQKVVKGNQKRLESLRELAGKENLEYPSVTLPPQPHTKEGVDAYNEVIARVRMWVNLNLWQKLKLSRDDAKPLLRLKGFPSFPLVERQANEVDWWDMVCNVKKLINEKKEDGKVFWQNLAGYKRQEALRPYLSSEEDRKKGKKFARYQLGDLLLHLEKKHGEDWGKVYDEAWERIDKKVEGLSKHIKLEEERRSEDAQSKAALTDWLRAKASFVIEGLKEADKDEFCRCELKLQKWYGDLRGKPFAIEAENSILDISGFSKQYNCAFIWQKDGVKKLNLYLIINYFKGGKLRFKKIKPEAFEANRFYTVINKKSGEIVPMEVNFNFDDPNLIILPLAFGKRQGREFIWNDLLSLETGSLKLANGRVIEKTLYNRRTRQDEPALFVALTFERREVLDSSNIKPMNLIGVDRGENIPAVIALTDPEGCPLSRFKDSLGNPTHILRIGESYKEKQRTIQAKKEVEQRRAGGYSRKYASKAKNLADDMVRNTARDLLYYAVTQDAMLIFENLSRGFGRQGKRTFMAERQYTRMEDWLTAKLAYEGLPSKTYLSKTLAQYTSKTCSNCGFTITSADYDRMLEKLKKTATGWMTTINGKELKVEGQITYYNRYKRQNVVKDLSVELDRLSEESVNNDISSWTKGRSGEALSLLKKRFSHRPVQEKFVCLNCGFETHADEQAALNIARSWLFLRSQEYKKYQTNKTTGNTDKRAFVETWQSFYRKKLKEVWKPAV

SEQ ID NO: 35329 - protein, 978 aa, synthetic construct
  REGION 1..978: note = engineered CasX variant
QEIKRINKIRRRLVKDSNTKKAGKTGPMKTLLVRVMTPDLRERLENLRKKPENIPQPISNTSRANLNKLLTDYTEMKKAILHVYWEEFQKDPVGLMSRVAQPASKKIDQNKLKPEMDEKGNLTTAGFACSQCGQPLFVYKLEQVSEKGKAYTNYFGRCNVAEHEKLILLSQLKPEKDSDEAVTYSLGKFGQRALDFYSIHVTKESTHPVKPLAQIAGNRYASTPVGKALSDACMGTIASFLSKYQDIIIEHQKVVKGNQKRLESLRELAGKENLEYPSVTLPPQPHTKEGVDAYNEVIARVRMWVNLNLWQKLKLSRDDAKPLLRLKGFPSFPLVERQANEVDWWDMVCNVKKLINEKKEDGKVFWQNLAGYKRQEALRPYLSSEEDRKKGKKFARYQLGDLLLHLEKKHGEDWGKVYDEAWERIDKKVEGLSKHIKLEEERRSEDAQSKAALTDWLRAKASFVIEGLKEADKDEFCRCELKLQKWYGDLRGKPFAIEAENSILDISGFSKQYNCAFIWQKDGVKKLNLYLIINYFKGGKLRFKKIKPEAFEANRFYTVINKKSGEIVPMEVNFNFDDPNLIILPLAFGKRQGREFIWNDLLSLETGSLKLANGRVIEKTLYNRRTRQDEPALFVALTFERREVLDSSNIKPMNLIGVDRGENIPAVIALTDPEGCPLSRFKDSLGNPTHILRIGESYKEKQRTIQAKKEVEQRRAGGYSRKYASKAKNLADDMVRNTARDLLYYAVTQDAMLIFENLSRGFGRQGKRTFMAERQYTRMEDWLTAKLAYEGLPSKTYLSKTLAQYTSKTCSNCGFTITSADYDRMLEKLKKTATGWMTTINGKELKVEGQITYYNRYKRQNVVKDLSVELDRLSEESVNNDISSWTKGRSGEALSLLKKRFSHRPVQEKFVCLNCGFETHADEQAALNIARSWLFLRSQEYKKYQTNKTTGNTDKRAFVETWQSFYRKKLKEVWKPAV

SEQ ID NO: 35330 - protein, 978 aa, synthetic construct
  REGION 1..978: note = engineered CasX variant
QEIKRINKIRRRLVKDSNTKKAGKTGPMKTLLVRVMTPDLRERLENLRKKPENIPQPISNTSRANLNKLLTDYTEMKKAILHVYWEEFQKDPVGLMSRVAQPASKKIDQNKLKPEMDEKGNLTTAGFACSQCGQPLFVYKLEQVSEKGKAYTNYFGRCNVAEHEKLILLSQLKPEKDSDEAVTYSLGKFGQRALDFYSIHVTKESTHPVKPLAQIAGNRYASAPVGKALSDACMGTIASFLSKYQDIIIEHQKVVKGNQKRLESLRELAGKENLEYPSVTLPPQPHTKEGVDAYNEVIARVRMWVNLNLWQKLKLSRDDAKPLLRLKGFPSFPLVERQANEVDWWDMVCNVKKLINEKKEDGKVFWQNLAGYKRQEALRPYLSSEEDRKKGKKFARYQLGDLLLHLEKKHGEDWGKVYDEAWERIDKKVEGLSKHIKLEEERRSEDAQSKAALTDWLRAKASFVIEGLKEADKDEFCRCELKLQKWYGDLRGKPFAIEAENSILDISGFSKQYNCAFIWQKDGVKKLNLYLIINYFKGGKLRFKKIKPEAFEANRFYTVINKKSGEIVPMEVNFNFDDPNLIILPLAFGKRQGREFIWNDLLSLETGSLKLANGRVIEKTLYNRRTRQDEPALFVALTFERREVLDSSNIKPMNLIGVDRGENIPAVIALTDPEGCPLSRFKDSLGNPTHILRIGESYKEKQRTIQAKKEVEQRRAGGYSRKYASKAKNLADDMVRNTARDLLYYAVTQDAMLIFENLSRGFGRQGKRTFMAERQYTRMEDWLTAKLAYEGLPSKTYLSKTLAQYTSKTCSNCGFTITSADYDRMLEKLKKTATGWMTTINGKELKVEGQITYYNRYKRQNVVKDLSVELDRLSEESVNNDISSWTKGRSGEALSLLKKRFSHRPVQEKFVCLNCGFETHADEQAALNIARSWLFLRSQEYKKYQTNKTTGNTDKRAFVETWQSFYRKKLKEVWKPAV

SEQ ID NO: 35331 - protein, 978 aa, synthetic construct
  REGION 1..978: note = engineered CasX variant
QEIKRINKIRRRLVKDSNTKKAGKTGPMKTLLVRVMTPDLRERLENLRKKPENIPQPISNTSRANLNKLLTDYTEMKKAILHVYWEEFQKDPVGLMSRVAQPASKKIDQNKLKPEMDEKGNLTTAGFACSQCGQPLFVYKLEQVSEKGKAYTNYFGRCNVAEHEKLILLSQLKPEKDSDEAVTYSLGKFGQRALDFYSIHVTKESTHPVKPLAQIAGNRYASVPVGKALSDACMGTIASFLSKYQDIIIEHQKVVKGNQKRLESLRELAGKENLEYPSVTLPPQPHTKEGVDAYNEVIARVRMWVNLNLWQKLKLSRDDAKPLLRLKGFPSFPLVERQANEVDWWDMVCNVKKLINEKKEDGKVFWQNLAGYKRQEALRPYLSSEEDRKKGKKFARYQLGDLLLHLEKKHGEDWGKVYDEAWERIDKKVEGLSKHIKLEEERRSEDAQSKAALTDWLRAKASFVIEGLKEADKDEFCRCELKLQKWYGDLRGKPFAIEAENSILDISGFSKQYNCAFIWQKDGVKKLNLYLIINYFKGGKLRFKKIKPEAFEANRFYTVINKKSGEIVPMEVNFNFDDPNLIILPLAFGKRQGREFIWNDLLSLETGSLKLANGRVIEKTLYNRRTRQDEPALFVALTFERREVLDSSNIKPMNLIGVDRGENIPAVIALTDPEGCPLSRFKDSLGNPTHILRIGESYKEKQRTIQAKKEVEQRRAGGYSRKYASKAKNLADDMVRNTARDLLYYAVTQDAMLIFENLSRGFGRQGKRTFMAERQYTRMEDWLTAKLAYEGLPSKTYLSKTLAQYTSKTCSNCGFTITSADYDRMLEKLKKTATGWMTTINGKELKVEGQITYYNRYKRQNVVKDLSVELDRLSEESVNNDISSWTKGRSGEALSLLKKRFSHRPVQEKFVCLNCGFETHADEQAALNIARSWLFLRSQEYKKYQTNKTTGNTDKRAFVETWQSFYRKKLKEVWKPAV

SEQ ID NO: 35332 - protein, 978 aa, synthetic construct
  REGION 1..978: note = engineered CasX variant
QEIKRINKIRRRLVKDSNTKKAGKTGPMKTLLVRVMTPDLRERLENLRKKPENIPQPISNTSRANLNKLLTDYTEMKKAILHVYWEEFQKDPVGLMSRVAQPASKKIDQNKLKPEMDEKGNLTTAGFACSQCGQPLFVYKLEQVSEKGKAYTNYFGRCNVAEHEKLIKLSQLKPEKDSDEAVTYSLGKFGQRALDFYSIHVTKESTHPVKPLAQIAGNRYASGPVGKALSDACMGTIASFLSKYQDIIIEHQKVVKGNQKRLESLRELAGKENLEYPSVTLPPQPHTKEGVDAYNEVIARVRMWVNLNLWQKLKLSRDDAKPLLRLKGFPSFPLVERQANEVDWWDMVCNVKKLINEKKEDGKVFWQNLAGYKRQEALRPYLSSEEDRKKGKKFARYQLGDLLLHLEKKHGEDWGKVYDEAWERIDKKVEGLSKHIKLEEERRSEDAQSKAALTDWLRAKASFVIEGLKEADKDEFCRCELKLQKWYGDLRGKPFAIEAENSILDISGFSKQYNCAFIWQKDGVKKLNLYLIINYFKGGKLRFKKIKPEAFEANRFYTVINKKSGEIVPMEVNFNFDDPNLIILPLAFGKRQGREFIWNDLLSLETGSLKLANGRVIEKTLYNRRTRQDEPALFVALTFERREVLDSSNIKPMNLIGVDRGENIPAVIALTDPEGCPLSRFKDSLGNPTHILRIGESYKEKQRTIQAKKEVEQRRAGGYSRKYASKAKNLADDMVRNTARDLLYYAVTQDAMLIFENLSRGFGRQGKRTFMAERQYTRMEDWLTAKLAYEGLPSKTYLSKTLAQYTSKTCSNCGFTITSADYDRMLEKLKKTATGWMTTINGKELKVEGQITYYNRYKRQNVVKDLSVELDRLSEESVNNDISSWTKGRSGEALSLLKKRFSHRPVQEKFVCLNCGFETHADEQAALNIARSWLFLRSQEYKKYQTNKTTGNTDKRAFVETWQSFYRKKLKEVWKPAV

SEQ ID NO: 35333 - protein, 977 aa, synthetic construct
  REGION 1..977: note = engineered CasX variant
QEIKRINKIRRRLVKDSNTKKAGKTGPMKTLLVRVMTPDLRERLENLRKKPENIPQPISNTSRANLNKLLTDYTEMKKAILHVYWEEFQKDPVGLMSRVAQPASKKIDQNKLKPEMDEKGNLTTAGFACSQCGQPLFVYKLEQVSEKGKAYTNYFGRCNVAEHEKLILLSQLKPEKDSDEAVTYSLGKFGQRALDFYSIHVTKESTHPVKPLAQIAGNRYASPVGKALSDACMGTIASFLSKYQDIIIEHQKVVKGNQKRLESLRELAGKENLEYPSVTLPPQPHTKEGVDAYNEVIARVRMWVNLNLWQKLKLSRDDAKPLLRLKGFPSFPLVERQANEVDWWDMVCNVKKLINEKKEDGKVFWQNLAGYKRQEALRPYLSSEEDRKKGKKFARYQLGDLLLHLEKKHGEDWGKVYDEAWERIDKKVEGLSKHIKLEEERRSEDAQSKAALTDWLRAKASFVIEGLKEADKDEFCRCELKLQKWYGDLRGKPFAIEAENSILDISGFSKQYNCAFIWQKDGVKKLNLYLIINYFKGGKLRFKKIKPEAFEANRFYTVINKKSGEIVPMEVNFNFDDPNLIILPLAFGKRQGREFIWNDLLSLETGSLKLANGRVIEKTLYNRRTRQDEPALFVALTFERREVLDSSNIKPMNLIGVDRGENIPAVIALTDPEGCPLSRFKDSLGNPTHILRIGESYKEKQRTIQAKKEVEQRRAGGYSRKYASKAKNLADDMVRNTARDLLYYAVTQDAMLIFENLSRGFGRQGKRTFMAERQYTRMEDWLTAKLAYEGLPSKTYLSKTLAQYTSKTCSNCGFTITSADYDRMLEKLKKTATGWMTTINGKELKVEGQITYYNRYKRQNVVKDLSVELDRLSEESVNNDISSWTKGRSGEALSLLKKRFSHRPVQEKFVCLNCGFETHADEQAALNIARSWLFLRSQEYKKYQTNKTTGNTDKRAFVETWQSFYRKKLKEVWKPAV

SEQ ID NO: 35334 - protein, 978 aa, synthetic construct
  REGION 1..978: note = engineered CasX variant
QEIKRINKIRRRLVKDSNTKKAGKTGPMKTLLVRVMTPDLRERLENLRKKPENIPQPISNTSRANLNKLLTDYTEMKKAILHVYWEEFQKDPVGLMSRVAQPASKKIDQNKLKPEMDEKGNLTTAGFACSQCGQPLFVYKLEQVSEKGKAYTNYFGRCNVAEHEKLILLSQLKPEKDSDEAVTYSLGKFGQRALDFYSIHVTKESTHPVKPLAQIAGNRYASYPVGKALSDACMGTIASFLSKYQDIIIEHQKVVKGNQKRLESLRELAGKENLEYPSVTLPPQPHTKEGVDAYNEVIARVRMWVNLNLWQKLKLSRDDAKPLLRLKGFPSFPLVERQANEVDWWDMVCNVKKLINEKKEDGKVFWQNLAGYKRQEALRPYLSSEEDRKKGKKFARYQLGDLLLHLEKKHGEDWGKVYDEAWERIDKKVEGLSKHIKLEEERRSEDAQSKAALTDWLRAKASFVIEGLKEADKDEFCRCELKLQKWYGDLRGKPFAIEAENSILDISGFSKQYNCAFIWQKDGVKKLNLYLIINYFKGGKLRFKKIKPEAFEANRFYTVINKKSGEIVPMEVNFNFDDPNLIILPLAFGKRQGREFIWNDLLSLETGSLKLANGRVIEKTLYNRRTRQDEPALFVALTFERREVLDSSNIKPMNLIGVDRGENIPAVIALTDPEGCPLSRFKDSLGNPTHILRIGESYKEKQRTIQAKKEVEQRRAGGYSRKYASKAKNLADDMVRNTARDLLYYAVTQDAMLIFENLSRGFGRQGKRTFMAERQYTRMEDWLTAKLAYEGLPSKTYLSKTLAQYTSKTCSNCGFTITSADYDRVLEKLKKTATGWMTTINGKELKVEGQITYYNRYKRQNVVKDLSVELDRLSEESVNNDISSWTKGRQGEALSLLKKRFSHRPVQEKFVCLNCGFETHADEQAALNIARSWLFLRSQEYKKYQTNKTTGNTDKRAFVETWQSFYRKKLKEVWKPAV

SEQ ID NO: 35335 - protein, 978 aa, synthetic construct
  REGION 1..978: note = engineered CasX variant
QEIKRINKIRRRLVKDSNTKKAGKTGPMKTLLVRVMTPDLRERLENLRKKPENIPQPISNTSRANLNKLLTDYTEMKKAILHVYWEEFQKDPVGLMSRVAQPASKKIDQNKLKPEMDEKGNLTTAGFACSQCGQPLFVYKLEQVSEKGKAYTNYFGRCNVAEHEKLILLSQLKPEKDSDEAVTYSLGKFGQRALDFYSIHVTKESTHPVKPLAQIAGNRYASHPVGKALSDACMGTIASFLSKYQDIIIEHQKVVKGNQKRLESLRELAGKENLEYPSVTLPPQPHTKEGVDAYNEVIARVRMWVNLNLWQKLKLSRDDAKPLLRLKGFPSFPLVERQANEVDWWDMVCNVKKLINEKKEDGKVFWQNLAGYKRQEALRPYLSSEEDRKKGKKFARYQLGDLLLHLEKKHGEDWGKVYDEAWERIDKKVEGLSKHIKLEEERRSEDAQSKAALTDWLRAKASFVIEGLKEADKDEFCRCELKLQKWYGDLRGKPFAIEAENSILDISGFSKQYNCAFIWQKDGVKKLNLYLIINYFKGGKLRFKKIKPEAFEANRFYTVINKKSGEIVPMEVNFNFDDPNLIILPLAFGKRQGREFIWNDLLSLETGSLKLANGRVIEKTLYNRRTRQDEPALFVALTFERREVLDSSNIKPMNLIGVDRGENIPAVIALTDPEGCPLSRFKDSLGNPTHILRIGESYKEKQRTIQAKKEVEQRRAGGYSRKYASKAKNLADDMVRNTARDLLYYAVTQDAMLIFENLSRGFGRQGKRTFMAERQYTRMEDWLTAKLAYEGLPSKTYLSKTLAQYTSKTCSNCGFTITSADYDRVLEKLKKTATGWMTTINGKELKVEGQITYYNRYKRQNVVKDLSVELDRLSEESVNNDISSWTKGRQGEALSLLKKRFSHRPVQEKFVCLNCGFETHADEQAALNIARSWLFLRSQEYKKYQTNKTTGNTDKRAFVETWQSFYRKKLKEVWKPAV

SEQ ID NO: 35336 - protein, 978 aa, synthetic construct
  REGION 1..978: note = engineered CasX variant
QEIKRINKIRRRLVKDSNTKKAGKTGPMKTLLVRVMTPDLRERLENLRKKPENIPQPISNTSRANLNKLLTDYTEMKKAILHVYWEEFQKDPVGLMSRVAQPASKKIDQNKLKPEMDEKGNLTTAGFACSQCGQPLFVYKLEQVSEKGKAYTNYFGRCNVAEHEKLILLSQLKPEKDSDEAVTYSLGKFGQRALDFYSIHVTKESTHPVKPLAQIAGNRYASSPVGKALSDACMGTIASFLSKYQDIIIEHQKVVKGNQKRLESLRELAGKENLEYPSVTLPPQPHTKEGVDAYNEVIARVRMWVNLNLWQKLKLSRDDAKPLLRLKGFPSFPLVERQANEVDWWDMVCNVKKLINEKKEDGKVFWQNLAGYKRQEALRPYLSSEEDRKKGKKFARYQLGDLLLHLEKKHGEDWGKVYDEAWERIDKKVEGLSKHIKLEEERRSEDAQSKAALTDWLRAKASFVIEGLKEADKDEFCRCELKLQKWYGDLRGKPFAIEAENSILDISGFSKQYNCAFIWQKDGVKKLNLYLIINYFKGGKLRFKKIKPEAFEANRFYTVINKKSGEIVPMEVNFNFDDPNLIILPLAFGKRQGREFIWNDLLSLETGSLKLANGRVIEKTLYNRRTRQDEPALFVALTFERREVLDSSNIKPMNLIGVDRGENIPAVIALTDPEGCPLSRFKDSLGNPTHILRIGESYKEKQRTIQAKKEVEQRRAGGYSRKYASKAKNLADDMVRNTARDLLYYAVTQDAMLIFENLSRGFGRQGKRTFMAERQYTRMEDWLTAKLAYEGLPSKTYLSKTLAQYTSKTCSNCGFTITSADYDRVLEKLKKTATGWMTTINGKELKVEGQITYYNRYKRQNVVKDLSVELDRLSEESVNNDISSWTKGRQGEALSLLKKRFSHRPVQEKFVCLNCGFETHADEQAALNIARSWLFLRSQEYKKYQTNKTTGNTDKRAFVETWQSFYRKKLKEVWKPAV

SEQ ID NO: 35337 - protein, 978 aa, synthetic construct
  REGION 1..978: note = engineered CasX variant
QEIKRINKIRRRLVKDSNTKKAGKTGPMKTLLVRVMTPDLRERLENLRKKPENIPQPISNTSRANLNKLLTDYTEMKKAILHVYWEEFQKDPVGLMSRVAQPASKKIDQNKLKPEMDEKGNLTTAGFACSQCGQPLFVYKLEQVSEKGKAYTNYFGRCNVAEHEKLILLSQLKPEKDSDEAVTYSLGKFGQRALDFYSIHVTKESTHPVKPLAQIAGNRYASTPVGKALSDACMGTIASFLSKYQDIIIEHQKVVKGNQKRLESLRELAGKENLEYPSVTLPPQPHTKEGVDAYNEVIARVRMWVNLNLWQKLKLSRDDAKPLLRLKGFPSFPLVERQANEVDWWDMVCNVKKLINEKKEDGKVFWQNLAGYKRQEALRPYLSSEEDRKKGKKFARYQLGDLLLHLEKKHGEDWGKVYDEAWERIDKKVEGLSKHIKLEEERRSEDAQSKAALTDWLRAKASFVIEGLKEADKDEFCRCELKLQKWYGDLRGKPFAIEAENSILDISGFSKQYNCAFIWQKDGVKKLNLYLIINYFKGGKLRFKKIKPEAFEANRFYTVINKKSGEIVPMEVNFNFDDPNLIILPLAFGKRQGREFIWNDLLSLETGSLKLANGRVIEKTLYNRRTRQDEPALFVALTFERREVLDSSNIKPMNLIGVDRGENIPAVIALTDPEGCPLSRFKDSLGNPTHILRIGESYKEKQRTIQAKKEVEQRRAGGYSRKYASKAKNLADDMVRNTARDLLYYAVTQDAMLIFENLSRGFGRQGKRTFMAERQYTRMEDWLTAKLAYEGLPSKTYLSKTLAQYTSKTCSNCGFTITSADYDRVLEKLKKTATGWMTTINGKELKVEGQITYYNRYKRQNVVKDLSVELDRLSEESVNNDISSWTKGRQGEALSLLKKRFSHRPVQEKFVCLNCGFETHADEQAALNIARSWLFLRSQEYKKYQTNKTTGNTDKRAFVETWQSFYRKKLKEVWKPAV

SEQ ID NO: 35338 - protein, 978 aa, synthetic construct
  REGION 1..978: note = engineered CasX variant
QEIKRINKIRRRLVKDSNTKKAGKTGPMKTLLVRVMTPDLRERLENLRKKPENIPQPISNTSRANLNKLLTDYTEMKKAILHVYWEEFQKDPVGLMSRVAQPASKKIDQNKLKPEMDEKGNLTTAGFACSQCGQPLFVYKLEQVSEKGKAYTNYFGRCNVAEHEKLILLSQLKPEKDSDEAVTYSLGKFGQRALDFYSIHVTKESTHPVKPLAQIAGNRYASAPVGKALSDACMGTIASFLSKYQDIIIEHQKVVKGNQKRLESLRELAGKENLEYPSVTLPPQPHTKEGVDAYNEVIARVRMWVNLNLWQKLKLSRDDAKPLLRLKGFPSFPLVERQANEVDWWDMVCNVKKLINEKKEDGKVFWQNLAGYKRQEALRPYLSSEEDRKKGKKFARYQLGDLLLHLEKKHGEDWGKVYDEAWERIDKKVEGLSKHIKLEEERRSEDAQSKAALTDWLRAKASFVIEGLKEADKDEFCRCELKLQKWYGDLRGKPFAIEAENSILDISGFSKQYNCAFIWQKDGVKKLNLYLIINYFKGGKLRFKKIKPEAFEANRFYTVINKKSGEIVPMEVNFNFDDPNLIILPLAFGKRQGREFIWNDLLSLETGSLKLANGRVIEKTLYNRRTRQDEPALFVALTFERREVLDSSNIKPMNLIGVDRGENIPAVIALTDPEGCPLSRFKDSLGNPTHILRIGESYKEKQRTIQAKKEVEQRRAGGYSRKYASKAKNLADDMVRNTARDLLYYAVTQDAMLIFENLSRGFGRQGKRTFMAERQYTRMEDWLTAKLAYEGLPSKTYLSKTLAQYTSKTCSNCGFTITSADYDRVLEKLKKTATGWMTTINGKELKVEGQITYYNRYKRQNVVKDLSVELDRLSEESVNNDISSWTKGRQGEALSLLKKRFSHRPVQEKFVCLNCGFETHADEQAALNIARSWLFLRSQEYKKYQTNKTTGNTDKRAFVETWQSFYRKKLKEVWKPAV

SEQ ID NO: 35339 - protein, 978 aa, synthetic construct
  REGION 1..978: note = engineered CasX variant
QEIKRINKIRRRLVKDSNTKKAGKTGPMKTLLVRVMTPDLRERLENLRKKPENIPQPISNTSRANLNKLLTDYTEMKKAILHVYWEEFQKDPVGLMSRVAQPASKKIDQNKLKPEMDEKGNLTTAGFACSQCGQPLFVYKLEQVSEKGKAYTNYFGRCNVAEHEKLILLSQLKPEKDSDEAVTYSLGKFGQRALDFYSIHVTKESTHPVKPLAQIAGNRYASVPVGKALSDACMGTIASFLSKYQDIIIEHQKVVKGNQKRLESLRELAGKENLEYPSVTLPPQPHTKEGVDAYNEVIARVRMWVNLNLWQKLKLSRDDAKPLLRLKGFPSFPLVERQANEVDWWDMVCNVKKLINEKKEDGKVFWQNLAGYKRQEALRPYLSSEEDRKKGKKFARYQLGDLLLHLEKKHGEDWGKVYDEAWERIDKKVEGLSKHIKLEEERRSEDAQSKAALTDWLRAKASFVIEGLKEADKDEFCRCELKLQKWYGDLRGKPFAIEAENSILDISGFSKQYNCAFIWQKDGVKKLNLYLIINYFKGGKLRFKKIKPEAFEANRFYTVINKKSGEIVPMEVNFNFDDPNLIILPLAFGKRQGREFIWNDLLSLETGSLKLANGRVIEKTLYNRRTRQDEPALFVALTFERREVLDSSNIKPMNLIGVDRGENIPAVIALTDPEGCPLSRFKDSLGNPTHILRIGESYKEKQRTIQAKKEVEQRRAGGYSRKYASKAKNLADDMVRNTARDLLYYAVTQDAMLIFENLSRGFGRQGKRTFMAERQYTRMEDWLTAKLAYEGLPSKTYLSKTLAQYTSKTCSNCGFTITSADYDRVLEKLKKTATGWMTTINGKELKVEGQITYYNRYKRQNVVKDLSVELDRLSEESVNNDISSWTKGRQGEALSLLKKRFSHRPVQEKFVCLNCGFETHADEQAALNIARSWLFLRSQEYKKYQTNKTTGNTDKRAFVETWQSFYRKKLKEVWKPAV

SEQ ID NO: 35340 - protein, 978 aa, synthetic construct
  REGION 1..978: note = engineered CasX variant
QEIKRINKIRRRLVKDSNTKKAGKTGPMKTLLVRVMTPDLRERLENLRKKPENIPQPISNTSRANLNKLLTDYTEMKKAILHVYWEEFQKDPVGLMSRVAQPASKKIDQNKLKPEMDEKGNLTTAGFACSQCGQPLFVYKLEQVSEKGKAYTNYFGRCNVAEHEKLIKLSQLKPEKDSDEAVTYSLGKFGQRALDFYSIHVTKESTHPVKPLAQIAGNRYASGPVGKALSDACMGTIASFLSKYQDIIIEHQKVVKGNQKRLESLRELAGKENLEYPSVTLPPQPHTKEGVDAYNEVIARVRMWVNLNLWQKLKLSRDDAKPLLRLKGFPSFPLVERQANEVDWWDMVCNVKKLINEKKEDGKVFWQNLAGYKRQEALRPYLSSEEDRKKGKKFARYQLGDLLLHLEKKHGEDWGKVYDEAWERIDKKVEGLSKHIKLEEERRSEDAQSKAALTDWLRAKASFVIEGLKEADKDEFCRCELKLQKWYGDLRGKPFAIEAENSILDISGFSKQYNCAFIWQKDGVKKLNLYLIINYFKGGKLRFKKIKPEAFEANRFYTVINKKSGEIVPMEVNFNFDDPNLIILPLAFGKRQGREFIWNDLLSLETGSLKLANGRVIEKTLYNRRTRQDEPALFVALTFERREVLDSSNIKPMNLIGVDRGENIPAVIALTDPEGCPLSRFKDSLGNPTHILRIGESYKEKQRTIQAKKEVEQRRAGGYSRKYASKAKNLADDMVRNTARDLLYYAVTQDAMLIFENLSRGFGRQGKRTFMAERQYTRMEDWLTAKLAYEGLPSKTYLSKTLAQYTSKTCSNCGFTITSADYDRVLEKLKKTATGWMTTINGKELKVEGQITYYNRYKRQNVVKDLSVELDRLSEESVNNDISSWTKGRQGEALSLLKKRFSHRPVQEKFVCLNCGFETHADEQAALNIARSWLFLRSQEYKKYQTNKTTGNTDKRAFVETWQSFYRKKLKEVWKPAV

SEQ ID NO: 35341 - protein, 977 aa, synthetic construct
  REGION 1..977: note = engineered CasX variant
QEIKRINKIRRRLVKDSNTKKAGKTGPMKTLLVRVMTPDLRERLENLRKKPENIPQPISNTSRANLNKLLTDYTEMKKAILHVYWEEFQKDPVGLMSRVAQPASKKIDQNKLKPEMDEKGNLTTAGFACSQCGQPLFVYKLEQVSEKGKAYTNYFGRCNVAEHEKLILLSQLKPEKDSDEAVTYSLGKFGQRALDFYSIHVTKESTHPVKPLAQIAGNRYASPVGKALSDACMGTIASFLSKYQDIIIEHQKVVKGNQKRLESLRELAGKENLEYPSVTLPPQPHTKEGVDAYNEVIARVRMWVNLNLWQKLKLSRDDAKPLLRLKGFPSFPLVERQANEVDWWDMVCNVKKLINEKKEDGKVFWQNLAGYKRQEALRPYLSSEEDRKKGKKFARYQLGDLLLHLEKKHGEDWGKVYDEAWERIDKKVEGLSKHIKLEEERRSEDAQSKAALTDWLRAKASFVIEGLKEADKDEFCRCELKLQKWYGDLRGKPFAIEAENSILDISGFSKQYNCAFIWQKDGVKKLNLYLIINYFKGGKLRFKKIKPEAFEANRFYTVINKKSGEIVPMEVNFNFDDPNLIILPLAFGKRQGREFIWNDLLSLETGSLKLANGRVIEKTLYNRRTRQDEPALFVALTFERREVLDSSNIKPMNLIGVDRGENIPAVIALTDPEGCPLSRFKDSLGNPTHILRIGESYKEKQRTIQAKKEVEQRRAGGYSRKYASKAKNLADDMVRNTARDLLYYAVTQDAMLIFENLSRGFGRQGKRTFMAERQYTRMEDWLTAKLAYEGLPSKTYLSKTLAQYTSKTCSNCGFTITSADYDRVLEKLKKTATGWMTTINGKELKVEGQITYYNRYKRQNVVKDLSVELDRLSEESVNNDISSWTKGRQGEALSLLKKRFSHRPVQEKFVCLNCGFETHADEQAALNIARSWLFLRSQEYKKYQTNKTTGNTDKRAFVETWQSFYRKKLKEVWKPAV

SEQ ID NO: 35342 - protein, 978 aa, synthetic construct
  REGION 1..978: note = engineered CasX variant
QEIKRINKIRRRLVKDSNTKKAGKTGPMKTLLVRVMTPDLRERLENLRKKPENIPQPISNTSRANLNKLLTDYTEMKKAILHVYWEEFQKDPVGLMSRVAQPASKKIDQNKLKPEMDEKGNLTTAGFACSQCGQPLFVYKLEQVSEKGKAYTNYFGRCNVAEHEKLILLSQLKPEKDSDEAVTYSLGKFGQRALDFYSIHVTKESTHPVKPLAQIAGNRYASYPVGKALSDACMGTIASFLSKYQDIIIEHQKVVKGNQKRLESLRELAGKENLEYPSVTLPPQPHTKEGVDAYNEVIARVRMWVNLNLWQKLKLSRDDAKPLLRLKGFPSFPLVERQANEVDWWDMVCNVKKLINEKKEDGKVFWQNLAGYKRQEALRPYLSSEEDRKKGKKFARYQLGDLLLHLEKKHGEDWGKVYDEAWERIDKKVEGLSKHIKLEEERRSEDAQSKAALTDWLRAKASFVIEGLKEADKDEFCRCELKLQKWYGDLRGKPFAIEAENSILDISGFSKQYNCAFIWQKDGVKKLNLYLIINYFKGGKLRFKKIKPEAFEANRFYTVINKKSGEIVPMEVNFNFDDPNLIILPLAFGKRQGREFIWNDLLSLETGSLKLANGRVIEKTLYNRRTRQDEPALFVALTFERREVLDSSNIKPMNLIGVDRGENIPAVIALTDPEGCPLSRFKDSLGNPTHILRIGESYKEKQRTIQAKKEVEQRRAGGYSRKYASKAKNLADDMVRNTARDLLYYAVTQDAMLIFENLSRGFGRQGKRTFMAERQYTRMEDWLTAKLAYEGLPSKTYLSKTLAQYTSKTCSNCGFTITSADYDRVLEKLKKTATGWMTTINGKELKVEGQITYYNRYKRQNVVKDLSVELDRLSEESVNNDISSWTKGRSGEALSLLKKRFSHRPVQEKFVCLNCEFETHADEQAALNIARSWLFLRSQEYKKYQTNKTTGNTDKRAFVETWQSFYRKKLKEVWKPAV

SEQ ID NO: 35343 - protein, 978 aa, synthetic construct
  REGION 1..978: note = engineered CasX variant
QEIKRINKIRRRLVKDSNTKKAGKTGPMKTLLVRVMTPDLRERLENLRKKPENIPQPISNTSRANLNKLLTDYTEMKKAILHVYWEEFQKDPVGLMSRVAQPASKKIDQNKLKPEMDEKGNLTTAGFACSQCGQPLFVYKLEQVSEKGKAYTNYFGRCNVAEHEKLILLSQLKPEKDSDEAVTYSLGKFGQRALDFYSIHVTKESTHPVKPLAQIAGNRYASHPVGKALSDACMGTIASFLSKYQDIIIEHQKVVKGNQKRLESLRELAGKENLEYPSVTLPPQPHTKEGVDAYNEVIARVRMWVNLNLWQKLKLSRDDAKPLLRLKGFPSFPLVERQANEVDWWDMVCNVKKLINEKKEDGKVFWQNLAGYKRQEALRPYLSSEEDRKKGKKFARYQLGDLLLHLEKKHGEDWGKVYDEAWERIDKKVEGLSKHIKLEEERRSEDAQSKAALTDWLRAKASFVIEGLKEADKDEFCRCELKLQKWYGDLRGKPFAIEAENSILDISGFSKQYNCAFIWQKDGVKKLNLYLIINYFKGGKLRFKKIKPEAFEANRFYTVINKKSGEIVPMEVNFNFDDPNLIILPLAFGKRQGREFIWNDLLSLETGSLKLANGRVIEKTLYNRRTRQDEPALFVALTFERREVLDSSNIKPMNLIGVDRGENIPAVIALTDPEGCPLSRFKDSLGNPTHILRIGESYKEKQRTIQAKKEVEQRRAGGYSRKYASKAKNLADDMVRNTARDLLYYAVTQDAMLIFENLSRGFGRQGKRTFMAERQYTRMEDWLTAKLAYEGLPSKTYLSKTLAQYTSKTCSNCGFTITSADYDRVLEKLKKTATGWMTTINGKELKVEGQITYYNRYKRQNVVKDLSVELDRLSEESVNNDISSWTKGRSGEALSLLKKRFSHRPVQEKFVCLNCEFETHADEQAALNIARSWLFLRSQEYKKYQTNKTTGNTDKRAFVETWQSFYRKKLKEVWKPAV

SEQ ID NO: 35344 - protein, 978 aa, synthetic construct
  REGION 1..978: note = engineered CasX variant
QEIKRINKIRRRLVKDSNTKKAGKTGPMKTLLVRVMTPDLRERLENLRKKPENIPQPISNTSRANLNKLLTDYTEMKKAILHVYWEEFQKDPVGLMSRVAQPASKKIDQNKLKPEMDEKGNLTTAGFACSQCGQPLFVYKLEQVSEKGKAYTNYFGRCNVAEHEKLILLSQLKPEKDSDEAVTYSLGKFGQRALDFYSIHVTKESTHPVKPLAQIAGNRYASSPVGKALSDACMGTIASFLSKYQDIIIEHQKVVKGNQKRLESLRELAGKENLEYPSVTLPPQPHTKEGVDAYNEVIARVRMWVNLNLWQKLKLSRDDAKPLLRLKGFPSFPLVERQANEVDWWDMVCNVKKLINEKKEDGKVFWQNLAGYKRQEALRPYLSSEEDRKKGKKFARYQLGDLLLHLEKKHGEDWGKVYDEAWERIDKKVEGLSKHIKLEEERRSEDAQSKAALTDWLRAKASFVIEGLKEADKDEFCRCELKLQKWYGDLRGKPFAIEAENSILDISGFSKQYNCAFIWQKDGVKKLNLYLIINYFKGGKLRFKKIKPEAFEANRFYTVINKKSGEIVPMEVNFNFDDPNLIILPLAFGKRQGREFIWNDLLSLETGSLKLANGRVIEKTLYNRRTRQDEPALFVALTFERREVLDSSNIKPMNLIGVDRGENIPAVIALTDPEGCPLSRFKDSLGNPTHILRIGESYKEKQRTIQAKKEVEQRRAGGYSRKYASKAKNLADDMVRNTARDLLYYAVTQDAMLIFENLSRGFGRQGKRTFMAERQYTRMEDWLTAKLAYEGLPSKTYLSKTLAQYTSKTCSNCGFTITSADYDRVLEKLKKTATGWMTTINGKELKVEGQITYYNRYKRQNVVKDLSVELDRLSEESVNNDISSWTKGRSGEALSLLKKRFSHRPVQEKFVCLNCEFETHADEQAALNIARSWLFLRSQEYKKYQTNKTTGNTDKRAFVETWQSFYRKKLKEVWKPAV

SEQ ID NO: 35345 - protein, 978 aa, synthetic construct
  REGION 1..978: note = engineered CasX variant
QEIKRINKIRRRLVKDSNTKKAGKTGPMKTLLVRVMTPDLRERLENLRKKPENIPQPISNTSRANLNKLLTDYTEMKKAILHVYWEEFQKDPVGLMSRVAQPASKKIDQNKLKPEMDEKGNLTTAGFACSQCGQPLFVYKLEQVSEKGKAYTNYFGRCNVAEHEKLILLSQLKPEKDSDEAVTYSLGKFGQRALDFYSIHVTKESTHPVKPLAQIAGNRYASTPVGKALSDACMGTIASFLSKYQDIIIEHQKVVKGNQKRLESLRELAGKENLEYPSVTLPPQPHTKEGVDAYNEVIARVRMWVNLNLWQKLKLSRDDAKPLLRLKGFPSFPLVERQANEVDWWDMVCNVKKLINEKKEDGKVFWQNLAGYKRQEALRPYLSSEEDRKKGKKFARYQLGDLLLHLEKKHGEDWGKVYDEAWERIDKKVEGLSKHIKLEEERRSEDAQSKAALTDWLRAKASFVIEGLKEADKDEFCRCELKLQKWYGDLRGKPFAIEAENSILDISGFSKQYNCAFIWQKDGVKKLNLYLIINYFKGGKLRFKKIKPEAFEANRFYTVINKKSGEIVPMEVNFNFDDPNLIILPLAFGKRQGREFIWNDLLSLETGSLKLANGRVIEKTLYNRRTRQDEPALFVALTFERREVLDSSNIKPMNLIGVDRGENIPAVIALTDPEGCPLSRFKDSLGNPTHILRIGESYKEKQRTIQAKKEVEQRRAGGYSRKYASKAKNLADDMVRNTARDLLYYAVTQDAMLIFENLSRGFGRQGKRTFMAERQYTRMEDWLTAKLAYEGLPSKTYLSKTLAQYTSKTCSNCGFTITSADYDRVLEKLKKTATGWMTTINGKELKVEGQITYYNRYKRQNVVKDLSVELDRLSEESVNNDISSWTKGRSGEALSLLKKRFSHRPVQEKFVCLNCEFETHADEQAALNIARSWLFLRSQEYKKYQTNKTTGNTDKRAFVETWQSFYRKKLKEVWKPAV

SEQ ID NO: 35346 - protein, 978 aa, synthetic construct
  REGION 1..978: note = engineered CasX variant
QEIKRINKIRRRLVKDSNTKKAGKTGPMKTLLVRVMTPDLRERLENLRKKPENIPQPISNTSRANLNKLLTDYTEMKKAILHVYWEEFQKDPVGLMSRVAQPASKKIDQNKLKPEMDEKGNLTTAGFACSQCGQPLFVYKLEQVSEKGKAYTNYFGRCNVAEHEKLILLSQLKPEKDSDEAVTYSLGKFGQRALDFYSIHVTKESTHPVKPLAQIAGNRYASAPVGKALSDACMGTIASFLSKYQDIIIEHQKVVKGNQKRLESLRELAGKENLEYPSVTLPPQPHTKEGVDAYNEVIARVRMWVNLNLWQKLKLSRDDAKPLLRLKGFPSFPLVERQANEVDWWDMVCNVKKLINEKKEDGKVFWQNLAGYKRQEALRPYLSSEEDRKKGKKFARYQLGDLLLHLEKKHGEDWGKVYDEAWERIDKKVEGLSKHIKLEEERRSEDAQSKAALTDWLRAKASFVIEGLKEADKDEFCRCELKLQKWYGDLRGKPFAIEAENSILDISGFSKQYNCAFIWQKDGVKKLNLYLIINYFKGGKLRFKKIKPEAFEANRFYTVINKKSGEIVPMEVNFNFDDPNLIILPLAFGKRQGREFIWNDLLSLETGSLKLANGRVIEKTLYNRRTRQDEPALFVALTFERREVLDSSNIKPMNLIGVDRGENIPAVIALTDPEGCPLSRFKDSLGNPTHILRIGESYKEKQRTIQAKKEVEQRRAGGYSRKYASKAKNLADDMVRNTARDLLYYAVTQDAMLIFENLSRGFGRQGKRTFMAERQYTRMEDWLTAKLAYEGLPSKTYLSKTLAQYTSKTCSNCGFTITSADYDRVLEKLKKTATGWMTTINGKELKVEGQITYYNRYKRQNVVKDLSVELDRLSEESVNNDISSWTKGRSGEALSLLKKRFSHRPVQEKFVCLNCEFETHADEQAALNIARSWLFLRSQEYKKYQTNKTTGNTDKRAFVETWQSFYRKKLKEVWKPAV

SEQ ID NO: 35347 - protein, 978 aa, synthetic construct
  REGION 1..978: note = engineered CasX variant
QEIKRINKIRRRLVKDSNTKKAGKTGPMKTLLVRVMTPDLRERLENLRKKPENIPQPISNTSRANLNKLLTDYTEMKKAILHVYWEEFQKDPVGLMSRVAQPASKKIDQNKLKPEMDEKGNLTTAGFACSQCGQPLFVYKLEQVSEKGKAYTNYFGRCNVAEHEKLILLSQLKPEKDSDEAVTYSLGKFGQRALDFYSIHVTKESTHPVKPLAQIAGNRYASVPVGKALSDACMGTIASFLSKYQDIIIEHQKVVKGNQKRLESLRELAGKENLEYPSVTLPPQPHTKEGVDAYNEVIARVRMWVNLNLWQKLKLSRDDAKPLLRLKGFPSFPLVERQANEVDWWDMVCNVKKLINEKKEDGKVFWQNLAGYKRQEALRPYLSSEEDRKKGKKFARYQLGDLLLHLEKKHGEDWGKVYDEAWERIDKKVEGLSKHIKLEEERRSEDAQSKAALTDWLRAKASFVIEGLKEADKDEFCRCELKLQKWYGDLRGKPFAIEAENSILDISGFSKQYNCAFIWQKDGVKKLNLYLIINYFKGGKLRFKKIKPEAFEANRFYTVINKKSGEIVPMEVNFNFDDPNLIILPLAFGKRQGREFIWNDLLSLETGSLKLANGRVIEKTLYNRRTRQDEPALFVALTFERREVLDSSNIKPMNLIGVDRGENIPAVIALTDPEGCPLSRFKDSLGNPTHILRIGESYKEKQRTIQAKKEVEQRRAGGYSRKYASKAKNLADDMVRNTARDLLYYAVTQDAMLIFENLSRGFGRQGKRTFMAERQYTRMEDWLTAKLAYEGLPSKTYLSKTLAQYTSKTCSNCGFTITSADYDRVLEKLKKTATGWMTTINGKELKVEGQITYYNRYKRQNVVKDLSVELDRLSEESVNNDISSWTKGRSGEALSLLKKRFSHRPVQEKFVCLNCEFETHADEQAALNIARSWLFLRSQEYKKYQTNKTTGNTDKRAFVETWQSFYRKKLKEVWKPAV

SEQ ID NO: 35348 - protein, 978 aa, synthetic construct
  REGION 1..978: note = engineered CasX variant
QEIKRINKIRRRLVKDSNTKKAGKTGPMKTLLVRVMTPDLRERLENLRKKPENIPQPISNTSRANLNKLLTDYTEMKKAILHVYWEEFQKDPVGLMSRVAQPASKKIDQNKLKPEMDEKGNLTTAGFACSQCGQPLFVYKLEQVSEKGKAYTNYFGRCNVAEHEKLIKLSQLKPEKDSDEAVTYSLGKFGQRALDFYSIHVTKESTHPVKPLAQIAGNRYASGPVGKALSDACMGTIASFLSKYQDIIIEHQKVVKGNQKRLESLRELAGKENLEYPSVTLPPQPHTKEGVDAYNEVIARVRMWVNLNLWQKLKLSRDDAKPLLRLKGFPSFPLVERQANEVDWWDMVCNVKKLINEKKEDGKVFWQNLAGYKRQEALRPYLSSEEDRKKGKKFARYQLGDLLLHLEKKHGEDWGKVYDEAWERIDKKVEGLSKHIKLEEERRSEDAQSKAALTDWLRAKASFVIEGLKEADKDEFCRCELKLQKWYGDLRGKPFAIEAENSILDISGFSKQYNCAFIWQKDGVKKLNLYLIINYFKGGKLRFKKIKPEAFEANRFYTVINKKSGEIVPMEVNFNFDDPNLIILPLAFGKRQGREFIWNDLLSLETGSLKLANGRVIEKTLYNRRTRQDEPALFVALTFERREVLDSSNIKPMNLIGVDRGENIPAVIALTDPEGCPLSRFKDSLGNPTHILRIGESYKEKQRTIQAKKEVEQRRAGGYSRKYASKAKNLADDMVRNTARDLLYYAVTQDAMLIFENLSRGFGRQGKRTFMAERQYTRMEDWLTAKLAYEGLPSKTYLSKTLAQYTSKTCSNCGFTITSADYDRVLEKLKKTATGWMTTINGKELKVEGQITYYNRYKRQNVVKDLSVELDRLSEESVNNDISSWTKGRSGEALSLLKKRFSHRPVQEKFVCLNCEFETHADEQAALNIARSWLFLRSQEYKKYQTNKTTGNTDKRAFVETWQSFYRKKLKEVWKPAV

SEQ ID NO: 35349 - protein, 977 aa, synthetic construct
  REGION 1..977: note = engineered CasX variant
QEIKRINKIRRRLVKDSNTKKAGKTGPMKTLLVRVMTPDLRERLENLRKKPENIPQPISNTSRANLNKLLTDYTEMKKAILHVYWEEFQKDPVGLMSRVAQPASKKIDQNKLKPEMDEKGNLTTAGFACSQCGQPLFVYKLEQVSEKGKAYTNYFGRCNVAEHEKLILLSQLKPEKDSDEAVTYSLGKFGQRALDFYSIHVTKESTHPVKPLAQIAGNRYASPVGKALSDACMGTIASFLSKYQDIIIEHQKVVKGNQKRLESLRELAGKENLEYPSVTLPPQPHTKEGVDAYNEVIARVRMWVNLNLWQKLKLSRDDAKPLLRLKGFPSFPLVERQANEVDWWDMVCNVKKLINEKKEDGKVFWQNLAGYKRQEALRPYLSSEEDRKKGKKFARYQLGDLLLHLEKKHGEDWGKVYDEAWERIDKKVEGLSKHIKLEEERRSEDAQSKAALTDWLRAKASFVIEGLKEADKDEFCRCELKLQKWYGDLRGKPFAIEAENSILDISGFSKQYNCAFIWQKDGVKKLNLYLIINYFKGGKLRFKKIKPEAFEANRFYTVINKKSGEIVPMEVNFNFDDPNLIILPLAFGKRQGREFIWNDLLSLETGSLKLANGRVIEKTLYNRRTRQDEPALFVALTFERREVLDSSNIKPMNLIGVDRGENIPAVIALTDPEGCPLSRFKDSLGNPTHILRIGESYKEKQRTIQAKKEVEQRRAGGYSRKYASKAKNLADDMVRNTARDLLYYAVTQDAMLIFENLSRGFGRQGKRTFMAERQYTRMEDWLTAKLAYEGLPSKTYLSKTLAQYTSKTCSNCGFTITSADYDRVLEKLKKTATGWMTTINGKELKVEGQITYYNRYKRQNVVKDLSVELDRLSEESVNNDISSWTKGRSGEALSLLKKRFSHRPVQEKFVCLNCEFETHADEQAALNIARSWLFLRSQEYKKYQTNKTTGNTDKRAFVETWQSFYRKKLKEVWKPAV

SEQ ID NO: 35350 - protein, 979 aa, synthetic construct
  REGION 1..979: note = engineered CasX variant
QEIKRINKIRRRLVKDSNTKKAGKTGPMKTLLVRVMTPDLRERLENLRKKPENIPQPISNTSRANLNKLLTDYTEMKKAILHVYWEEFQKDPVGLMSRVAQPASKKIDQNKLKPEMDEKGNLTTAGFACSQCGQPLFVYKLEQVSEKGKAYTNYFGRCNVAEHEKLILLSQLKPEKDSDEAVTYSLGKFGQRALDFYSIHVTKESTHPVKPLAQIAGNRYASYPVGKALSDACMGTIASFLSKYQDIIIEHQKVVKGNQKRLESLRELAGKENLEYPSVTLPPQPHTKEGVDAYNEVIARVRMWVNLNLWQKLKLSRDDAKPLLRLKGFPSFPLVERQANEVDWWDMVCNVKKLINEKKEDGKVFWQNLAGYKRQEALRPYLSSEEDRKKGKKFARYQLGDLLLHLEKKHGEDWGKVYDEAWERIDKKVEGLSKHIKLEEERRSEDAQSKAALTDWLRAKASFVIEGLKEADKDEFCRCELKLQKWYGDLRGKPFAIEAENSILDISGFSKQYNCAFIWQKDGVKKLNLYLIINYFKGGKLRFKKIKPEAFEANRFYTVINKKSGEIVPMEVNFNFDDPNLIILPLAFGKRQGREFIWNDLLSLETGSLKLANGRVIEKTLYNRRTRQDEPALFVALTFERREVLDSSNIKPMNLIGVDRGENIPAVIALTDPEGCPLSRFKDSLGNPTHILRIGESYKEKQRTIQAKKEVEQRRAGGYSRKYASKAKNLADDMVRNTARDLLYYAVTQDAMLIFENLSRGFGRQGKRTFMAERQYTRMEDWLTAKLAYEGLPSKTYLSKTLAQYTSKTCSNCGFTITSADYDRVLEKLKKTATGWMTTINGKELKVEGQITYYNRYKRQNVVKDLSVELDRLSEESVNNDISSWTKGRSGEALSLLKKRFSHRPVQEKFVCLNCGFETHADEQAALNIARSWLFLRSQEYKKYQTNKTSTGNTDKRAFVETWQSFYRKKLKEVWKPAV

SEQ ID NO: 35351 - protein, 979 aa, synthetic construct
  REGION 1..979: note = engineered CasX variant
QEIKRINKIRRRLVKDSNTKKAGKTGPMKTLLVRVMTPDLRERLENLRKKPENIPQPISNTSRANLNKLLTDYTEMKKAILHVYWEEFQKDPVGLMSRVAQPASKKIDQNKLKPEMDEKGNLTTAGFACSQCGQPLFVYKLEQVSEKGKAYTNYFGRCNVAEHEKLILLSQLKPEKDSDEAVTYSLGKFGQRALDFYSIHVTKESTHPVKPLAQIAGNRYASHPVGKALSDACMGTIASFLSKYQDIIIEHQKVVKGNQKRLESLRELAGKENLEYPSVTLPPQPHTKEGVDAYNEVIARVRMWVNLNLWQKLKLSRDDAKPLLRLKGFPSFPLVERQANEVDWWDMVCNVKKLINEKKEDGKVFWQNLAGYKRQEALRPYLSSEEDRKKGKKFARYQLGDLLLHLEKKHGEDWGKVYDEAWERIDKKVEGLSKHIKLEEERRSEDAQSKAALTDWLRAKASFVIEGLKEADKDEFCRCELKLQKWYGDLRGKPFAIEAENSILDISGFSKQYNCAFIWQKDGVKKLNLYLIINYFKGGKLRFKKIKPEAFEANRFYTVINKKSGEIVPMEVNFNFDDPNLIILPLAFGKRQGREFIWNDLLSLETGSLKLANGRVIEKTLYNRRTRQDEPALFVALTFERREVLDSSNIKPMNLIGVDRGENIPAVIALTDPEGCPLSRFKDSLGNPTHILRIGESYKEKQRTIQAKKEVEQRRAGGYSRKYASKAKNLADDMVRNTARDLLYYAVTQDAMLIFENLSRGFGRQGKRTFMAERQYTRMEDWLTAKLAYEGLPSKTYLSKTLAQYTSKTCSNCGFTITSADYDRVLEKLKKTATGWMTTINGKELKVEGQITYYNRYKRQNVVKDLSVELDRLSEESVNNDISSWTKGRSGEALSLLKKRFSHRPVQEKFVCLNCGFETHADEQAALNIARSWLFLRSQEYKKYQTNKTSTGNTDKRAFVETWQSFYRKKLKEVWKPAV

SEQ ID NO: 35352 - protein, 979 aa, synthetic construct
  REGION 1..979: note = engineered CasX variant
QEIKRINKIRRRLVKDSNTKKAGKTGPMKTLLVRVMTPDLRERLENLRKKPENIPQPISNTSRANLNKLLTDYTEMKKAILHVYWEEFQKDPVGLMSRVAQPASKKIDQNKLKPEMDEKGNLTTAGFACSQCGQPLFVYKLEQVSEKGKAYTNYFGRCNVAEHEKLILLSQLKPEKDSDEAVTYSLGKFGQRALDFYSIHVTKESTHPVKPLAQIAGNRYASSPVGKALSDACMGTIASFLSKYQDIIIEHQKVVKGNQKRLESLRELAGKENLEYPSVTLPPQPHTKEGVDAYNEVIARVRMWVNLNLWQKLKLSRDDAKPLLRLKGFPSFPLVERQANEVDWWDMVCNVKKLINEKKEDGKVFWQNLAGYKRQEALRPYLSSEEDRKKGKKFARYQLGDLLLHLEKKHGEDWGKVYDEAWERIDKKVEGLSKHIKLEEERRSEDAQSKAALTDWLRAKASFVIEGLKEADKDEFCRCELKLQKWYGDLRGKPFAIEAENSILDISGFSKQYNCAFIWQKDGVKKLNLYLIINYFKGGKLRFKKIKPEAFEANRFYTVINKKSGEIVPMEVNFNFDDPNLIILPLAFGKRQGREFIWNDLLSLETGSLKLANGRVIEKTLYNRRTRQDEPALFVALTFERREVLDSSNIKPMNLIGVDRGENIPAVIALTDPEGCPLSRFKDSLGNPTHILRIGESYKEKQRTIQAKKEVEQRRAGGYSRKYASKAKNLADDMVRNTARDLLYYAVTQDAMLIFENLSRGFGRQGKRTFMAERQYTRMEDWLTAKLAYEGLPSKTYLSKTLAQYTSKTCSNCGFTITSADYDRVLEKLKKTATGWMTTINGKELKVEGQITYYNRYKRQNVVKDLSVELDRLSEESVNNDISSWTKGRSGEALSLLKKRFSHRPVQEKFVCLNCGFETHADEQAALNIARSWLFLRSQEYKKYQTNKTSTGNTDKRAFVETWQSFYRKKLKEVWKPAV

SEQ ID NO: 35353 - protein, 979 aa, synthetic construct
  REGION 1..979: note = engineered CasX variant
QEIKRINKIRRRLVKDSNTKKAGKTGPMKTLLVRVMTPDLRERLENLRKKPENIPQPISNTSRANLNKLLTDYTEMKKAILHVYWEEFQKDPVGLMSRVAQPASKKIDQNKLKPEMDEKGNLTTAGFACSQCGQPLFVYKLEQVSEKGKAYTNYFGRCNVAEHEKLILLSQLKPEKDSDEAVTYSLGKFGQRALDFYSIHVTKESTHPVKPLAQIAGNRYASTPVGKALSDACMGTIASFLSKYQDIIIEHQKVVKGNQKRLESLRELAGKENLEYPSVTLPPQPHTKEGVDAYNEVIARVRMWVNLNLWQKLKLSRDDAKPLLRLKGFPSFPLVERQANEVDWWDMVCNVKKLINEKKEDGKVFWQNLAGYKRQEALRPYLSSEEDRKKGKKFARYQLGDLLLHLEKKHGEDWGKVYDEAWERIDKKVEGLSKHIKLEEERRSEDAQSKAALTDWLRAKASFVIEGLKEADKDEFCRCELKLQKWYGDLRGKPFAIEAENSILDISGFSKQYNCAFIWQKDGVKKLNLYLIINYFKGGKLRFKKIKPEAFEANRFYTVINKKSGEIVPMEVNFNFDDPNLIILPLAFGKRQGREFIWNDLLSLETGSLKLANGRVIEKTLYNRRTRQDEPALFVALTFERREVLDSSNIKPMNLIGVDRGENIPAVIALTDPEGCPLSRFKDSLGNPTHILRIGESYKEKQRTIQAKKEVEQRRAGGYSRKYASKAKNLADDMVRNTARDLLYYAVTQDAMLIFENLSRGFGRQGKRTFMAERQYTRMEDWLTAKLAYEGLPSKTYLSKTLAQYTSKTCSNCGFTITSADYDRVLEKLKKTATGWMTTINGKELKVEGQITYYNRYKRQNVVKDLSVELDRLSEESVNNDISSWTKGRSGEALSLLKKRFSHRPVQEKFVCLNCGFETHADEQAALNIARSWLFLRSQEYKKYQTNKTSTGNTDKRAFVETWQSFYRKKLKEVWKPAV

SEQ ID NO: 35354 - protein, 979 aa, synthetic construct
  REGION 1..979: note = engineered CasX variant
QEIKRINKIRRRLVKDSNTKKAGKTGPMKTLLVRVMTPDLRERLENLRKKPENIPQPISNTSRANLNKLLTDYTEMKKAILHVYWEEFQKDPVGLMSRVAQPASKKIDQNKLKPEMDEKGNLTTAGFACSQCGQPLFVYKLEQVSEKGKAYTNYFGRCNVAEHEKLILLSQLKPEKDSDEAVTYSLGKFGQRALDFYSIHVTKESTHPVKPLAQIAGNRYASAPVGKALSDACMGTIASFLSKYQDIIIEHQKVVKGNQKRLESLRELAGKENLEYPSVTLPPQPHTKEGVDAYNEVIARVRMWVNLNLWQKLKLSRDDAKPLLRLKGFPSFPLVERQANEVDWWDMVCNVKKLINEKKEDGKVFWQNLAGYKRQEALRPYLSSEEDRKKGKKFARYQLGDLLLHLEKKHGEDWGKVYDEAWERIDKKVEGLSKHIKLEEERRSEDAQSKAALTDWLRAKASFVIEGLKEADKDEFCRCELKLQKWYGDLRGKPFAIEAENSILDISGFSKQYNCAFIWQKDGVKKLNLYLIINYFKGGKLRFKKIKPEAFEANRFYTVINKKSGEIVPMEVNFNFDDPNLIILPLAFGKRQGREFIWNDLLSLETGSLKLANGRVIEKTLYNRRTRQDEPALFVALTFERREVLDSSNIKPMNLIGVDRGENIPAVIALTDPEGCPLSRFKDSLGNPTHILRIGESYKEKQRTIQAKKEVEQRRAGGYSRKYASKAKNLADDMVRNTARDLLYYAVTQDAMLIFENLSRGFGRQGKRTFMAERQYTRMEDWLTAKLAYEGLPSKTYLSKTLAQYTSKTCSNCGFTITSADYDRVLEKLKKTATGWMTTINGKELKVEGQITYYNRYKRQNVVKDLSVELDRLSEESVNNDISSWTKGRSGEALSLLKKRFSHRPVQEKFVCLNCGFETHADEQAALNIARSWLFLRSQEYKKYQTNKTSTGNTDKRAFVETWQSFYRKKLKEVWKPAV

SEQ ID NO: 35355 - protein, 979 aa, synthetic construct
  REGION 1..979: note = engineered CasX variant
QEIKRINKIRRRLVKDSNTKKAGKTGPMKTLLVRVMTPDLRERLENLRKKPENIPQPISNTSRANLNKLLTDYTEMKKAILHVYWEEFQKDPVGLMSRVAQPASKKIDQNKLKPEMDEKGNLTTAGFACSQCGQPLFVYKLEQVSEKGKAYTNYFGRCNVAEHEKLILLSQLKPEKDSDEAVTYSLGKFGQRALDFYSIHVTKESTHPVKPLAQIAGNRYASVPVGKALSDACMGTIASFLSKYQDIIIEHQKVVKGNQKRLESLRELAGKENLEYPSVTLPPQPHTKEGVDAYNEVIARVRMWVNLNLWQKLKLSRDDAKPLLRLKGFPSFPLVERQANEVDWWDMVCNVKKLINEKKEDGKVFWQNLAGYKRQEALRPYLSSEEDRKKGKKFARYQLGDLLLHLEKKHGEDWGKVYDEAWERIDKKVEGLSKHIKLEEERRSEDAQSKAALTDWLRAKASFVIEGLKEADKDEFCRCELKLQKWYGDLRGKPFAIEAENSILDISGFSKQYNCAFIWQKDGVKKLNLYLIINYFKGGKLRFKKIKPEAFEANRFYTVINKKSGEIVPMEVNFNFDDPNLIILPLAFGKRQGREFIWNDLLSLETGSLKLANGRVIEKTLYNRRTRQDEPALFVALTFERREVLDSSNIKPMNLIGVDRGENIPAVIALTDPEGCPLSRFKDSLGNPTHILRIGESYKEKQRTIQAKKEVEQRRAGGYSRKYASKAKNLADDMVRNTARDLLYYAVTQDAMLIFENLSRGFGRQGKRTFMAERQYTRMEDWLTAKLAYEGLPSKTYLSKTLAQYTSKTCSNCGFTITSADYDRVLEKLKKTATGWMTTINGKELKVEGQITYYNRYKRQNVVKDLSVELDRLSEESVNNDISSWTKGRSGEALSLLKKRFSHRPVQEKFVCLNCGFETHADEQAALNIARSWLFLRSQEYKKYQTNKTSTGNTDKRAFVETWQSFYRKKLKEVWKPAV

SEQ ID NO: 35356 - protein, 979 aa, synthetic construct
  REGION 1..979: note = engineered CasX variant
QEIKRINKIRRRLVKDSNTKKAGKTGPMKTLLVRVMTPDLRERLENLRKKPENIPQPISNTSRANLNKLLTDYTEMKKAILHVYWEEFQKDPVGLMSRVAQPASKKIDQNKLKPEMDEKGNLTTAGFACSQCGQPLFVYKLEQVSEKGKAYTNYFGRCNVAEHEKLIKLSQLKPEKDSDEAVTYSLGKFGQRALDFYSIHVTKESTHPVKPLAQIAGNRYASGPVGKALSDACMGTIASFLSKYQDIIIEHQKVVKGNQKRLESLRELAGKENLEYPSVTLPPQPHTKEGVDAYNEVIARVRMWVNLNLWQKLKLSRDDAKPLLRLKGFPSFPLVERQANEVDWWDMVCNVKKLINEKKEDGKVFWQNLAGYKRQEALRPYLSSEEDRKKGKKFARYQLGDLLLHLEKKHGEDWGKVYDEAWERIDKKVEGLSKHIKLEEERRSEDAQSKAALTDWLRAKASFVIEGLKEADKDEFCRCELKLQKWYGDLRGKPFAIEAENSILDISGFSKQYNCAFIWQKDGVKKLNLYLIINYFKGGKLRFKKIKPEAFEANRFYTVINKKSGEIVPMEVNFNFDDPNLIILPLAFGKRQGREFIWNDLLSLETGSLKLANGRVIEKTLYNRRTRQDEPALFVALTFERREVLDSSNIKPMNLIGVDRGENIPAVIALTDPEGCPLSRFKDSLGNPTHILRIGESYKEKQRTIQAKKEVEQRRAGGYSRKYASKAKNLADDMVRNTARDLLYYAVTQDAMLIFENLSRGFGRQGKRTFMAERQYTRMEDWLTAKLAYEGLPSKTYLSKTLAQYTSKTCSNCGFTITSADYDRVLEKLKKTATGWMTTINGKELKVEGQITYYNRYKRQNVVKDLSVELDRLSEESVNNDISSWTKGRSGEALSLLKKRFSHRPVQEKFVCLNCGFETHADEQAALNIARSWLFLRSQEYKKYQTNKTSTGNTDKRAFVETWQSFYRKKLKEVWKPAV

SEQ ID NO: 35357 - protein, 978 aa, synthetic construct
  REGION 1..978: note = engineered CasX variant
QEIKRINKIRRRLVKDSNTKKAGKTGPMKTLLVRVMTPDLRERLENLRKKPENIPQPISNTSRANLNKLLTDYTEMKKAILHVYWEEFQKDPVGLMSRVAQPASKKIDQNKLKPEMDEKGNLTTAGFACSQCGQPLFVYKLEQVSEKGKAYTNYFGRCNVAEHEKLILLSQLKPEKDSDEAVTYSLGKFGQRALDFYSIHVTKESTHPVKPLAQIAGNRYASPVGKALSDACMGTIASFLSKYQDIIIEHQKVVKGNQKRLESLRELAGKENLEYPSVTLPPQPHTKEGVDAYNEVIARVRMWVNLNLWQKLKLSRDDAKPLLRLKGFPSFPLVERQANEVDWWDMVCNVKKLINEKKEDGKVFWQNLAGYKRQEALRPYLSSEEDRKKGKKFARYQLGDLLLHLEKKHGEDWGKVYDEAWERIDKKVEGLSKHIKLEEERRSEDAQSKAALTDWLRAKASFVIEGLKEADKDEFCRCELKLQKWYGDLRGKPFAIEAENSILDISGFSKQYNCAFIWQKDGVKKLNLYLIINYFKGGKLRFKKIKPEAFEANRFYTVINKKSGEIVPMEVNFNFDDPNLIILPLAFGKRQGREFIWNDLLSLETGSLKLANGRVIEKTLYNRRTRQDEPALFVALTFERREVLDSSNIKPMNLIGVDRGENIPAVIALTDPEGCPLSRFKDSLGNPTHILRIGESYKEKQRTIQAKKEVEQRRAGGYSRKYASKAKNLADDMVRNTARDLLYYAVTQDAMLIFENLSRGFGRQGKRTFMAERQYTRMEDWLTAKLAYEGLPSKTYLSKTLAQYTSKTCSNCGFTITSADYDRVLEKLKKTATGWMTTINGKELKVEGQITYYNRYKRQNVVKDLSVELDRLSEESVNNDISSWTKGRSGEALSLLKKRFSHRPVQEKFVCLNCGFETHADEQAALNIARSWLFLRSQEYKKYQTNKTSTGNTDKRAFVETWQSFYRKKLKEVWKPAV

SEQ ID NO: 35358 - protein, 979 aa, synthetic construct
  REGION 1..979: note = engineered CasX variant
QEIKRINKIRRRLVKDSNTKKAGKTGPMKTLLVRVMTPDLRERLENLRKKPENIPQPISNTSRANLNKLLTDYTEMKKAILHVYWEEFQKDPVGLMSRVAQPASKKIDQNKLKPEMDEKGNLTTAGFACSQCGQPLFVYKLEQVSEKGKAYTNYFGRCNVAEHEKLILLSQLKPEKDSDEAVTYSLGKFGQRALDFYSIHVTKESTHPVKPLAQIAGNRYASYPVGKALSDACMGTIASFLSKYQDIIIEHQKVVKGNQKRLESLRELAGKENLEYPSVTLPPQPHTKEGVDAYNEVIARVRMWVNLNLWQKLKLSRDDAKPLLRLKGFPSFPLVERQANEVDWWDMVCNVKKLINEKKEDGKVFWQNLAGYKRQEALRPYLSSEEDRKKGKKFARYQLGDLLLHLEKKHGEDWGKVYDEAWERIDKKVEGLSKHIKLEEERRSEDAQSKAALTDWLRAKASFVIEGLKEADKDEFCRCELKLQKWYGDLRGKPFAIEAENSILDISGFSKQYNCAFIWQKDGVKKLNLYLIINYFKGGKLRFKKIKPEAFEANRFYTVINKKSGEIVPMEVNFNFDDPNLIILPLAFGKRQGREFIWNDLLSLETGSLKLANGRVIEKTLYNRRTRQDEPALFVALTFERREVLDSSNIKPMNLIGVDRGENIPAVIALTDPEGCPLSRFKDSLGNPTHILRIGESYKEKQRTIQAKKEVEQRRAGGYSRKYASKAKNLADDMVRNTARDLLYYAVTQDAMLIFENLSRGFGRQGKRTFMAERQYTRMEDWLTAKLAYEGLPSKTYLSKTLAQYTSKTCSNCGFTITSADYDRVLEKLKKTATGWMTTINGKELKVEGQITYYNRYKRQNVVKDLSVELDRLSEESVNNDISSWTKGRSGEALSLLKKRFSHRPVQEKFVCLNCGFETHADEQAALNIARSWLFLRSQEYKKYQTNKTTGKNTDKRAFVETWQSFYRKKLKEVWKPAV

SEQ ID NO: 35359 - protein, 979 aa, synthetic construct
  REGION 1..979: note = engineered CasX variant
QEIKRINKIRRRLVKDSNTKKAGKTGPMKTLLVRVMTPDLRERLENLRKKPENIPQPISNTSRANLNKLLTDYTEMKKAILHVYWEEFQKDPVGLMSRVAQPASKKIDQNKLKPEMDEKGNLTTAGFACSQCGQPLFVYKLEQVSEKGKAYTNYFGRCNVAEHEKLILLSQLKPEKDSDEAVTYSLGKFGQRALDFYSIHVTKESTHPVKPLAQIAGNRYASHPVGKALSDACMGTIASFLSKYQDIIIEHQKVVKGNQKRLESLRELAGKENLEYPSVTLPPQPHTKEGVDAYNEVIARVRMWVNLNLWQKLKLSRDDAKPLLRLKGFPSFPLVERQANEVDWWDMVCNVKKLINEKKEDGKVFWQNLAGYKRQEALRPYLSSEEDRKKGKKFARYQLGDLLLHLEKKHGEDWGKVYDEAWERIDKKVEGLSKHIKLEEERRSEDAQSKAALTDWLRAKASFVIEGLKEADKDEFCRCELKLQKWYGDLRGKPFAIEAENSILDISGFSKQYNCAFIWQKDGVKKLNLYLIINYFKGGKLRFKKIKPEAFEANRFYTVINKKSGEIVPMEVNFNFDDPNLIILPLAFGKRQGREFIWNDLLSLETGSLKLANGRVIEKTLYNRRTRQDEPALFVALTFERREVLDSSNIKPMNLIGVDRGENIPAVIALTDPEGCPLSRFKDSLGNPTHILRIGESYKEKQRTIQAKKEVEQRRAGGYSRKYASKAKNLADDMVRNTARDLLYYAVTQDAMLIFENLSRGFGRQGKRTFMAERQYTRMEDWLTAKLAYEGLPSKTYLSKTLAQYTSKTCSNCGFTITSADYDRVLEKLKKTATGWMTTINGKELKVEGQITYYNRYKRQNVVKDLSVELDRLSEESVNNDISSWTKGRSGEALSLLKKRFSHRPVQEKFVCLNCGFETHADEQAALNIARSWLFLRSQEYKKYQTNKTTGKNTDKRAFVETWQSFYRKKLKEVWKPAV

SEQ ID NO: 35360 - protein, 979 aa, synthetic construct
  REGION 1..979: note = engineered CasX variant
QEIKRINKIRRRLVKDSNTKKAGKTGPMKTLLVRVMTPDLRERLENLRKKPENIPQPISNTSRANLNKLLTDYTEMKKAILHVYWEEFQKDPVGLMSRVAQPASKKIDQNKLKPEMDEKGNLTTAGFACSQCGQPLFVYKLEQVSEKGKAYTNYFGRCNVAEHEKLILLSQLKPEKDSDEAVTYSLGKFGQRALDFYSIHVTKESTHPVKPLAQIAGNRYASSPVGKALSDACMGTIASFLSKYQDIIIEHQKVVKGNQKRLESLRELAGKENLEYPSVTLPPQPHTKEGVDAYNEVIARVRMWVNLNLWQKLKLSRDDAKPLLRLKGFPSFPLVERQANEVDWWDMVCNVKKLINEKKEDGKVFWQNLAGYKRQEALRPYLSSEEDRKKGKKFARYQLGDLLLHLEKKHGEDWGKVYDEAWERIDKKVEGLSKHIKLEEERRSEDAQSKAALTDWLRAKASFVIEGLKEADKDEFCRCELKLQKWYGDLRGKPFAIEAENSILDISGFSKQYNCAFIWQKDGVKKLNLYLIINYFKGGKLRFKKIKPEAFEANRFYTVINKKSGEIVPMEVNFNFDDPNLIILPLAFGKRQGREFIWNDLLSLETGSLKLANGRVIEKTLYNRRTRQDEPALFVALTFERREVLDSSNIKPMNLIGVDRGENIPAVIALTDPEGCPLSRFKDSLGNPTHILRIGESYKEKQRTIQAKKEVEQRRAGGYSRKYASKAKNLADDMVRNTARDLLYYAVTQDAMLIFENLSRGFGRQGKRTFMAERQYTRMEDWLTAKLAYEGLPSKTYLSKTLAQYTSKTCSNCGFTITSADYDRVLEKLKKTATGWMTTINGKELKVEGQITYYNRYKRQNVVKDLSVELDRLSEESVNNDISSWTKGRSGEALSLLKKRFSHRPVQEKFVCLNCGFETHADEQAALNIARSWLFLRSQEYKKYQTNKTTGKNTDKRAFVETWQSFYRKKLKEVWKPAV

SEQ ID NO: 35361 - protein, 979 aa, synthetic construct
  REGION 1..979: note = engineered CasX variant
QEIKRINKIRRRLVKDSNTKKAGKTGPMKTLLVRVMTPDLRERLENLRKKPENIPQPISNTSRANLNKLLTDYTEMKKAILHVYWEEFQKDPVGLMSRVAQPASKKIDQNKLKPEMDEKGNLTTAGFACSQCGQPLFVYKLEQVSEKGKAYTNYFGRCNVAEHEKLILLSQLKPEKDSDEAVTYSLGKFGQRALDFYSIHVTKESTHPVKPLAQIAGNRYASTPVGKALSDACMGTIASFLSKYQDIIIEHQKVVKGNQKRLESLRELAGKENLEYPSVTLPPQPHTKEGVDAYNEVIARVRMWVNLNLWQKLKLSRDDAKPLLRLKGFPSFPLVERQANEVDWWDMVCNVKKLINEKKEDGKVFWQNLAGYKRQEALRPYLSSEEDRKKGKKFARYQLGDLLLHLEKKHGEDWGKVYDEAWERIDKKVEGLSKHIKLEEERRSEDAQSKAALTDWLRAKASFVIEGLKEADKDEFCRCELKLQKWYGDLRGKPFAIEAENSILDISGFSKQYNCAFIWQKDGVKKLNLYLIINYFKGGKLRFKKIKPEAFEANRFYTVINKKSGEIVPMEVNFNFDDPNLIILPLAFGKRQGREFIWNDLLSLETGSLKLANGRVIEKTLYNRRTRQDEPALFVALTFERREVLDSSNIKPMNLIGVDRGENIPAVIALTDPEGCPLSRFKDSLGNPTHILRIGESYKEKQRTIQAKKEVEQRRAGGYSRKYASKAKNLADDMVRNTARDLLYYAVTQDAMLIFENLSRGFGRQGKRTFMAERQYTRMEDWLTAKLAYEGLPSKTYLSKTLAQYTSKTCSNCGFTITSADYDRVLEKLKKTATGWMTTINGKELKVEGQITYYNRYKRQNVVKDLSVELDRLSEESVNNDISSWTKGRSGEALSLLKKRFSHRPVQEKFVCLNCGFETHADEQAALNIARSWLFLRSQEYKKYQTNKTTGKNTDKRAFVETWQSFYRKKLKEVWKPAV

SEQ ID NO: 35362 - protein, 979 aa, synthetic construct
  REGION 1..979: note = engineered CasX variant
QEIKRINKIRRRLVKDSNTKKAGKTGPMKTLLVRVMTPDLRERLENLRKKPENIPQPISNTSRANLNKLLTDYTEMKKAILHVYWEEFQKDPVGLMSRVAQPASKKIDQNKLKPEMDEKGNLTTAGFACSQCGQPLFVYKLEQVSEKGKAYTNYFGRCNVAEHEKLILLSQLKPEKDSDEAVTYSLGKFGQRALDFYSIHVTKESTHPVKPLAQIAGNRYASAPVGKALSDACMGTIASFLSKYQDIIIEHQKVVKGNQKRLESLRELAGKENLEYPSVTLPPQPHTKEGVDAYNEVIARVRMWVNLNLWQKLKLSRDDAKPLLRLKGFPSFPLVERQANEVDWWDMVCNVKKLINEKKEDGKVFWQNLAGYKRQEALRPYLSSEEDRKKGKKFARYQLGDLLLHLEKKHGEDWGKVYDEAWERIDKKVEGLSKHIKLEEERRSEDAQSKAALTDWLRAKASFVIEGLKEADKDEFCRCELKLQKWYGDLRGKPFAIEAENSILDISGFSKQYNCAFIWQKDGVKKLNLYLIINYFKGGKLRFKKIKPEAFEANRFYTVINKKSGEIVPMEVNFNFDDPNLIILPLAFGKRQGREFIWNDLLSLETGSLKLANGRVIEKTLYNRRTRQDEPALFVALTFERREVLDSSNIKPMNLIGVDRGENIPAVIALTDPEGCPLSRFKDSLGNPTHILRIGESYKEKQRTIQAKKEVEQRRAGGYSRKYASKAKNLADDMVRNTARDLLYYAVTQDAMLIFENLSRGFGRQGKRTFMAERQYTRMEDWLTAKLAYEGLPSKTYLSKTLAQYTSKTCSNCGFTITSADYDRVLEKLKKTATGWMTTINGKELKVEGQITYYNRYKRQNVVKDLSVELDRLSEESVNNDISSWTKGRSGEALSLLKKRFSHRPVQEKFVCLNCGFETHADEQAALNIARSWLFLRSQEYKKYQTNKTTGKNTDKRAFVETWQSFYRKKLKEVWKPAV

SEQ ID NO: 35363 - protein, 979 aa, synthetic construct
  REGION 1..979: note = engineered CasX variant
QEIKRINKIRRRLVKDSNTKKAGKTGPMKTLLVRVMTPDLRERLENLRKKPENIPQPISNTSRANLNKLLTDYTEMKKAILHVYWEEFQKDPVGLMSRVAQPASKKIDQNKLKPEMDEKGNLTTAGFACSQCGQPLFVYKLEQVSEKGKAYTNYFGRCNVAEHEKLILLSQLKPEKDSDEAVTYSLGKFGQRALDFYSIHVTKESTHPVKPLAQIAGNRYASVPVGKALSDACMGTIASFLSKYQDIIIEHQKVVKGNQKRLESLRELAGKENLEYPSVTLPPQPHTKEGVDAYNEVIARVRMWVNLNLWQKLKLSRDDAKPLLRLKGFPSFPLVERQANEVDWWDMVCNVKKLINEKKEDGKVFWQNLAGYKRQEALRPYLSSEEDRKKGKKFARYQLGDLLLHLEKKHGEDWGKVYDEAWERIDKKVEGLSKHIKLEEERRSEDAQSKAALTDWLRAKASFVIEGLKEADKDEFCRCELKLQKWYGDLRGKPFAIEAENSILDISGFSKQYNCAFIWQKDGVKKLNLYLIINYFKGGKLRFKKIKPEAFEANRFYTVINKKSGEIVPMEVNFNFDDPNLIILPLAFGKRQGREFIWNDLLSLETGSLKLANGRVIEKTLYNRRTRQDEPALFVALTFERREVLDSSNIKPMNLIGVDRGENIPAVIALTDPEGCPLSRFKDSLGNPTHILRIGESYKEKQRTIQAKKEVEQRRAGGYSRKYASKAKNLADDMVRNTARDLLYYAVTQDAMLIFENLSRGFGRQGKRTFMAERQYTRMEDWLTAKLAYEGLPSKTYLSKTLAQYTSKTCSNCGFTITSADYDRVLEKLKKTATGWMTTINGKELKVEGQITYYNRYKRQNVVKDLSVELDRLSEESVNNDISSWTKGRSGEALSLLKKRFSHRPVQEKFVCLNCGFETHADEQAALNIARSWLFLRSQEYKKYQTNKTTGKNTDKRAFVETWQSFYRKKLKEVWKPAV

SEQ ID NO: 35364 - protein, 979 aa, synthetic construct
  REGION 1..979: note = engineered CasX variant
QEIKRINKIRRRLVKDSNTKKAGKTGPMKTLLVRVMTPDLRERLENLRKKPENIPQPISNTSRANLNKLLTDYTEMKKAILHVYWEEFQKDPVGLMSRVAQPASKKIDQNKLKPEMDEKGNLTTAGFACSQCGQPLFVYKLEQVSEKGKAYTNYFGRCNVAEHEKLIKLSQLKPEKDSDEAVTYSLGKFGQRALDFYSIHVTKESTHPVKPLAQIAGNRYASGPVGKALSDACMGTIASFLSKYQDIIIEHQKVVKGNQKRLESLRELAGKENLEYPSVTLPPQPHTKEGVDAYNEVIARVRMWVNLNLWQKLKLSRDDAKPLLRLKGFPSFPLVERQANEVDWWDMVCNVKKLINEKKEDGKVFWQNLAGYKRQEALRPYLSSEEDRKKGKKFARYQLGDLLLHLEKKHGEDWGKVYDEAWERIDKKVEGLSKHIKLEEERRSEDAQSKAALTDWLRAKASFVIEGLKEADKDEFCRCELKLQKWYGDLRGKPFAIEAENSILDISGFSKQYNCAFIWQKDGVKKLNLYLIINYFKGGKLRFKKIKPEAFEANRFYTVINKKSGEIVPMEVNFNFDDPNLIILPLAFGKRQGREFIWNDLLSLETGSLKLANGRVIEKTLYNRRTRQDEPALFVALTFERREVLDSSNIKPMNLIGVDRGENIPAVIALTDPEGCPLSRFKDSLGNPTHILRIGESYKEKQRTIQAKKEVEQRRAGGYSRKYASKAKNLADDMVRNTARDLLYYAVTQDAMLIFENLSRGFGRQGKRTFMAERQYTRMEDWLTAKLAYEGLPSKTYLSKTLAQYTSKTCSNCGFTITSADYDRVLEKLKKTATGWMTTINGKELKVEGQITYYNRYKRQNVVKDLSVELDRLSEESVNNDISSWTKGRSGEALSLLKKRFSHRPVQEKFVCLNCGFETHADEQAALNIARSWLFLRSQEYKKYQTNKTTGKNTDKRAFVETWQSFYRKKLKEVWKPAV

SEQ ID NO: 35365 - protein, 978 aa, synthetic construct
  REGION 1..978: note = engineered CasX variant
QEIKRINKIRRRLVKDSNTKKAGKTGPMKTLLVRVMTPDLRERLENLRKKPENIPQPISNTSRANLNKLLTDYTEMKKAILHVYWEEFQKDPVGLMSRVAQPASKKIDQNKLKPEMDEKGNLTTAGFACSQCGQPLFVYKLEQVSEKGKAYTNYFGRCNVAEHEKLILLSQLKPEKDSDEAVTYSLGKFGQRALDFYSIHVTKESTHPVKPLAQIAGNRYASPVGKALSDACMGTIASFLSKYQDIIIEHQKVVKGNQKRLESLRELAGKENLEYPSVTLPPQPHTKEGVDAYNEVIARVRMWVNLNLWQKLKLSRDDAKPLLRLKGFPSFPLVERQANEVDWWDMVCNVKKLINEKKEDGKVFWQNLAGYKRQEALRPYLSSEEDRKKGKKFARYQLGDLLLHLEKKHGEDWGKVYDEAWERIDKKVEGLSKHIKLEEERRSEDAQSKAALTDWLRAKASFVIEGLKEADKDEFCRCELKLQKWYGDLRGKPFAIEAENSILDISGFSKQYNCAFIWQKDGVKKLNLYLIINYFKGGKLRFKKIKPEAFEANRFYTVINKKSGEIVPMEVNFNFDDPNLIILPLAFGKRQGREFIWNDLLSLETGSLKLANGRVIEKTLYNRRTRQDEPALFVALTFERREVLDSSNIKPMNLIGVDRGENIPAVIALTDPEGCPLSRFKDSLGNPTHILRIGESYKEKQRTIQAKKEVEQRRAGGYSRKYASKAKNLADDMVRNTARDLLYYAVTQDAMLIFENLSRGFGRQGKRTFMAERQYTRMEDWLTAKLAYEGLPSKTYLSKTLAQYTSKTCSNCGFTITSADYDRVLEKLKKTATGWMTTINGKELKVEGQITYYNRYKRQNVVKDLSVELDRLSEESVNNDISSWTKGRSGEALSLLKKRFSHRPVQEKFVCLNCGFETHADEQAALNIARSWLFLRSQEYKKYQTNKTTGKNTDKRAFVETWQSFYRKKLKEVWKPAV

SEQ ID NO: 35366 - protein, 978 aa, synthetic construct
  REGION 1..978: note = engineered CasX variant
QEIKRINKIRRRLVKDSNTKKAGKTGPMKTLLVRVMTPDLRERLENLRKKPENIPQPISNTSRANLNKLLTDYTEMKKAILHVYWEEFQKDPVGLMSRVAQPASKKIDQNKLKPEMDEKGNLTTAGFACSQCGQPLFVYKLEQVSEKGKAYTNYFGRCNVAEHEKLILLSQLKPEKDSDEAVTYSLGKFGQRALDFYSIHVTKESTHPVKPLAQIAGNRYASYPVGKALSDACMGTIASFLSKYQDIIIEHQKVVKGNQKRLESLRELAGKENLEYPSVTLPPQPHTKEGVDAYNEVIARVRMWVNLNLWQKLKLSRDDAKPLLRLKKFPSFPLVERQANEVDWWDMVCNVKKLINEKKEDGKVFWQNLAGYKRQEALRPYLSSEEDRKKGKKFARYQLGDLLLHLEKKHGEDWGKVYDEAWERIDKKVEGLSKHIKLEEERRSEDAQSKAALTDWLRAKASFVIEGLKEADKDEFCRCELKLQKWYGDLRGKPFAIEAENSILDISGFSKQYNCAFIWQKDGVKKLNLYLIINYFKGGKLRFKKIKPEAFEANRFYTVINKKSGEIVPMEVNFNFDDPNLIILPLAFGKRQGREFIWNDLLSLETGSLKLANGRVIEKTLYNRRTRQDEPALFVALTFERREVLDSSNIKPMNLIGVDRGENIPAVIALTDPEGCPLSRFKDSLGNPTHILRIGESYKEKQRTIQAKKEVEQRRAGGYSRKYASKAKNLADDMVRNTARDLLYYAVTQDAMLIFENLSRGFGRQGKRTFMAERQYTRMEDWLTAKLAYEGLPSKTYLSKTLAQYTSKTCSNCGFTITSADYDRVLEKLKKTATGWMTTINGKELKVEGQITYYNRYKRQNVVKDLSVELDRLSEESVNNDISSWTKGRSGEALSLLKKRFSHRPVQEKFVCLNCGFETHADEQAALNIARSWLFLRSQEYKKYQTNKTTGNTDKRAFVETWQSFYRKKLKEVWKPAV

SEQ ID NO: 35367 - protein, 978 aa, synthetic construct
  REGION 1..978: note = engineered CasX variant
QEIKRINKIRRRLVKDSNTKKAGKTGPMKTLLVRVMTPDLRERLENLRKKPENIPQPISNTSRANLNKLLTDYTEMKKAILHVYWEEFQKDPVGLMSRVAQPASKKIDQNKLKPEMDEKGNLTTAGFACSQCGQPLFVYKLEQVSEKGKAYTNYFGRCNVAEHEKLILLSQLKPEKDSDEAVTYSLGKFGQRALDFYSIHVTKESTHPVKPLAQIAGNRYASHPVGKALSDACMGTIASFLSKYQDIIIEHQKVVKGNQKRLESLRELAGKENLEYPSVTLPPQPHTKEGVDAYNEVIARVRMWVNLNLWQKLKLSRDDAKPLLRLKKFPSFPLVERQANEVDWWDMVCNVKKLINEKKEDGKVFWQNLAGYKRQEALRPYLSSEEDRKKGKKFARYQLGDLLLHLEKKHGEDWGKVYDEAWERIDKKVEGLSKHIKLEEERRSEDAQSKAALTDWLRAKASFVIEGLKEADKDEFCRCELKLQKWYGDLRGKPFAIEAENSILDISGFSKQYNCAFIWQKDGVKKLNLYLIINYFKGGKLRFKKIKPEAFEANRFYTVINKKSGEIVPMEVNFNFDDPNLIILPLAFGKRQGREFIWNDLLSLETGSLKLANGRVIEKTLYNRRTRQDEPALFVALTFERREVLDSSNIKPMNLIGVDRGENIPAVIALTDPEGCPLSRFKDSLGNPTHILRIGESYKEKQRTIQAKKEVEQRRAGGYSRKYASKAKNLADDMVRNTARDLLYYAVTQDAMLIFENLSRGFGRQGKRTFMAERQYTRMEDWLTAKLAYEGLPSKTYLSKTLAQYTSKTCSNCGFTITSADYDRVLEKLKKTATGWMTTINGKELKVEGQITYYNRYKRQNVVKDLSVELDRLSEESVNNDISSWTKGRSGEALSLLKKRFSHRPVQEKFVCLNCGFETHADEQAALNIARSWLFLRSQEYKKYQTNKTTGNTDKRAFVETWQSFYRKKLKEVWKPAV

SEQ ID NO: 35368 - protein, 978 aa, synthetic construct
  REGION 1..978: note = engineered CasX variant
QEIKRINKIRRRLVKDSNTKKAGKTGPMKTLLVRVMTPDLRERLENLRKKPENIPQPISNTSRANLNKLLTDYTEMKKAILHVYWEEFQKDPVGLMSRVAQPASKKIDQNKLKPEMDEKGNLTTAGFACSQCGQPLFVYKLEQVSEKGKAYTNYFGRCNVAEHEKLILLSQLKPEKDSDEAVTYSLGKFGQRALDFYSIHVTKESTHPVKPLAQIAGNRYASSPVGKALSDACMGTIASFLSKYQDIIIEHQKVVKGNQKRLESLRELAGKENLEYPSVTLPPQPHTKEGVDAYNEVIARVRMWVNLNLWQKLKLSRDDAKPLLRLKKFPSFPLVERQANEVDWWDMVCNVKKLINEKKEDGKVFWQNLAGYKRQEALRPYLSSEEDRKKGKKFARYQLGDLLLHLEKKHGEDWGKVYDEAWERIDKKVEGLSKHIKLEEERRSEDAQSKAALTDWLRAKASFVIEGLKEADKDEFCRCELKLQKWYGDLRGKPFAIEAENSILDISGFSKQYNCAFIWQKDGVKKLNLYLIINYFKGGKLRFKKIKPEAFEANRFYTVINKKSGEIVPMEVNFNFDDPNLIILPLAFGKRQGREFIWNDLLSLETGSLKLANGRVIEKTLYNRRTRQDEPALFVALTFERREVLDSSNIKPMNLIGVDRGENIPAVIALTDPEGCPLSRFKDSLGNPTHILRIGESYKEKQRTIQAKKEVEQRRAGGYSRKYASKAKNLADDMVRNTARDLLYYAVTQDAMLIFENLSRGFGRQGKRTFMAERQYTRMEDWLTAKLAYEGLPSKTYLSKTLAQYTSKTCSNCGFTITSADYDRVLEKLKKTATGWMTTINGKELKVEGQITYYNRYKRQNVVKDLSVELDRLSEESVNNDISSWTKGRSGEALSLLKKRFSHRPVQEKFVCLNCGFETHADEQAALNIARSWLFLRSQEYKKYQTNKTTGNTDKRAFVETWQSFYRKKLKEVWKPAV

SEQ ID NO: 35369 - protein, 978 aa, synthetic construct
  REGION 1..978: note = engineered CasX variant
QEIKRINKIRRRLVKDSNTKKAGKTGPMKTLLVRVMTPDLRERLENLRKKPENIPQPISNTSRANLNKLLTDYTEMKKAILHVYWEEFQKDPVGLMSRVAQPASKKIDQNKLKPEMDEKGNLTTAGFACSQCGQPLFVYKLEQVSEKGKAYTNYFGRCNVAEHEKLILLSQLKPEKDSDEAVTYSLGKFGQRALDFYSIHVTKESTHPVKPLAQIAGNRYASTPVGKALSDACMGTIASFLSKYQDIIIEHQKVVKGNQKRLESLRELAGKENLEYPSVTLPPQPHTKEGVDAYNEVIARVRMWVNLNLWQKLKLSRDDAKPLLRLKKFPSFPLVERQANEVDWWDMVCNVKKLINEKKEDGKVFWQNLAGYKRQEALRPYLSSEEDRKKGKKFARYQLGDLLLHLEKKHGEDWGKVYDEAWERIDKKVEGLSKHIKLEEERRSEDAQSKAALTDWLRAKASFVIEGLKEADKDEFCRCELKLQKWYGDLRGKPFAIEAENSILDISGFSKQYNCAFIWQKDGVKKLNLYLIINYFKGGKLRFKKIKPEAFEANRFYTVINKKSGEIVPMEVNFNFDDPNLIILPLAFGKRQGREFIWNDLLSLETGSLKLANGRVIEKTLYNRRTRQDEPALFVALTFERREVLDSSNIKPMNLIGVDRGENIPAVIALTDPEGCPLSRFKDSLGNPTHILRIGESYKEKQRTIQAKKEVEQRRAGGYSRKYASKAKNLADDMVRNTARDLLYYAVTQDAMLIFENLSRGFGRQGKRTFMAERQYTRMEDWLTAKLAYEGLPSKTYLSKTLAQYTSKTCSNCGFTITSADYDRVLEKLKKTATGWMTTINGKELKVEGQITYYNRYKRQNVVKDLSVELDRLSEESVNNDISSWTKGRSGEALSLLKKRFSHRPVQEKFVCLNCGFETHADEQAALNIARSWLFLRSQEYKKYQTNKTTGNTDKRAFVETWQSFYRKKLKEVWKPAV

SEQ ID NO: 35370 - protein, 978 aa, synthetic construct
  REGION 1..978: note = engineered CasX variant
QEIKRINKIRRRLVKDSNTKKAGKTGPMKTLLVRVMTPDLRERLENLRKKPENIPQPISNTSRANLNKLLTDYTEMKKAILHVYWEEFQKDPVGLMSRVAQPASKKIDQNKLKPEMDEKGNLTTAGFACSQCGQPLFVYKLEQVSEKGKAYTNYFGRCNVAEHEKLILLSQLKPEKDSDEAVTYSLGKFGQRALDFYSIHVTKESTHPVKPLAQIAGNRYASAPVGKALSDACMGTIASFLSKYQDIIIEHQKVVKGNQKRLESLRELAGKENLEYPSVTLPPQPHTKEGVDAYNEVIARVRMWVNLNLWQKLKLSRDDAKPLLRLKKFPSFPLVERQANEVDWWDMVCNVKKLINEKKEDGKVFWQNLAGYKRQEALRPYLSSEEDRKKGKKFARYQLGDLLLHLEKKHGEDWGKVYDEAWERIDKKVEGLSKHIKLEEERRSEDAQSKAALTDWLRAKASFVIEGLKEADKDEFCRCELKLQKWYGDLRGKPFAIEAENSILDISGFSKQYNCAFIWQKDGVKKLNLYLIINYFKGGKLRFKKIKPEAFEANRFYTVINKKSGEIVPMEVNFNFDDPNLIILPLAFGKRQGREFIWNDLLSLETGSLKLANGRVIEKTLYNRRTRQDEPALFVALTFERREVLDSSNIKPMNLIGVDRGENIPAVIALTDPEGCPLSRFKDSLGNPTHILRIGESYKEKQRTIQAKKEVEQRRAGGYSRKYASKAKNLADDMVRNTARDLLYYAVTQDAMLIFENLSRGFGRQGKRTFMAERQYTRMEDWLTAKLAYEGLPSKTYLSKTLAQYTSKTCSNCGFTITSADYDRVLEKLKKTATGWMTTINGKELKVEGQITYYNRYKRQNVVKDLSVELDRLSEESVNNDISSWTKGRSGEALSLLKKRFSHRPVQEKFVCLNCGFETHADEQAALNIARSWLFLRSQEYKKYQTNKTTGNTDKRAFVETWQSFYRKKLKEVWKPAV

SEQ ID NO: 35371 - protein, 978 aa, synthetic construct
  REGION 1..978: note = engineered CasX variant
QEIKRINKIRRRLVKDSNTKKAGKTGPMKTLLVRVMTPDLRERLENLRKKPENIPQPISNTSRANLNKLLTDYTEMKKAILHVYWEEFQKDPVGLMSRVAQPASKKIDQNKLKPEMDEKGNLTTAGFACSQCGQPLFVYKLEQVSEKGKAYTNYFGRCNVAEHEKLILLSQLKPEKDSDEAVTYSLGKFGQRALDFYSIHVTKESTHPVKPLAQIAGNRYASVPVGKALSDACMGTIASFLSKYQDIIIEHQKVVKGNQKRLESLRELAGKENLEYPSVTLPPQPHTKEGVDAYNEVIARVRMWVNLNLWQKLKLSRDDAKPLLRLKKFPSFPLVERQANEVDWWDMVCNVKKLINEKKEDGKVFWQNLAGYKRQEALRPYLSSEEDRKKGKKFARYQLGDLLLHLEKKHGEDWGKVYDEAWERIDKKVEGLSKHIKLEEERRSEDAQSKAALTDWLRAKASFVIEGLKEADKDEFCRCELKLQKWYGDLRGKPFAIEAENSILDISGFSKQYNCAFIWQKDGVKKLNLYLIINYFKGGKLRFKKIKPEAFEANRFYTVINKKSGEIVPMEVNFNFDDPNLIILPLAFGKRQGREFIWNDLLSLETGSLKLANGRVIEKTLYNRRTRQDEPALFVALTFERREVLDSSNIKPMNLIGVDRGENIPAVIALTDPEGCPLSRFKDSLGNPTHILRIGESYKEKQRTIQAKKEVEQRRAGGYSRKYASKAKNLADDMVRNTARDLLYYAVTQDAMLIFENLSRGFGRQGKRTFMAERQYTRMEDWLTAKLAYEGLPSKTYLSKTLAQYTSKTCSNCGFTITSADYDRVLEKLKKTATGWMTTINGKELKVEGQITYYNRYKRQNVVKDLSVELDRLSEESVNNDISSWTKGRSGEALSLLKKRFSHRPVQEKFVCLNCGFETHADEQAALNIARSWLFLRSQEYKKYQTNKTTGNTDKRAFVETWQSFYRKKLKEVWKPAV

SEQ ID NO: 35372 - protein, 978 aa, synthetic construct
  REGION 1..978: note = engineered CasX variant
QEIKRINKIRRRLVKDSNTKKAGKTGPMKTLLVRVMTPDLRERLENLRKKPENIPQPISNTSRANLNKLLTDYTEMKKAILHVYWEEFQKDPVGLMSRVAQPASKKIDQNKLKPEMDEKGNLTTAGFACSQCGQPLFVYKLEQVSEKGKAYTNYFGRCNVAEHEKLIKLSQLKPEKDSDEAVTYSLGKFGQRALDFYSIHVTKESTHPVKPLAQIAGNRYASGPVGKALSDACMGTIASFLSKYQDIIIEHQKVVKGNQKRLESLRELAGKENLEYPSVTLPPQPHTKEGVDAYNEVIARVRMWVNLNLWQKLKLSRDDAKPLLRLKKFPSFPLVERQANEVDWWDMVCNVKKLINEKKEDGKVFWQNLAGYKRQEALRPYLSSEEDRKKGKKFARYQLGDLLLHLEKKHGEDWGKVYDEAWERIDKKVEGLSKHIKLEEERRSEDAQSKAALTDWLRAKASFVIEGLKEADKDEFCRCELKLQKWYGDLRGKPFAIEAENSILDISGFSKQYNCAFIWQKDGVKKLNLYLIINYFKGGKLRFKKIKPEAFEANRFYTVINKKSGEIVPMEVNFNFDDPNLIILPLAFGKRQGREFIWNDLLSLETGSLKLANGRVIEKTLYNRRTRQDEPALFVALTFERREVLDSSNIKPMNLIGVDRGENIPAVIALTDPEGCPLSRFKDSLGNPTHILRIGESYKEKQRTIQAKKEVEQRRAGGYSRKYASKAKNLADDMVRNTARDLLYYAVTQDAMLIFENLSRGFGRQGKRTFMAERQYTRMEDWLTAKLAYEGLPSKTYLSKTLAQYTSKTCSNCGFTITSADYDRVLEKLKKTATGWMTTINGKELKVEGQITYYNRYKRQNVVKDLSVELDRLSEESVNNDISSWTKGRSGEALSLLKKRFSHRPVQEKFVCLNCGFETHADEQAALNIARSWLFLRSQEYKKYQTNKTTGNTDKRAFVETWQSFYRKKLKEVWKPAV

SEQ ID NO: 35373 - protein, 977 aa, synthetic construct
  REGION 1..977: note = engineered CasX variant
QEIKRINKIRRRLVKDSNTKKAGKTGPMKTLLVRVMTPDLRERLENLRKKPENIPQPISNTSRANLNKLLTDYTEMKKAILHVYWEEFQKDPVGLMSRVAQPASKKIDQNKLKPEMDEKGNLTTAGFACSQCGQPLFVYKLEQVSEKGKAYTNYFGRCNVAEHEKLILLSQLKPEKDSDEAVTYSLGKFGQRALDFYSIHVTKESTHPVKPLAQIAGNRYASPVGKALSDACMGTIASFLSKYQDIIIEHQKVVKGNQKRLESLRELAGKENLEYPSVTLPPQPHTKEGVDAYNEVIARVRMWVNLNLWQKLKLSRDDAKPLLRLKKFPSFPLVERQANEVDWWDMVCNVKKLINEKKEDGKVFWQNLAGYKRQEALRPYLSSEEDRKKGKKFARYQLGDLLLHLEKKHGEDWGKVYDEAWERIDKKVEGLSKHIKLEEERRSEDAQSKAALTDWLRAKASFVIEGLKEADKDEFCRCELKLQKWYGDLRGKPFAIEAENSILDISGFSKQYNCAFIWQKDGVKKLNLYLIINYFKGGKLRFKKIKPEAFEANRFYTVINKKSGEIVPMEVNFNFDDPNLIILPLAFGKRQGREFIWNDLLSLETGSLKLANGRVIEKTLYNRRTRQDEPALFVALTFERREVLDSSNIKPMNLIGVDRGENIPAVIALTDPEGCPLSRFKDSLGNPTHILRIGESYKEKQRTIQAKKEVEQRRAGGYSRKYASKAKNLADDMVRNTARDLLYYAVTQDAMLIFENLSRGFGRQGKRTFMAERQYTRMEDWLTAKLAYEGLPSKTYLSKTLAQYTSKTCSNCGFTITSADYDRVLEKLKKTATGWMTTINGKELKVEGQITYYNRYKRQNVVKDLSVELDRLSEESVNNDISSWTKGRSGEALSLLKKRFSHRPVQEKFVCLNCGFETHADEQAALNIARSWLFLRSQEYKKYQTNKTTGNTDKRAFVETWQSFYRKKLKEVWKPAV

SEQ ID NO: 35374 - protein, 978 aa, synthetic construct
  REGION 1..978: note = engineered CasX variant
QEIKRINKIRRRLVKDSNTKKAGKTGPMKTLLVRVMTPDLRERLENLRKKPENIPQPISNTSRANLNKLLTDYTEMKKAILHVYWEEFQKDPVGLMSRVAQPASKKIDQNKLKPEMDEKGNLTTAGFACSQCGQPLFVYKLEQVSEKGKAYTNYFGRCNVAEHEKLILLSQLKPEKDSDEAVTYSLGKFGQRALDFYSIHVTKESTHPVKPLAQIAGNRYASYPVGKALSDACMGTIASFLSKYQDIIIEHQKVVKGNQKRLESLRELAGKENLEYPSVTLPPQPHTKEGVDAYNEVIARVRMWVNLNLWQKLKLSRDDAKPLLRLKGFPSFPLVERQANEVDWWDMVCNVKKLINEKKEDGKVFWQNLAGYKRQEALRPYLSSEEDRKKGKKFARYQLGDLLLHLEKKHGEDWGKVYDEAWERIDKKVEGLSKHIKLEEERRSEDAQSKAALTDWLRAKASFVIEGLKEADKDEFCRCELKLQKWYGDLRGKPFAIEAENSILDISGFSKQYNCAFIWQKDGVKKLNLYLIINYFKGGKLRFKKIKPEAFEANRFYTVINKKSGEIVPMEVNFNFDDPNLIILPLAFGKRQGREFIWNDLLSLETGSLKLANGRVIEKTLYNRRTRQDEPALFVALTFERREVLDSSNIKPMNLIGVDRGENIPAVIALTDPEGCPLSRFKDSLGNPTHILRIGERYKEKQRTIQAKKEVEQRRAGGYSRKYASKAKNLADDMVRNTARDLLYYAVTQDAMLIFENLSRGFGRQGKRTFMAERQYTRMEDWLTAKLAYEGLPSKTYLSKTLAQYTSKTCSNCGFTITSADYDRVLEKLKKTATGWMTTINGKELKVEGQITYYNRYKRQNVVKDLSVELDRLSEESVNNDISSWTKGRSGEALSLLKKRFSHRPVQEKFVCLNCGFETHADEQAALNIARSWLFLRSQEYKKYQTNKTTGNTDKRAFVETWQSFYRKKLKEVWKPAV

SEQ ID NO: 35375 - protein, 978 aa, synthetic construct
  REGION 1..978: note = engineered CasX variant
QEIKRINKIRRRLVKDSNTKKAGKTGPMKTLLVRVMTPDLRERLENLRKKPENIPQPISNTSRANLNKLLTDYTEMKKAILHVYWEEFQKDPVGLMSRVAQPASKKIDQNKLKPEMDEKGNLTTAGFACSQCGQPLFVYKLEQVSEKGKAYTNYFGRCNVAEHEKLILLSQLKPEKDSDEAVTYSLGKFGQRALDFYSIHVTKESTHPVKPLAQIAGNRYASHPVGKALSDACMGTIASFLSKYQDIIIEHQKVVKGNQKRLESLRELAGKENLEYPSVTLPPQPHTKEGVDAYNEVIARVRMWVNLNLWQKLKLSRDDAKPLLRLKGFPSFPLVERQANEVDWWDMVCNVKKLINEKKEDGKVFWQNLAGYKRQEALRPYLSSEEDRKKGKKFARYQLGDLLLHLEKKHGEDWGKVYDEAWERIDKKVEGLSKHIKLEEERRSEDAQSKAALTDWLRAKASFVIEGLKEADKDEFCRCELKLQKWYGDLRGKPFAIEAENSILDISGFSKQYNCAFIWQKDGVKKLNLYLIINYFKGGKLRFKKIKPEAFEANRFYTVINKKSGEIVPMEVNFNFDDPNLIILPLAFGKRQGREFIWNDLLSLETGSLKLANGRVIEKTLYNRRTRQDEPALFVALTFERREVLDSSNIKPMNLIGVDRGENIPAVIALTDPEGCPLSRFKDSLGNPTHILRIGERYKEKQRTIQAKKEVEQRRAGGYSRKYASKAKNLADDMVRNTARDLLYYAVTQDAMLIFENLSRGFGRQGKRTFMAERQYTRMEDWLTAKLAYEGLPSKTYLSKTLAQYTSKTCSNCGFTITSADYDRVLEKLKKTATGWMTTINGKELKVEGQITYYNRYKRQNVVKDLSVELDRLSEESVNNDISSWTKGRSGEALSLLKKRFSHRPVQEKFVCLNCGFETHADEQAALNIARSWLFLRSQEYKKYQTNKTTGNTDKRAFVETWQSFYRKKLKEVWKPAV

SEQ ID NO: 35376 - protein, 978 aa, synthetic construct
  REGION 1..978: note = engineered CasX variant
QEIKRINKIRRRLVKDSNTKKAGKTGPMKTLLVRVMTPDLRERLENLRKKPENIPQPISNTSRANLNKLLTDYTEMKKAILHVYWEEFQKDPVGLMSRVAQPASKKIDQNKLKPEMDEKGNLTTAGFACSQCGQPLFVYKLEQVSEKGKAYTNYFGRCNVAEHEKLILLSQLKPEKDSDEAVTYSLGKFGQRALDFYSIHVTKESTHPVKPLAQIAGNRYASSPVGKALSDACMGTIASFLSKYQDIIIEHQKVVKGNQKRLESLRELAGKENLEYPSVTLPPQPHTKEGVDAYNEVIARVRMWVNLNLWQKLKLSRDDAKPLLRLKGFPSFPLVERQANEVDWWDMVCNVKKLINEKKEDGKVFWQNLAGYKRQEALRPYLSSEEDRKKGKKFARYQLGDLLLHLEKKHGEDWGKVYDEAWERIDKKVEGLSKHIKLEEERRSEDAQSKAALTDWLRAKASFVIEGLKEADKDEFCRCELKLQKWYGDLRGKPFAIEAENSILDISGFSKQYNCAFIWQKDGVKKLNLYLIINYFKGGKLRFKKIKPEAFEANRFYTVINKKSGEIVPMEVNFNFDDPNLIILPLAFGKRQGREFIWNDLLSLETGSLKLANGRVIEKTLYNRRTRQDEPALFVALTFERREVLDSSNIKPMNLIGVDRGENIPAVIALTDPEGCPLSRFKDSLGNPTHILRIGERYKEKQRTIQAKKEVEQRRAGGYSRKYASKAKNLADDMVRNTARDLLYYAVTQDAMLIFENLSRGFGRQGKRTFMAERQYTRMEDWLTAKLAYEGLPSKTYLSKTLAQYTSKTCSNCGFTITSADYDRVLEKLKKTATGWMTTINGKELKVEGQITYYNRYKRQNVVKDLSVELDRLSEESVNNDISSWTKGRSGEALSLLKKRFSHRPVQEKFVCLNCGFETHADEQAALNIARSWLFLRSQEYKKYQTNKTTGNTDKRAFVETWQSFYRKKLKEVWKPAV

SEQ ID NO: 35377 - protein, 978 aa, synthetic construct
  REGION 1..978: note = engineered CasX variant
QEIKRINKIRRRLVKDSNTKKAGKTGPMKTLLVRVMTPDLRERLENLRKKPENIPQPISNTSRANLNKLLTDYTEMKKAILHVYWEEFQKDPVGLMSRVAQPASKKIDQNKLKPEMDEKGNLTTAGFACSQCGQPLFVYKLEQVSEKGKAYTNYFGRCNVAEHEKLILLSQLKPEKDSDEAVTYSLGKFGQRALDFYSIHVTKESTHPVKPLAQIAGNRYASTPVGKALSDACMGTIASFLSKYQDIIIEHQKVVKGNQKRLESLRELAGKENLEYPSVTLPPQPHTKEGVDAYNEVIARVRMWVNLNLWQKLKLSRDDAKPLLRLKGFPSFPLVERQANEVDWWDMVCNVKKLINEKKEDGKVFWQNLAGYKRQEALRPYLSSEEDRKKGKKFARYQLGDLLLHLEKKHGEDWGKVYDEAWERIDKKVEGLSKHIKLEEERRSEDAQSKAALTDWLRAKASFVIEGLKEADKDEFCRCELKLQKWYGDLRGKPFAIEAENSILDISGFSKQYNCAFIWQKDGVKKLNLYLIINYFKGGKLRFKKIKPEAFEANRFYTVINKKSGEIVPMEVNFNFDDPNLIILPLAFGKRQGREFIWNDLLSLETGSLKLANGRVIEKTLYNRRTRQDEPALFVALTFERREVLDSSNIKPMNLIGVDRGENIPAVIALTDPEGCPLSRFKDSLGNPTHILRIGERYKEKQRTIQAKKEVEQRRAGGYSRKYASKAKNLADDMVRNTARDLLYYAVTQDAMLIFENLSRGFGRQGKRTFMAERQYTRMEDWLTAKLAYEGLPSKTYLSKTLAQYTSKTCSNCGFTITSADYDRVLEKLKKTATGWMTTINGKELKVEGQITYYNRYKRQNVVKDLSVELDRLSEESVNNDISSWTKGRSGEALSLLKKRFSHRPVQEKFVCLNCGFETHADEQAALNIARSWLFLRSQEYKKYQTNKTTGNTDKRAFVETWQSFYRKKLKEVWKPAV

SEQ ID NO: 35378 - protein, 978 aa, synthetic construct
  REGION 1..978: note = engineered CasX variant
QEIKRINKIRRRLVKDSNTKKAGKTGPMKTLLVRVMTPDLRERLENLRKKPENIPQPISNTSRANLNKLLTDYTEMKKAILHVYWEEFQKDPVGLMSRVAQPASKKIDQNKLKPEMDEKGNLTTAGFACSQCGQPLFVYKLEQVSEKGKAYTNYFGRCNVAEHEKLILLSQLKPEKDSDEAVTYSLGKFGQRALDFYSIHVTKESTHPVKPLAQIAGNRYASAPVGKALSDACMGTIASFLSKYQDIIIEHQKVVKGNQKRLESLRELAGKENLEYPSVTLPPQPHTKEGVDAYNEVIARVRMWVNLNLWQKLKLSRDDAKPLLRLKGFPSFPLVERQANEVDWWDMVCNVKKLINEKKEDGKVFWQNLAGYKRQEALRPYLSSEEDRKKGKKFARYQLGDLLLHLEKKHGEDWGKVYDEAWERIDKKVEGLSKHIKLEEERRSEDAQSKAALTDWLRAKASFVIEGLKEADKDEFCRCELKLQKWYGDLRGKPFAIEAENSILDISGFSKQYNCAFIWQKDGVKKLNLYLIINYFKGGKLRFKKIKPEAFEANRFYTVINKKSGEIVPMEVNFNFDDPNLIILPLAFGKRQGREFIWNDLLSLETGSLKLANGRVIEKTLYNRRTRQDEPALFVALTFERREVLDSSNIKPMNLIGVDRGENIPAVIALTDPEGCPLSRFKDSLGNPTHILRIGERYKEKQRTIQAKKEVEQRRAGGYSRKYASKAKNLADDMVRNTARDLLYYAVTQDAMLIFENLSRGFGRQGKRTFMAERQYTRMEDWLTAKLAYEGLPSKTYLSKTLAQYTSKTCSNCGFTITSADYDRVLEKLKKTATGWMTTINGKELKVEGQITYYNRYKRQNVVKDLSVELDRLSEESVNNDISSWTKGRSGEALSLLKKRFSHRPVQEKFVCLNCGFETHADEQAALNIARSWLFLRSQEYKKYQTNKTTGNTDKRAFVETWQSFYRKKLKEVWKPAV

SEQ ID NO: 35379 - protein, 978 aa, synthetic construct
  REGION 1..978: note = engineered CasX variant
QEIKRINKIRRRLVKDSNTKKAGKTGPMKTLLVRVMTPDLRERLENLRKKPENIPQPISNTSRANLNKLLTDYTEMKKAILHVYWEEFQKDPVGLMSRVAQPASKKIDQNKLKPEMDEKGNLTTAGFACSQCGQPLFVYKLEQVSEKGKAYTNYFGRCNVAEHEKLILLSQLKPEKDSDEAVTYSLGKFGQRALDFYSIHVTKESTHPVKPLAQIAGNRYASVPVGKALSDACMGTIASFLSKYQDIIIEHQKVVKGNQKRLESLRELAGKENLEYPSVTLPPQPHTKEGVDAYNEVIARVRMWVNLNLWQKLKLSRDDAKPLLRLKGFPSFPLVERQANEVDWWDMVCNVKKLINEKKEDGKVFWQNLAGYKRQEALRPYLSSEEDRKKGKKFARYQLGDLLLHLEKKHGEDWGKVYDEAWERIDKKVEGLSKHIKLEEERRSEDAQSKAALTDWLRAKASFVIEGLKEADKDEFCRCELKLQKWYGDLRGKPFAIEAENSILDISGFSKQYNCAFIWQKDGVKKLNLYLIINYFKGGKLRFKKIKPEAFEANRFYTVINKKSGEIVPMEVNFNFDDPNLIILPLAFGKRQGREFIWNDLLSLETGSLKLANGRVIEKTLYNRRTRQDEPALFVALTFERREVLDSSNIKPMNLIGVDRGENIPAVIALTDPEGCPLSRFKDSLGNPTHILRIGERYKEKQRTIQAKKEVEQRRAGGYSRKYASKAKNLADDMVRNTARDLLYYAVTQDAMLIFENLSRGFGRQGKRTFMAERQYTRMEDWLTAKLAYEGLPSKTYLSKTLAQYTSKTCSNCGFTITSADYDRVLEKLKKTATGWMTTINGKELKVEGQITYYNRYKRQNVVKDLSVELDRLSEESVNNDISSWTKGRSGEALSLLKKRFSHRPVQEKFVCLNCGFETHADEQAALNIARSWLFLRSQEYKKYQTNKTTGNTDKRAFVETWQSFYRKKLKEVWKPAV

SEQ ID NO: 35380 - protein, 978 aa, synthetic construct
  REGION 1..978: note = engineered CasX variant
QEIKRINKIRRRLVKDSNTKKAGKTGPMKTLLVRVMTPDLRERLENLRKKPENIPQPISNTSRANLNKLLTDYTEMKKAILHVYWEEFQKDPVGLMSRVAQPASKKIDQNKLKPEMDEKGNLTTAGFACSQCGQPLFVYKLEQVSEKGKAYTNYFGRCNVAEHEKLIKLSQLKPEKDSDEAVTYSLGKFGQRALDFYSIHVTKESTHPVKPLAQIAGNRYASGPVGKALSDACMGTIASFLSKYQDIIIEHQKVVKGNQKRLESLRELAGKENLEYPSVTLPPQPHTKEGVDAYNEVIARVRMWVNLNLWQKLKLSRDDAKPLLRLKGFPSFPLVERQANEVDWWDMVCNVKKLINEKKEDGKVFWQNLAGYKRQEALRPYLSSEEDRKKGKKFARYQLGDLLLHLEKKHGEDWGKVYDEAWERIDKKVEGLSKHIKLEEERRSEDAQSKAALTDWLRAKASFVIEGLKEADKDEFCRCELKLQKWYGDLRGKPFAIEAENSILDISGFSKQYNCAFIWQKDGVKKLNLYLIINYFKGGKLRFKKIKPEAFEANRFYTVINKKSGEIVPMEVNFNFDDPNLIILPLAFGKRQGREFIWNDLLSLETGSLKLANGRVIEKTLYNRRTRQDEPALFVALTFERREVLDSSNIKPMNLIGVDRGENIPAVIALTDPEGCPLSRFKDSLGNPTHILRIGERYKEKQRTIQAKKEVEQRRAGGYSRKYASKAKNLADDMVRNTARDLLYYAVTQDAMLIFENLSRGFGRQGKRTFMAERQYTRMEDWLTAKLAYEGLPSKTYLSKTLAQYTSKTCSNCGFTITSADYDRVLEKLKKTATGWMTTINGKELKVEGQITYYNRYKRQNVVKDLSVELDRLSEESVNNDISSWTKGRSGEALSLLKKRFSHRPVQEKFVCLNCGFETHADEQAALNIARSWLFLRSQEYKKYQTNKTTGNTDKRAFVETWQSFYRKKLKEVWKPAV

SEQ ID NO: 35381 - protein, 977 aa, synthetic construct
  REGION 1..977: note = engineered CasX variant
QEIKRINKIRRRLVKDSNTKKAGKTGPMKTLLVRVMTPDLRERLENLRKKPENIPQPISNTSRANLNKLLTDYTEMKKAILHVYWEEFQKDPVGLMSRVAQPASKKIDQNKLKPEMDEKGNLTTAGFACSQCGQPLFVYKLEQVSEKGKAYTNYFGRCNVAEHEKLILLSQLKPEKDSDEAVTYSLGKFGQRALDFYSIHVTKESTHPVKPLAQIAGNRYASPVGKALSDACMGTIASFLSKYQDIIIEHQKVVKGNQKRLESLRELAGKENLEYPSVTLPPQPHTKEGVDAYNEVIARVRMWVNLNLWQKLKLSRDDAKPLLRLKGFPSFPLVERQANEVDWWDMVCNVKKLINEKKEDGKVFWQNLAGYKRQEALRPYLSSEEDRKKGKKFARYQLGDLLLHLEKKHGEDWGKVYDEAWERIDKKVEGLSKHIKLEEERRSEDAQSKAALTDWLRAKASFVIEGLKEADKDEFCRCELKLQKWYGDLRGKPFAIEAENSILDISGFSKQYNCAFIWQKDGVKKLNLYLIINYFKGGKLRFKKIKPEAFEANRFYTVINKKSGEIVPMEVNFNFDDPNLIILPLAFGKRQGREFIWNDLLSLETGSLKLANGRVIEKTLYNRRTRQDEPALFVALTFERREVLDSSNIKPMNLIGVDRGENIPAVIALTDPEGCPLSRFKDSLGNPTHILRIGERYKEKQRTIQAKKEVEQRRAGGYSRKYASKAKNLADDMVRNTARDLLYYAVTQDAMLIFENLSRGFGRQGKRTFMAERQYTRMEDWLTAKLAYEGLPSKTYLSKTLAQYTSKTCSNCGFTITSADYDRVLEKLKKTATGWMTTINGKELKVEGQITYYNRYKRQNVVKDLSVELDRLSEESVNNDISSWTKGRSGEALSLLKKRFSHRPVQEKFVCLNCGFETHADEQAALNIARSWLFLRSQEYKKYQTNKTTGNTDKRAFVETWQSFYRKKLKEVWKPAV

SEQ ID NO: 35382 - protein, 978 aa, synthetic construct
  REGION 1..978: note = engineered CasX variant
QEIKRINKIRRRLVKDSNTKKAGKTGPMKTLLVRVMTPDLRERLENLRKKPENIPQPISNTSRANLNKLLTDYTEMKKAILHVYWEEFQKDPVGLMSRVAQPASKKIDQNKLKPEMDEKGNLTTAGFACSQCGQPLFVYKLEQVSEKGKAYTNYFGRCNVAEHEKLILLSQLKPEKDSDEAVTYSLGKFGQRALDFYSIHVTKESTHPVKPLAQIAGNRYASYPVGKALSDACMGTIASFLSKYQDIIIEHQKVVKGNQKRLESLRELAGKENLEYPSVTLPPQPHTKEGVDAYNEVIARVRMWVNLNLWQKLKLSRDDAKPLLRLKGFPSFPLVERQANEVDWWDMVCNVKKLINEKKEDGKVFWQNLAGYKRQEALRPYLSSEEDRKKGKKFARYQLGDLLLHLEKKHGEDWGKVYDEAWERIDKKVEGLSKHIKLEEERRSEDAQSKAALTDWLRAKASFVIEGLKEADKDEFCRCELKLQKWYGDLRGKPFAIEAENSILDISGFSKQYNCAFIWQKDGVKKLNLYLIINYFKGGKLRFKKIKPEAFEANRFYTVINKKSGEIVPMEVNFNFDDPNLIILPLAFGKRQGREFIWNDLLSLETGSLQLANGRVIEKTLYNRRTRQDEPALFVALTFERREVLDSSNIKPMNLIGVDRGENIPAVIALTDPEGCPLSRFKDSLGNPTHILRIGESYKEKQRTIQAKKEVEQRRAGGYSRKYASKAKNLADDMVRNTARDLLYYAVTQDAMLIFENLSRGFGRQGKRTFMAERQYTRMEDWLTAKLAYEGLPSKTYLSKTLAQYTSKTCSNCGFTITSADYDRVLEKLKKTATGWMTTINGKELKVEGQITYYNRYKRQNVVKDLSVELDRLSEESVNNDISSWTKGRSGEALSLLKKRFSHRPVQEKFVCLNCGFETHADEQAALNIARSWLFLRSQEYKKYQTNKTTGNTDKRAFVETWQSFYRKKLKEVWKPAV

SEQ ID NO: 35383 - protein, 978 aa, synthetic construct
  REGION 1..978: note = engineered CasX variant
QEIKRINKIRRRLVKDSNTKKAGKTGPMKTLLVRVMTPDLRERLENLRKKPENIPQPISNTSRANLNKLLTDYTEMKKAILHVYWEEFQKDPVGLMSRVAQPASKKIDQNKLKPEMDEKGNLTTAGFACSQCGQPLFVYKLEQVSEKGKAYTNYFGRCNVAEHEKLILLSQLKPEKDSDEAVTYSLGKFGQRALDFYSIHVTKESTHPVKPLAQIAGNRYASHPVGKALSDACMGTIASFLSKYQDIIIEHQKVVKGNQKRLESLRELAGKENLEYPSVTLPPQPHTKEGVDAYNEVIARVRMWVNLNLWQKLKLSRDDAKPLLRLKGFPSFPLVERQANEVDWWDMVCNVKKLINEKKEDGKVFWQNLAGYKRQEALRPYLSSEEDRKKGKKFARYQLGDLLLHLEKKHGEDWGKVYDEAWERIDKKVEGLSKHIKLEEERRSEDAQSKAALTDWLRAKASFVIEGLKEADKDEFCRCELKLQKWYGDLRGKPFAIEAENSILDISGFSKQYNCAFIWQKDGVKKLNLYLIINYFKGGKLRFKKIKPEAFEANRFYTVINKKSGEIVPMEVNFNFDDPNLIILPLAFGKRQGREFIWNDLLSLETGSLQLANGRVIEKTLYNRRTRQDEPALFVALTFERREVLDSSNIKPMNLIGVDRGENIPAVIALTDPEGCPLSRFKDSLGNPTHILRIGESYKEKQRTIQAKKEVEQRRAGGYSRKYASKAKNLADDMVRNTARDLLYYAVTQDAMLIFENLSRGFGRQGKRTFMAERQYTRMEDWLTAKLAYEGLPSKTYLSKTLAQYTSKTCSNCGFTITSADYDRVLEKLKKTATGWMTTINGKELKVEGQITYYNRYKRQNVVKDLSVELDRLSEESVNNDISSWTKGRSGEALSLLKKRFSHRPVQEKFVCLNCGFETHADEQAALNIARSWLFLRSQEYKKYQTNKTTGNTDKRAFVETWQSFYRKKLKEVWKPAV

SEQ ID NO: 35384 - protein, 978 aa, synthetic construct
  REGION 1..978: note = engineered CasX variant
QEIKRINKIRRRLVKDSNTKKAGKTGPMKTLLVRVMTPDLRERLENLRKKPENIPQPISNTSRANLNKLLTDYTEMKKAILHVYWEEFQKDPVGLMSRVAQPASKKIDQNKLKPEMDEKGNLTTAGFACSQCGQPLFVYKLEQVSEKGKAYTNYFGRCNVAEHEKLILLSQLKPEKDSDEAVTYSLGKFGQRALDFYSIHVTKESTHPVKPLAQIAGNRYASSPVGKALSDACMGTIASFLSKYQDIIIEHQKVVKGNQKRLESLRELAGKENLEYPSVTLPPQPHTKEGVDAYNEVIARVRMWVNLNLWQKLKLSRDDAKPLLRLKGFPSFPLVERQANEVDWWDMVCNVKKLINEKKEDGKVFWQNLAGYKRQEALRPYLSSEEDRKKGKKFARYQLGDLLLHLEKKHGEDWGKVYDEAWERIDKKVEGLSKHIKLEEERRSEDAQSKAALTDWLRAKASFVIEGLKEADKDEFCRCELKLQKWYGDLRGKPFAIEAENSILDISGFSKQYNCAFIWQKDGVKKLNLYLIINYFKGGKLRFKKIKPEAFEANRFYTVINKKSGEIVPMEVNFNFDDPNLIILPLAFGKRQGREFIWNDLLSLETGSLQLANGRVIEKTLYNRRTRQDEPALFVALTFERREVLDSSNIKPMNLIGVDRGENIPAVIALTDPEGCPLSRFKDSLGNPTHILRIGESYKEKQRTIQAKKEVEQRRAGGYSRKYASKAKNLADDMVRNTARDLLYYAVTQDAMLIFENLSRGFGRQGKRTFMAERQYTRMEDWLTAKLAYEGLPSKTYLSKTLAQYTSKTCSNCGFTITSADYDRVLEKLKKTATGWMTTINGKELKVEGQITYYNRYKRQNVVKDLSVELDRLSEESVNNDISSWTKGRSGEALSLLKKRFSHRPVQEKFVCLNCGFETHADEQAALNIARSWLFLRSQEYKKYQTNKTTGNTDKRAFVETWQSFYRKKLKEVWKPAV

SEQ ID NO: 35385 - protein, 978 aa, synthetic construct
  REGION 1..978: note = engineered CasX variant
QEIKRINKIRRRLVKDSNTKKAGKTGPMKTLLVRVMTPDLRERLENLRKKPENIPQPISNTSRANLNKLLTDYTEMKKAILHVYWEEFQKDPVGLMSRVAQPASKKIDQNKLKPEMDEKGNLTTAGFACSQCGQPLFVYKLEQVSEKGKAYTNYFGRCNVAEHEKLILLSQLKPEKDSDEAVTYSLGKFGQRALDFYSIHVTKESTHPVKPLAQIAGNRYASTPVGKALSDACMGTIASFLSKYQDIIIEHQKVVKGNQKRLESLRELAGKENLEYPSVTLPPQPHTKEGVDAYNEVIARVRMWVNLNLWQKLKLSRDDAKPLLRLKGFPSFPLVERQANEVDWWDMVCNVKKLINEKKEDGKVFWQNLAGYKRQEALRPYLSSEEDRKKGKKFARYQLGDLLLHLEKKHGEDWGKVYDEAWERIDKKVEGLSKHIKLEEERRSEDAQSKAALTDWLRAKASFVIEGLKEADKDEFCRCELKLQKWYGDLRGKPFAIEAENSILDISGFSKQYNCAFIWQKDGVKKLNLYLIINYFKGGKLRFKKIKPEAFEANRFYTVINKKSGEIVPMEVNFNFDDPNLIILPLAFGKRQGREFIWNDLLSLETGSLQLANGRVIEKTLYNRRTRQDEPALFVALTFERREVLDSSNIKPMNLIGVDRGENIPAVIALTDPEGCPLSRFKDSLGNPTHILRIGESYKEKQRTIQAKKEVEQRRAGGYSRKYASKAKNLADDMVRNTARDLLYYAVTQDAMLIFENLSRGFGRQGKRTFMAERQYTRMEDWLTAKLAYEGLPSKTYLSKTLAQYTSKTCSNCGFTITSADYDRVLEKLKKTATGWMTTINGKELKVEGQITYYNRYKRQNVVKDLSVELDRLSEESVNNDISSWTKGRSGEALSLLKKRFSHRPVQEKFVCLNCGFETHADEQAALNIARSWLFLRSQEYKKYQTNKTTGNTDKRAFVETWQSFYRKKLKEVWKPAV

SEQ ID NO: 35386 - protein, 978 aa, synthetic construct
  REGION 1..978: note = engineered CasX variant
QEIKRINKIRRRLVKDSNTKKAGKTGPMKTLLVRVMTPDLRERLENLRKKPENIPQPISNTSRANLNKLLTDYTEMKKAILHVYWEEFQKDPVGLMSRVAQPASKKIDQNKLKPEMDEKGNLTTAGFACSQCGQPLFVYKLEQVSEKGKAYTNYFGRCNVAEHEKLILLSQLKPEKDSDEAVTYSLGKFGQRALDFYSIHVTKESTHPVKPLAQIAGNRYASAPVGKALSDACMGTIASFLSKYQDIIIEHQKVVKGNQKRLESLRELAGKENLEYPSVTLPPQPHTKEGVDAYNEVIARVRMWVNLNLWQKLKLSRDDAKPLLRLKGFPSFPLVERQANEVDWWDMVCNVKKLINEKKEDGKVFWQNLAGYKRQEALRPYLSSEEDRKKGKKFARYQLGDLLLHLEKKHGEDWGKVYDEAWERIDKKVEGLSKHIKLEEERRSEDAQSKAALTDWLRAKASFVIEGLKEADKDEFCRCELKLQKWYGDLRGKPFAIEAENSILDISGFSKQYNCAFIWQKDGVKKLNLYLIINYFKGGKLRFKKIKPEAFEANRFYTVINKKSGEIVPMEVNFNFDDPNLIILPLAFGKRQGREFIWNDLLSLETGSLQLANGRVIEKTLYNRRTRQDEPALFVALTFERREVLDSSNIKPMNLIGVDRGENIPAVIALTDPEGCPLSRFKDSLGNPTHILRIGESYKEKQRTIQAKKEVEQRRAGGYSRKYASKAKNLADDMVRNTARDLLYYAVTQDAMLIFENLSRGFGRQGKRTFMAERQYTRMEDWLTAKLAYEGLPSKTYLSKTLAQYTSKTCSNCGFTITSADYDRVLEKLKKTATGWMTTINGKELKVEGQITYYNRYKRQNVVKDLSVELDRLSEESVNNDISSWTKGRSGEALSLLKKRFSHRPVQEKFVCLNCGFETHADEQAALNIARSWLFLRSQEYKKYQTNKTTGNTDKRAFVETWQSFYRKKLKEVWKPAV

SEQ ID NO: 35387 - protein, 978 aa, synthetic construct
  REGION 1..978: note = engineered CasX variant
QEIKRINKIRRRLVKDSNTKKAGKTGPMKTLLVRVMTPDLRERLENLRKKPENIPQPISNTSRANLNKLLTDYTEMKKAILHVYWEEFQKDPVGLMSRVAQPASKKIDQNKLKPEMDEKGNLTTAGFACSQCGQPLFVYKLEQVSEKGKAYTNYFGRCNVAEHEKLILLSQLKPEKDSDEAVTYSLGKFGQRALDFYSIHVTKESTHPVKPLAQIAGNRYASVPVGKALSDACMGTIASFLSKYQDIIIEHQKVVKGNQKRLESLRELAGKENLEYPSVTLPPQPHTKEGVDAYNEVIARVRMWVNLNLWQKLKLSRDDAKPLLRLKGFPSFPLVERQANEVDWWDMVCNVKKLINEKKEDGKVFWQNLAGYKRQEALRPYLSSEEDRKKGKKFARYQLGDLLLHLEKKHGEDWGKVYDEAWERIDKKVEGLSKHIKLEEERRSEDAQSKAALTDWLRAKASFVIEGLKEADKDEFCRCELKLQKWYGDLRGKPFAIEAENSILDISGFSKQYNCAFIWQKDGVKKLNLYLIINYFKGGKLRFKKIKPEAFEANRFYTVINKKSGEIVPMEVNFNFDDPNLIILPLAFGKRQGREFIWNDLLSLETGSLQLANGRVIEKTLYNRRTRQDEPALFVALTFERREVLDSSNIKPMNLIGVDRGENIPAVIALTDPEGCPLSRFKDSLGNPTHILRIGESYKEKQRTIQAKKEVEQRRAGGYSRKYASKAKNLADDMVRNTARDLLYYAVTQDAMLIFENLSRGFGRQGKRTFMAERQYTRMEDWLTAKLAYEGLPSKTYLSKTLAQYTSKTCSNCGFTITSADYDRVLEKLKKTATGWMTTINGKELKVEGQITYYNRYKRQNVVKDLSVELDRLSEESVNNDISSWTKGRSGEALSLLKKRFSHRPVQEKFVCLNCGFETHADEQAALNIARSWLFLRSQEYKKYQTNKTTGNTDKRAFVETWQSFYRKKLKEVWKPAV

SEQ ID NO: 35388 - protein, 978 aa, synthetic construct
  REGION 1..978: note = engineered CasX variant
QEIKRINKIRRRLVKDSNTKKAGKTGPMKTLLVRVMTPDLRERLENLRKKPENIPQPISNTSRANLNKLLTDYTEMKKAILHVYWEEFQKDPVGLMSRVAQPASKKIDQNKLKPEMDEKGNLTTAGFACSQCGQPLFVYKLEQVSEKGKAYTNYFGRCNVAEHEKLIKLSQLKPEKDSDEAVTYSLGKFGQRALDFYSIHVTKESTHPVKPLAQIAGNRYASGPVGKALSDACMGTIASFLSKYQDIIIEHQKVVKGNQKRLESLRELAGKENLEYPSVTLPPQPHTKEGVDAYNEVIARVRMWVNLNLWQKLKLSRDDAKPLLRLKGFPSFPLVERQANEVDWWDMVCNVKKLINEKKEDGKVFWQNLAGYKRQEALRPYLSSEEDRKKGKKFARYQLGDLLLHLEKKHGEDWGKVYDEAWERIDKKVEGLSKHIKLEEERRSEDAQSKAALTDWLRAKASFVIEGLKEADKDEFCRCELKLQKWYGDLRGKPFAIEAENSILDISGFSKQYNCAFIWQKDGVKKLNLYLIINYFKGGKLRFKKIKPEAFEANRFYTVINKKSGEIVPMEVNFNFDDPNLIILPLAFGKRQGREFIWNDLLSLETGSLQLANGRVIEKTLYNRRTRQDEPALFVALTFERREVLDSSNIKPMNLIGVDRGENIPAVIALTDPEGCPLSRFKDSLGNPTHILRIGESYKEKQRTIQAKKEVEQRRAGGYSRKYASKAKNLADDMVRNTARDLLYYAVTQDAMLIFENLSRGFGRQGKRTFMAERQYTRMEDWLTAKLAYEGLPSKTYLSKTLAQYTSKTCSNCGFTITSADYDRVLEKLKKTATGWMTTINGKELKVEGQITYYNRYKRQNVVKDLSVELDRLSEESVNNDISSWTKGRSGEALSLLKKRFSHRPVQEKFVCLNCGFETHADEQAALNIARSWLFLRSQEYKKYQTNKTTGNTDKRAFVETWQSFYRKKLKEVWKPAV

SEQ ID NO: 35389 - protein, 977 aa, synthetic construct
  REGION 1..977: note = engineered CasX variant
QEIKRINKIRRRLVKDSNTKKAGKTGPMKTLLVRVMTPDLRERLENLRKKPENIPQPISNTSRANLNKLLTDYTEMKKAILHVYWEEFQKDPVGLMSRVAQPASKKIDQNKLKPEMDEKGNLTTAGFACSQCGQPLFVYKLEQVSEKGKAYTNYFGRCNVAEHEKLILLSQLKPEKDSDEAVTYSLGKFGQRALDFYSIHVTKESTHPVKPLAQIAGNRYASPVGKALSDACMGTIASFLSKYQDIIIEHQKVVKGNQKRLESLRELAGKENLEYPSVTLPPQPHTKEGVDAYNEVIARVRMWVNLNLWQKLKLSRDDAKPLLRLKGFPSFPLVERQANEVDWWDMVCNVKKLINEKKEDGKVFWQNLAGYKRQEALRPYLSSEEDRKKGKKFARYQLGDLLLHLEKKHGEDWGKVYDEAWERIDKKVEGLSKHIKLEEERRSEDAQSKAALTDWLRAKASFVIEGLKEADKDEFCRCELKLQKWYGDLRGKPFAIEAENSILDISGFSKQYNCAFIWQKDGVKKLNLYLIINYFKGGKLRFKKIKPEAFEANRFYTVINKKSGEIVPMEVNFNFDDPNLIILPLAFGKRQGREFIWNDLLSLETGSLQLANGRVIEKTLYNRRTRQDEPALFVALTFERREVLDSSNIKPMNLIGVDRGENIPAVIALTDPEGCPLSRFKDSLGNPTHILRIGESYKEKQRTIQAKKEVEQRRAGGYSRKYASKAKNLADDMVRNTARDLLYYAVTQDAMLIFENLSRGFGRQGKRTFMAERQYTRMEDWLTAKLAYEGLPSKTYLSKTLAQYTSKTCSNCGFTITSADYDRVLEKLKKTATGWMTTINGKELKVEGQITYYNRYKRQNVVKDLSVELDRLSEESVNNDISSWTKGRSGEALSLLKKRFSHRPVQEKFVCLNCGFETHADEQAALNIARSWLFLRSQEYKKYQTNKTTGNTDKRAFVETWQSFYRKKLKEVWKPAV

SEQ ID NO: 35390 - protein, 978 aa, synthetic construct
  REGION 1..978: note = engineered CasX variant
QEIKRINKIRRRLVKDSNTKKAGKTGPMKTLLVRVMTPDLRERLENLRKKPENIPQPISNTSRANLNKLLTDYTEMKKAILHVYWEEFQKDPVGLMSRVAQPASKKIDQNKLKPEMDEKGNLTTAGFACSQCGQPLFVYKLEQVSEKGKAYTNYFGRCNVAEHEKLILLAQLKPEKDSDEAVTYSLGKFGQRALDFYSIHVTKESTHPVKPLAQIAGNRYASYPVGKALSDACMGTIASFLSKYQDIIIEHQKVVKGNQKRLESLRELAGKENLEYPSVTLPPQPHTSEGVDAYNEVIARVRMWVNLNLWQKLKLSRDDAKPLLRLKGFPSFPLVERQANEVDWWDMVCNVKKLINEKKEDGKVFWQNLAGYKRQEALRPYLSSEEDRKKGKKFARYQLGDLLLHLEKKHGEDWGKVYDEAWERIDKKVEGLSKHIKLEEERRSEDAQSKAALTDWLRAKASFVIEGLKEADKDEFCRCELKLQKWYGDLRGKPFAIEAENSILDISGFSKQYNCAFIWQKDGVKKLNLYLIINYFKGGKLRFKKIKPEAFEANRFYTVINKKSGEIVPMEVNFNFDDPNLIILPLAFGKRQGREFIWNDLLSLETGSLKLANGRVIEKTLYNRRTRQDEPALFVALTFERREVLDSSNIKPMNLIGVDRGENIPAVIALTDPEGCPLSRFKDSLGNPTHILRIGESYKEKQRTIQAKKEVEQRRAGGYSRKYASKAKNLADDMVRNTARDLLYYAVTQDAMLIFENLSRGFGRQGKRTFMAERQYTRMEDWLTAKLAYEGLPSKTYLSKTLAQYTSKTCSNCGFTITSADYDRVLEKLKKTATGWMTTINGKELKVEGQITYYNRYKRQNVVKDLSVELDRLSEESVNNDISSWTKGRSGEALSLLKKRFSHRPVQEKFVCLNCGFETHADEQAALNIARSWLFLRSQEYKKYQTNKTTGNTDKRAFVETWQSFYRKKLKEVWKPAV

SEQ ID NO: 35391 - protein, 978 aa, synthetic construct
  REGION 1..978: note = engineered CasX variant
QEIKRINKIRRRLVKDSNTKKAGKTGPMKTLLVRVMTPDLRERLENLRKKPENIPQPISNTSRANLNKLLTDYTEMKKAILHVYWEEFQKDPVGLMSRVAQPASKKIDQNKLKPEMDEKGNLTTAGFACSQCGQPLFVYKLEQVSEKGKAYTNYFGRCNVAEHEKLILLAQLKPEKDSDEAVTYSLGKFGQRALDFYSIHVTKESTHPVKPLAQIAGNRYASHPVGKALSDACMGTIASFLSKYQDIIIEHQKVVKGNQKRLESLRELAGKENLEYPSVTLPPQPHTSEGVDAYNEVIARVRMWVNLNLWQKLKLSRDDAKPLLRLKGFPSFPLVERQANEVDWWDMVCNVKKLINEKKEDGKVFWQNLAGYKRQEALRPYLSSEEDRKKGKKFARYQLGDLLLHLEKKHGEDWGKVYDEAWERIDKKVEGLSKHIKLEEERRSEDAQSKAALTDWLRAKASFVIEGLKEADKDEFCRCELKLQKWYGDLRGKPFAIEAENSILDISGFSKQYNCAFIWQKDGVKKLNLYLIINYFKGGKLRFKKIKPEAFEANRFYTVINKKSGEIVPMEVNFNFDDPNLIILPLAFGKRQGREFIWNDLLSLETGSLKLANGRVIEKTLYNRRTRQDEPALFVALTFERREVLDSSNIKPMNLIGVDRGENIPAVIALTDPEGCPLSRFKDSLGNPTHILRIGESYKEKQRTIQAKKEVEQRRAGGYSRKYASKAKNLADDMVRNTARDLLYYAVTQDAMLIFENLSRGFGRQGKRTFMAERQYTRMEDWLTAKLAYEGLPSKTYLSKTLAQYTSKTCSNCGFTITSADYDRVLEKLKKTATGWMTTINGKELKVEGQITYYNRYKRQNVVKDLSVELDRLSEESVNNDISSWTKGRSGEALSLLKKRFSHRPVQEKFVCLNCGFETHADEQAALNIARSWLFLRSQEYKKYQTNKTTGNTDKRAFVETWQSFYRKKLKEVWKPAV

SEQ ID NO: 35392 - protein, 978 aa, synthetic construct
  REGION 1..978: note = engineered CasX variant
QEIKRINKIRRRLVKDSNTKKAGKTGPMKTLLVRVMTPDLRERLENLRKKPENIPQPISNTSRANLNKLLTDYTEMKKAILHVYWEEFQKDPVGLMSRVAQPASKKIDQNKLKPEMDEKGNLTTAGFACSQCGQPLFVYKLEQVSEKGKAYTNYFGRCNVAEHEKLILLAQLKPEKDSDEAVTYSLGKFGQRALDFYSIHVTKESTHPVKPLAQIAGNRYASTPVGKALSDACMGTIASFLSKYQDIIIEHQKVVKGNQKRLESLRELAGKENLEYPSVTLPPQPHTSEGVDAYNEVIARVRMWVNLNLWQKLKLSRDDAKPLLRLKGFPSFPLVERQANEVDWWDMVCNVKKLINEKKEDGKVFWQNLAGYKRQEALRPYLSSEEDRKKGKKFARYQLGDLLLHLEKKHGEDWGKVYDEAWERIDKKVEGLSKHIKLEEERRSEDAQSKAALTDWLRAKASFVIEGLKEADKDEFCRCELKLQKWYGDLRGKPFAIEAENSILDISGFSKQYNCAFIWQKDGVKKLNLYLIINYFKGGKLRFKKIKPEAFEANRFYTVINKKSGEIVPMEVNFNFDDPNLIILPLAFGKRQGREFIWNDLLSLETGSLKLANGRVIEKTLYNRRTRQDEPALFVALTFERREVLDSSNIKPMNLIGVDRGENIPAVIALTDPEGCPLSRFKDSLGNPTHILRIGESYKEKQRTIQAKKEVEQRRAGGYSRKYASKAKNLADDMVRNTARDLLYYAVTQDAMLIFENLSRGFGRQGKRTFMAERQYTRMEDWLTAKLAYEGLPSKTYLSKTLAQYTSKTCSNCGFTITSADYDRVLEKLKKTATGWMTTINGKELKVEGQITYYNRYKRQNVVKDLSVELDRLSEESVNNDISSWTKGRSGEALSLLKKRFSHRPVQEKFVCLNCGFETHADEQAALNIARSWLFLRSQEYKKYQTNKTTGNTDKRAFVETWQSFYRKKLKEVWKPAV

SEQ ID NO: 35393 - protein, 978 aa, synthetic construct
  REGION 1..978: note = engineered CasX variant
QEIKRINKIRRRLVKDSNTKKAGKTGPMKTLLVRVMTPDLRERLENLRKKPENIPQPISNTSRANLNKLLTDYTEMKKAILHVYWEEFQKDPVGLMSRVAQPASKKIDQNKLKPEMDEKGNLTTAGFACSQCGQPLFVYKLEQVSEKGKAYTNYFGRCNVAEHEKLILLAQLKPEKDSDEAVTYSLGKFGQRALDFYSIHVTKESTHPVKPLAQIAGNRYASAPVGKALSDACMGTIASFLSKYQDIIIEHQKVVKGNQKRLESLRELAGKENLEYPSVTLPPQPHTSEGVDAYNEVIARVRMWVNLNLWQKLKLSRDDAKPLLRLKGFPSFPLVERQANEVDWWDMVCNVKKLINEKKEDGKVFWQNLAGYKRQEALRPYLSSEEDRKKGKKFARYQLGDLLLHLEKKHGEDWGKVYDEAWERIDKKVEGLSKHIKLEEERRSEDAQSKAALTDWLRAKASFVIEGLKEADKDEFCRCELKLQKWYGDLRGKPFAIEAENSILDISGFSKQYNCAFIWQKDGVKKLNLYLIINYFKGGKLRFKKIKPEAFEANRFYTVINKKSGEIVPMEVNFNFDDPNLIILPLAFGKRQGREFIWNDLLSLETGSLKLANGRVIEKTLYNRRTRQDEPALFVALTFERREVLDSSNIKPMNLIGVDRGENIPAVIALTDPEGCPLSRFKDSLGNPTHILRIGESYKEKQRTIQAKKEVEQRRAGGYSRKYASKAKNLADDMVRNTARDLLYYAVTQDAMLIFENLSRGFGRQGKRTFMAERQYTRMEDWLTAKLAYEGLPSKTYLSKTLAQYTSKTCSNCGFTITSADYDRVLEKLKKTATGWMTTINGKELKVEGQITYYNRYKRQNVVKDLSVELDRLSEESVNNDISSWTKGRSGEALSLLKKRFSHRPVQEKFVCLNCGFETHADEQAALNIARSWLFLRSQEYKKYQTNKTTGNTDKRAFVETWQSFYRKKLKEVWKPAV

SEQ ID NO: 35394 - protein, 978 aa, synthetic construct
  REGION 1..978: note = engineered CasX variant
QEIKRINKIRRRLVKDSNTKKAGKTGPMKTLLVRVMTPDLRERLENLRKKPENIPQPISNTSRANLNKLLTDYTEMKKAILHVYWEEFQKDPVGLMSRVAQPASKKIDQNKLKPEMDEKGNLTTAGFACSQCGQPLFVYKLEQVSEKGKAYTNYFGRCNVAEHEKLILLAQLKPEKDSDEAVTYSLGKFGQRALDFYSIHVTKESTHPVKPLAQIAGNRYASVPVGKALSDACMGTIASFLSKYQDIIIEHQKVVKGNQKRLESLRELAGKENLEYPSVTLPPQPHTSEGVDAYNEVIARVRMWVNLNLWQKLKLSRDDAKPLLRLKGFPSFPLVERQANEVDWWDMVCNVKKLINEKKEDGKVFWQNLAGYKRQEALRPYLSSEEDRKKGKKFARYQLGDLLLHLEKKHGEDWGKVYDEAWERIDKKVEGLSKHIKLEEERRSEDAQSKAALTDWLRAKASFVIEGLKEADKDEFCRCELKLQKWYGDLRGKPFAIEAENSILDISGFSKQYNCAFIWQKDGVKKLNLYLIINYFKGGKLRFKKIKPEAFEANRFYTVINKKSGEIVPMEVNFNFDDPNLIILPLAFGKRQGREFIWNDLLSLETGSLKLANGRVIEKTLYNRRTRQDEPALFVALTFERREVLDSSNIKPMNLIGVDRGENIPAVIALTDPEGCPLSRFKDSLGNPTHILRIGESYKEKQRTIQAKKEVEQRRAGGYSRKYASKAKNLADDMVRNTARDLLYYAVTQDAMLIFENLSRGFGRQGKRTFMAERQYTRMEDWLTAKLAYEGLPSKTYLSKTLAQYTSKTCSNCGFTITSADYDRVLEKLKKTATGWMTTINGKELKVEGQITYYNRYKRQNVVKDLSVELDRLSEESVNNDISSWTKGRSGEALSLLKKRFSHRPVQEKFVCLNCGFETHADEQAALNIARSWLFLRSQEYKKYQTNKTTGNTDKRAFVETWQSFYRKKLKEVWKPAV

SEQ ID NO: 35395 - protein, 978 aa, synthetic construct
  REGION 1..978: note = engineered CasX variant
QEIKRINKIRRRLVKDSNTKKAGKTGPMKTLLVRVMTPDLRERLENLRKKPENIPQPISNTSRANLNKLLTDYTEMKKAILHVYWEEFQKDPVGLMSRVAQPASKKIDQNKLKPEMDEKGNLTTAGFACSQCGQPLFVYKLEQVSEKGKAYTNYFGRCNVAEHEKLILLAQLKPEKDSDEAVTYSLGKFGQRALDFYSIHVTKESTHPVKPLAQIAGNRYASYPVGKALSDACMGTIASFLSKYQDIIIEHQKVVKGNQKRLESLRELAGKENLEYPSVTLPPQPHTKEGLDAYNEVIARVRMWVNLNLWQKLKLSRDDAKPLLRLKGFPSFPLVERQANEVDWWDMVCNVKKLINEKKEDGKVFWQNLAGYKRQEALRPYLSSEEDRKKGKKFARYQLGDLLLHLEKKHGEDWGKVYDEAWERIDKKVEGLSKHIKLEEERRSEDAQSKAALTDWLRAKASFVIEGLKEADKDEFCRCELKLQKWYGDLRGKPFAIEAENSILDISGFSKQYNCAFIWQKDGVKKLNLYLIINYFKGGKLRFKKIKPEAFEANRFYTVINKKSGEIVPMEVNFNFDDPNLIILPLAFGKRQGREFIWNDLLSLETGSLKLANGRVIEKTLYNRRTRQDEPALFVALTFERREVLDSSNIKPMNLIGVDRGENIPAVIALTDPEGCPLSRFKDSLGNPTHILRIGESYKEKQRTIQAKKEVEQRRAGGYSRKYASKAKNLADDMVRNTARDLLYYAVTQDAMLIFENLSRGFGRQGKRTFMAERQYTRMEDWLTAKLAYEGLPSKTYLSKTLAQYTSKTCSNCGFTITSADYDRVLEKLKKTATGWMTTINGKELKVEGQITYYNRYKRQNVVKDLSVELDRLSEESVNNDISSWTKGRSGEALSLLKKRFSHRPVQEKFVCLNCGFETHADEQAALNIARSWLFLRSQEYKKYQTNKTTGNTDKRAFVETWQSFYRKKLKEVWKPAV

SEQ ID NO: 35396 - protein, 978 aa, synthetic construct
  REGION 1..978: note = engineered CasX variant
QEIKRINKIRRRLVKDSNTKKAGKTGPMKTLLVRVMTPDLRERLENLRKKPENIPQPISNTSRANLNKLLTDYTEMKKAILHVYWEEFQKDPVGLMSRVAQPASKKIDQNKLKPEMDEKGNLTTAGFACSQCGQPLFVYKLEQVSEKGKAYTNYFGRCNVAEHEKLILLAQLKPEKDSDEAVTYSLGKFGQRALDFYSIHVTKESTHPVKPLAQIAGNRYASHPVGKALSDACMGTIASFLSKYQDIIIEHQKVVKGNQKRLESLRELAGKENLEYPSVTLPPQPHTKEGLDAYNEVIARVRMWVNLNLWQKLKLSRDDAKPLLRLKGFPSFPLVERQANEVDWWDMVCNVKKLINEKKEDGKVFWQNLAGYKRQEALRPYLSSEEDRKKGKKFARYQLGDLLLHLEKKHGEDWGKVYDEAWERIDKKVEGLSKHIKLEEERRSEDAQSKAALTDWLRAKASFVIEGLKEADKDEFCRCELKLQKWYGDLRGKPFAIEAENSILDISGFSKQYNCAFIWQKDGVKKLNLYLIINYFKGGKLRFKKIKPEAFEANRFYTVINKKSGEIVPMEVNFNFDDPNLIILPLAFGKRQGREFIWNDLLSLETGSLKLANGRVIEKTLYNRRTRQDEPALFVALTFERREVLDSSNIKPMNLIGVDRGENIPAVIALTDPEGCPLSRFKDSLGNPTHILRIGESYKEKQRTIQAKKEVEQRRAGGYSRKYASKAKNLADDMVRNTARDLLYYAVTQDAMLIFENLSRGFGRQGKRTFMAERQYTRMEDWLTAKLAYEGLPSKTYLSKTLAQYTSKTCSNCGFTITSADYDRVLEKLKKTATGWMTTINGKELKVEGQITYYNRYKRQNVVKDLSVELDRLSEESVNNDISSWTKGRSGEALSLLKKRFSHRPVQEKFVCLNCGFETHADEQAALNIARSWLFLRSQEYKKYQTNKTTGNTDKRAFVETWQSFYRKKLKEVWKPAV

SEQ ID NO: 35397 - protein, 978 aa, synthetic construct
  REGION 1..978: note = engineered CasX variant
QEIKRINKIRRRLVKDSNTKKAGKTGPMKTLLVRVMTPDLRERLENLRKKPENIPQPISNTSRANLNKLLTDYTEMKKAILHVYWEEFQKDPVGLMSRVAQPASKKIDQNKLKPEMDEKGNLTTAGFACSQCGQPLFVYKLEQVSEKGKAYTNYFGRCNVAEHEKLILLAQLKPEKDSDEAVTYSLGKFGQRALDFYSIHVTKESTHPVKPLAQIAGNRYASTPVGKALSDACMGTIASFLSKYQDIIIEHQKVVKGNQKRLESLRELAGKENLEYPSVTLPPQPHTKEGLDAYNEVIARVRMWVNLNLWQKLKLSRDDAKPLLRLKGFPSFPLVERQANEVDWWDMVCNVKKLINEKKEDGKVFWQNLAGYKRQEALRPYLSSEEDRKKGKKFARYQLGDLLLHLEKKHGEDWGKVYDEAWERIDKKVEGLSKHIKLEEERRSEDAQSKAALTDWLRAKASFVIEGLKEADKDEFCRCELKLQKWYGDLRGKPFAIEAENSILDISGFSKQYNCAFIWQKDGVKKLNLYLIINYFKGGKLRFKKIKPEAFEANRFYTVINKKSGEIVPMEVNFNFDDPNLIILPLAFGKRQGREFIWNDLLSLETGSLKLANGRVIEKTLYNRRTRQDEPALFVALTFERREVLDSSNIKPMNLIGVDRGENIPAVIALTDPEGCPLSRFKDSLGNPTHILRIGESYKEKQRTIQAKKEVEQRRAGGYSRKYASKAKNLADDMVRNTARDLLYYAVTQDAMLIFENLSRGFGRQGKRTFMAERQYTRMEDWLTAKLAYEGLPSKTYLSKTLAQYTSKTCSNCGFTITSADYDRVLEKLKKTATGWMTTINGKELKVEGQITYYNRYKRQNVVKDLSVELDRLSEESVNNDISSWTKGRSGEALSLLKKRFSHRPVQEKFVCLNCGFETHADEQAALNIARSWLFLRSQEYKKYQTNKTTGNTDKRAFVETWQSFYRKKLKEVWKPAV

SEQ ID NO: 35398 - protein, 978 aa, synthetic construct
  REGION 1..978: note = engineered CasX variant
QEIKRINKIRRRLVKDSNTKKAGKTGPMKTLLVRVMTPDLRERLENLRKKPENIPQPISNTSRANLNKLLTDYTEMKKAILHVYWEEFQKDPVGLMSRVAQPASKKIDQNKLKPEMDEKGNLTTAGFACSQCGQPLFVYKLEQVSEKGKAYTNYFGRCNVAEHEKLILLAQLKPEKDSDEAVTYSLGKFGQRALDFYSIHVTKESTHPVKPLAQIAGNRYASAPVGKALSDACMGTIASFLSKYQDIIIEHQKVVKGNQKRLESLRELAGKENLEYPSVTLPPQPHTKEGLDAYNEVIARVRMWVNLNLWQKLKLSRDDAKPLLRLKGFPSFPLVERQANEVDWWDMVCNVKKLINEKKEDGKVFWQNLAGYKRQEALRPYLSSEEDRKKGKKFARYQLGDLLLHLEKKHGEDWGKVYDEAWERIDKKVEGLSKHIKLEEERRSEDAQSKAALTDWLRAKASFVIEGLKEADKDEFCRCELKLQKWYGDLRGKPFAIEAENSILDISGFSKQYNCAFIWQKDGVKKLNLYLIINYFKGGKLRFKKIKPEAFEANRFYTVINKKSGEIVPMEVNFNFDDPNLIILPLAFGKRQGREFIWNDLLSLETGSLKLANGRVIEKTLYNRRTRQDEPALFVALTFERREVLDSSNIKPMNLIGVDRGENIPAVIALTDPEGCPLSRFKDSLGNPTHILRIGESYKEKQRTIQAKKEVEQRRAGGYSRKYASKAKNLADDMVRNTARDLLYYAVTQDAMLIFENLSRGFGRQGKRTFMAERQYTRMEDWLTAKLAYEGLPSKTYLSKTLAQYTSKTCSNCGFTITSADYDRVLEKLKKTATGWMTTINGKELKVEGQITYYNRYKRQNVVKDLSVELDRLSEESVNNDISSWTKGRSGEALSLLKKRFSHRPVQEKFVCLNCGFETHADEQAALNIARSWLFLRSQEYKKYQTNKTTGNTDKRAFVETWQSFYRKKLKEVWKPAV

SEQ ID NO: 35399 - protein, 978 aa, synthetic construct
  REGION 1..978: note = engineered CasX variant
QEIKRINKIRRRLVKDSNTKKAGKTGPMKTLLVRVMTPDLRERLENLRKKPENIPQPISNTSRANLNKLLTDYTEMKKAILHVYWEEFQKDPVGLMSRVAQPASKKIDQNKLKPEMDEKGNLTTAGFACSQCGQPLFVYKLEQVSEKGKAYTNYFGRCNVAEHEKLILLAQLKPEKDSDEAVTYSLGKFGQRALDFYSIHVTKESTHPVKPLAQIAGNRYASVPVGKALSDACMGTIASFLSKYQDIIIEHQKVVKGNQKRLESLRELAGKENLEYPSVTLPPQPHTKEGLDAYNEVIARVRMWVNLNLWQKLKLSRDDAKPLLRLKGFPSFPLVERQANEVDWWDMVCNVKKLINEKKEDGKVFWQNLAGYKRQEALRPYLSSEEDRKKGKKFARYQLGDLLLHLEKKHGEDWGKVYDEAWERIDKKVEGLSKHIKLEEERRSEDAQSKAALTDWLRAKASFVIEGLKEADKDEFCRCELKLQKWYGDLRGKPFAIEAENSILDISGFSKQYNCAFIWQKDGVKKLNLYLIINYFKGGKLRFKKIKPEAFEANRFYTVINKKSGEIVPMEVNFNFDDPNLIILPLAFGKRQGREFIWNDLLSLETGSLKLANGRVIEKTLYNRRTRQDEPALFVALTFERREVLDSSNIKPMNLIGVDRGENIPAVIALTDPEGCPLSRFKDSLGNPTHILRIGESYKEKQRTIQAKKEVEQRRAGGYSRKYASKAKNLADDMVRNTARDLLYYAVTQDAMLIFENLSRGFGRQGKRTFMAERQYTRMEDWLTAKLAYEGLPSKTYLSKTLAQYTSKTCSNCGFTITSADYDRVLEKLKKTATGWMTTINGKELKVEGQITYYNRYKRQNVVKDLSVELDRLSEESVNNDISSWTKGRSGEALSLLKKRFSHRPVQEKFVCLNCGFETHADEQAALNIARSWLFLRSQEYKKYQTNKTTGNTDKRAFVETWQSFYRKKLKEVWKPAV

SEQ ID NO: 35400 - protein, 978 aa, synthetic construct
  REGION 1..978: note = engineered CasX variant
QEIKRINKIRRRLVKDSNTKKAGKTGPMKTLLVRVMTPDLRERLENLRKKPENIPQPISNTSRANLNKLLTDYTEMKKAILHVYWEEFQKDPVGLMSRVAQPASKKIDQNKLKPEMDEKGNLTTAGFACSQCGQPLFVYKLEQVSEKGKAYTNYFGRCNVAEHEKLILLAQLKPEKDSDEAVTYSLGKFGQRALDFYSIHVTKESTHPVKPLAQIAGNRYASYPVGKALSDACMGTIASFLSKYQDIIIEHQKVVKGNQKRLESLRELAGKENLEYPSVTLPPQPHTKEGVDAYNEVIARVRTWVNLNLWQKLKLSRDDAKPLLRLKGFPSFPLVERQANEVDWWDMVCNVKKLINEKKEDGKVFWQNLAGYKRQEALRPYLSSEEDRKKGKKFARYQLGDLLLHLEKKHGEDWGKVYDEAWERIDKKVEGLSKHIKLEEERRSEDAQSKAALTDWLRAKASFVIEGLKEADKDEFCRCELKLQKWYGDLRGKPFAIEAENSILDISGFSKQYNCAFIWQKDGVKKLNLYLIINYFKGGKLRFKKIKPEAFEANRFYTVINKKSGEIVPMEVNFNFDDPNLIILPLAFGKRQGREFIWNDLLSLETGSLKLANGRVIEKTLYNRRTRQDEPALFVALTFERREVLDSSNIKPMNLIGVDRGENIPAVIALTDPEGCPLSRFKDSLGNPTHILRIGESYKEKQRTIQAKKEVEQRRAGGYSRKYASKAKNLADDMVRNTARDLLYYAVTQDAMLIFENLSRGFGRQGKRTFMAERQYTRMEDWLTAKLAYEGLPSKTYLSKTLAQYTSKTCSNCGFTITSADYDRVLEKLKKTATGWMTTINGKELKVEGQITYYNRYKRQNVVKDLSVELDRLSEESVNNDISSWTKGRSGEALSLLKKRFSHRPVQEKFVCLNCGFETHADEQAALNIARSWLFLRSQEYKKYQTNKTTGNTDKRAFVETWQSFYRKKLKEVWKPAV

SEQ ID NO: 35401 - protein, 978 aa, synthetic construct
  REGION 1..978: note = engineered CasX variant
QEIKRINKIRRRLVKDSNTKKAGKTGPMKTLLVRVMTPDLRERLENLRKKPENIPQPISNTSRANLNKLLTDYTEMKKAILHVYWEEFQKDPVGLMSRVAQPASKKIDQNKLKPEMDEKGNLTTAGFACSQCGQPLFVYKLEQVSEKGKAYTNYFGRCNVAEHEKLILLAQLKPEKDSDEAVTYSLGKFGQRALDFYSIHVTKESTHPVKPLAQIAGNRYASHPVGKALSDACMGTIASFLSKYQDIIIEHQKVVKGNQKRLESLRELAGKENLEYPSVTLPPQPHTKEGVDAYNEVIARVRTWVNLNLWQKLKLSRDDAKPLLRLKGFPSFPLVERQANEVDWWDMVCNVKKLINEKKEDGKVFWQNLAGYKRQEALRPYLSSEEDRKKGKKFARYQLGDLLLHLEKKHGEDWGKVYDEAWERIDKKVEGLSKHIKLEEERRSEDAQSKAALTDWLRAKASFVIEGLKEADKDEFCRCELKLQKWYGDLRGKPFAIEAENSILDISGFSKQYNCAFIWQKDGVKKLNLYLIINYFKGGKLRFKKIKPEAFEANRFYTVINKKSGEIVPMEVNFNFDDPNLIILPLAFGKRQGREFIWNDLLSLETGSLKLANGRVIEKTLYNRRTRQDEPALFVALTFERREVLDSSNIKPMNLIGVDRGENIPAVIALTDPEGCPLSRFKDSLGNPTHILRIGESYKEKQRTIQAKKEVEQRRAGGYSRKYASKAKNLADDMVRNTARDLLYYAVTQDAMLIFENLSRGFGRQGKRTFMAERQYTRMEDWLTAKLAYEGLPSKTYLSKTLAQYTSKTCSNCGFTITSADYDRVLEKLKKTATGWMTTINGKELKVEGQITYYNRYKRQNVVKDLSVELDRLSEESVNNDISSWTKGRSGEALSLLKKRFSHRPVQEKFVCLNCGFETHADEQAALNIARSWLFLRSQEYKKYQTNKTTGNTDKRAFVETWQSFYRKKLKEVWKPAV

SEQ ID NO: 35402 - protein, 978 aa, synthetic construct
  REGION 1..978: note = engineered CasX variant
QEIKRINKIRRRLVKDSNTKKAGKTGPMKTLLVRVMTPDLRERLENLRKKPENIPQPISNTSRANLNKLLTDYTEMKKAILHVYWEEFQKDPVGLMSRVAQPASKKIDQNKLKPEMDEKGNLTTAGFACSQCGQPLFVYKLEQVSEKGKAYTNYFGRCNVAEHEKLILLAQLKPEKDSDEAVTYSLGKFGQRALDFYSIHVTKESTHPVKPLAQIAGNRYASTPVGKALSDACMGTIASFLSKYQDIIIEHQKVVKGNQKRLESLRELAGKENLEYPSVTLPPQPHTKEGVDAYNEVIARVRTWVNLNLWQKLKLSRDDAKPLLRLKGFPSFPLVERQANEVDWWDMVCNVKKLINEKKEDGKVFWQNLAGYKRQEALRPYLSSEEDRKKGKKFARYQLGDLLLHLEKKHGEDWGKVYDEAWERIDKKVEGLSKHIKLEEERRSEDAQSKAALTDWLRAKASFVIEGLKEADKDEFCRCELKLQKWYGDLRGKPFAIEAENSILDISGFSKQYNCAFIWQKDGVKKLNLYLIINYFKGGKLRFKKIKPEAFEANRFYTVINKKSGEIVPMEVNFNFDDPNLIILPLAFGKRQGREFIWNDLLSLETGSLKLANGRVIEKTLYNRRTRQDEPALFVALTFERREVLDSSNIKPMNLIGVDRGENIPAVIALTDPEGCPLSRFKDSLGNPTHILRIGESYKEKQRTIQAKKEVEQRRAGGYSRKYASKAKNLADDMVRNTARDLLYYAVTQDAMLIFENLSRGFGRQGKRTFMAERQYTRMEDWLTAKLAYEGLPSKTYLSKTLAQYTSKTCSNCGFTITSADYDRVLEKLKKTATGWMTTINGKELKVEGQITYYNRYKRQNVVKDLSVELDRLSEESVNNDISSWTKGRSGEALSLLKKRFSHRPVQEKFVCLNCGFETHADEQAALNIARSWLFLRSQEYKKYQTNKTTGNTDKRAFVETWQSFYRKKLKEVWKPAV

SEQ ID NO: 35403 - protein, 978 aa, synthetic construct
  REGION 1..978: note = engineered CasX variant
QEIKRINKIRRRLVKDSNTKKAGKTGPMKTLLVRVMTPDLRERLENLRKKPENIPQPISNTSRANLNKLLTDYTEMKKAILHVYWEEFQKDPVGLMSRVAQPASKKIDQNKLKPEMDEKGNLTTAGFACSQCGQPLFVYKLEQVSEKGKAYTNYFGRCNVAEHEKLILLAQLKPEKDSDEAVTYSLGKFGQRALDFYSIHVTKESTHPVKPLAQIAGNRYASAPVGKALSDACMGTIASFLSKYQDIIIEHQKVVKGNQKRLESLRELAGKENLEYPSVTLPPQPHTKEGVDAYNEVIARVRTWVNLNLWQKLKLSRDDAKPLLRLKGFPSFPLVERQANEVDWWDMVCNVKKLINEKKEDGKVFWQNLAGYKRQEALRPYLSSEEDRKKGKKFARYQLGDLLLHLEKKHGEDWGKVYDEAWERIDKKVEGLSKHIKLEEERRSEDAQSKAALTDWLRAKASFVIEGLKEADKDEFCRCELKLQKWYGDLRGKPFAIEAENSILDISGFSKQYNCAFIWQKDGVKKLNLYLIINYFKGGKLRFKKIKPEAFEANRFYTVINKKSGEIVPMEVNFNFDDPNLIILPLAFGKRQGREFIWNDLLSLETGSLKLANGRVIEKTLYNRRTRQDEPALFVALTFERREVLDSSNIKPMNLIGVDRGENIPAVIALTDPEGCPLSRFKDSLGNPTHILRIGESYKEKQRTIQAKKEVEQRRAGGYSRKYASKAKNLADDMVRNTARDLLYYAVTQDAMLIFENLSRGFGRQGKRTFMAERQYTRMEDWLTAKLAYEGLPSKTYLSKTLAQYTSKTCSNCGFTITSADYDRVLEKLKKTATGWMTTINGKELKVEGQITYYNRYKRQNVVKDLSVELDRLSEESVNNDISSWTKGRSGEALSLLKKRFSHRPVQEKFVCLNCGFETHADEQAALNIARSWLFLRSQEYKKYQTNKTTGNTDKRAFVETWQSFYRKKLKEVWKPAV

SEQ ID NO: 35404 - protein, 978 aa, synthetic construct
  REGION 1..978: note = engineered CasX variant
QEIKRINKIRRRLVKDSNTKKAGKTGPMKTLLVRVMTPDLRERLENLRKKPENIPQPISNTSRANLNKLLTDYTEMKKAILHVYWEEFQKDPVGLMSRVAQPASKKIDQNKLKPEMDEKGNLTTAGFACSQCGQPLFVYKLEQVSEKGKAYTNYFGRCNVAEHEKLILLAQLKPEKDSDEAVTYSLGKFGQRALDFYSIHVTKESTHPVKPLAQIAGNRYASVPVGKALSDACMGTIASFLSKYQDIIIEHQKVVKGNQKRLESLRELAGKENLEYPSVTLPPQPHTKEGVDAYNEVIARVRTWVNLNLWQKLKLSRDDAKPLLRLKGFPSFPLVERQANEVDWWDMVCNVKKLINEKKEDGKVFWQNLAGYKRQEALRPYLSSEEDRKKGKKFARYQLGDLLLHLEKKHGEDWGKVYDEAWERIDKKVEGLSKHIKLEEERRSEDAQSKAALTDWLRAKASFVIEGLKEADKDEFCRCELKLQKWYGDLRGKPFAIEAENSILDISGFSKQYNCAFIWQKDGVKKLNLYLIINYFKGGKLRFKKIKPEAFEANRFYTVINKKSGEIVPMEVNFNFDDPNLIILPLAFGKRQGREFIWNDLLSLETGSLKLANGRVIEKTLYNRRTRQDEPALFVALTFERREVLDSSNIKPMNLIGVDRGENIPAVIALTDPEGCPLSRFKDSLGNPTHILRIGESYKEKQRTIQAKKEVEQRRAGGYSRKYASKAKNLADDMVRNTARDLLYYAVTQDAMLIFENLSRGFGRQGKRTFMAERQYTRMEDWLTAKLAYEGLPSKTYLSKTLAQYTSKTCSNCGFTITSADYDRVLEKLKKTATGWMTTINGKELKVEGQITYYNRYKRQNVVKDLSVELDRLSEESVNNDISSWTKGRSGEALSLLKKRFSHRPVQEKFVCLNCGFETHADEQAALNIARSWLFLRSQEYKKYQTNKTTGNTDKRAFVETWQSFYRKKLKEVWKPAV

SEQ ID NO: 35405 - protein, 978 aa, synthetic construct
  REGION 1..978: note = engineered CasX variant
QEIKRINKIRRRLVKDSNTKKAGKTGPMKTLLVRVMTPDLRERLENLRKKPENIPQPISNTSRANLNKLLTDYTEMKKAILHVYWEEFQKDPVGLMSRVAQPASKKIDQNKLKPEMDEKGNLTTAGFACSQCGQPLFVYKLEQVSEKGKAYTNYFGRCNVAEHEKLILLAQLKPEKDSDEAVTYSLGKFGQRALDFYSIHVTKESTHPVKPLAQIAGNRYASYPVGKALSDACMGTIASFLSKYQDIIIEHQKVVKGNQKRLESLRELAGKENLEYPSVTLPPQPHTKEGVDAYNEVIARVRWWVNLNLWQKLKLSRDDAKPLLRLKGFPSFPLVERQANEVDWWDMVCNVKKLINEKKEDGKVFWQNLAGYKRQEALRPYLSSEEDRKKGKKFARYQLGDLLLHLEKKHGEDWGKVYDEAWERIDKKVEGLSKHIKLEEERRSEDAQSKAALTDWLRAKASFVIEGLKEADKDEFCRCELKLQKWYGDLRGKPFAIEAENSILDISGFSKQYNCAFIWQKDGVKKLNLYLIINYFKGGKLRFKKIKPEAFEANRFYTVINKKSGEIVPMEVNFNFDDPNLIILPLAFGKRQGREFIWNDLLSLETGSLKLANGRVIEKTLYNRRTRQDEPALFVALTFERREVLDSSNIKPMNLIGVDRGENIPAVIALTDPEGCPLSRFKDSLGNPTHILRIGESYKEKQRTIQAKKEVEQRRAGGYSRKYASKAKNLADDMVRNTARDLLYYAVTQDAMLIFENLSRGFGRQGKRTFMAERQYTRMEDWLTAKLAYEGLPSKTYLSKTLAQYTSKTCSNCGFTITSADYDRVLEKLKKTATGWMTTINGKELKVEGQITYYNRYKRQNVVKDLSVELDRLSEESVNNDISSWTKGRSGEALSLLKKRFSHRPVQEKFVCLNCGFETHADEQAALNIARSWLFLRSQEYKKYQTNKTTGNTDKRAFVETWQSFYRKKLKEVWKPAV

SEQ ID NO: 35406 - protein, 978 aa, synthetic construct
  REGION 1..978: note = engineered CasX variant
QEIKRINKIRRRLVKDSNTKKAGKTGPMKTLLVRVMTPDLRERLENLRKKPENIPQPISNTSRANLNKLLTDYTEMKKAILHVYWEEFQKDPVGLMSRVAQPASKKIDQNKLKPEMDEKGNLTTAGFACSQCGQPLFVYKLEQVSEKGKAYTNYFGRCNVAEHEKLILLAQLKPEKDSDEAVTYSLGKFGQRALDFYSIHVTKESTHPVKPLAQIAGNRYASHPVGKALSDACMGTIASFLSKYQDIIIEHQKVVKGNQKRLESLRELAGKENLEYPSVTLPPQPHTKEGVDAYNEVIARVRWWVNLNLWQKLKLSRDDAKPLLRLKGFPSFPLVERQANEVDWWDMVCNVKKLINEKKEDGKVFWQNLAGYKRQEALRPYLSSEEDRKKGKKFARYQLGDLLLHLEKKHGEDWGKVYDEAWERIDKKVEGLSKHIKLEEERRSEDAQSKAALTDWLRAKASFVIEGLKEADKDEFCRCELKLQKWYGDLRGKPFAIEAENSILDISGFSKQYNCAFIWQKDGVKKLNLYLIINYFKGGKLRFKKIKPEAFEANRFYTVINKKSGEIVPMEVNFNFDDPNLIILPLAFGKRQGREFIWNDLLSLETGSLKLANGRVIEKTLYNRRTRQDEPALFVALTFERREVLDSSNIKPMNLIGVDRGENIPAVIALTDPEGCPLSRFKDSLGNPTHILRIGESYKEKQRTIQAKKEVEQRRAGGYSRKYASKAKNLADDMVRNTARDLLYYAVTQDAMLIFENLSRGFGRQGKRTFMAERQYTRMEDWLTAKLAYEGLPSKTYLSKTLAQYTSKTCSNCGFTITSADYDRVLEKLKKTATGWMTTINGKELKVEGQITYYNRYKRQNVVKDLSVELDRLSEESVNNDISSWTKGRSGEALSLLKKRFSHRPVQEKFVCLNCGFETHADEQAALNIARSWLFLRSQEYKKYQTNKTTGNTDKRAFVETWQSFYRKKLKEVWKPAV

SEQ ID NO: 35407 - protein, 978 aa, synthetic construct
  REGION 1..978: note = engineered CasX variant
QEIKRINKIRRRLVKDSNTKKAGKTGPMKTLLVRVMTPDLRERLENLRKKPENIPQPISNTSRANLNKLLTDYTEMKKAILHVYWEEFQKDPVGLMSRVAQPASKKIDQNKLKPEMDEKGNLTTAGFACSQCGQPLFVYKLEQVSEKGKAYTNYFGRCNVAEHEKLILLAQLKPEKDSDEAVTYSLGKFGQRALDFYSIHVTKESTHPVKPLAQIAGNRYASTPVGKALSDACMGTIASFLSKYQDIIIEHQKVVKGNQKRLESLRELAGKENLEYPSVTLPPQPHTKEGVDAYNEVIARVRWWVNLNLWQKLKLSRDDAKPLLRLKGFPSFPLVERQANEVDWWDMVCNVKKLINEKKEDGKVFWQNLAGYKRQEALRPYLSSEEDRKKGKKFARYQLGDLLLHLEKKHGEDWGKVYDEAWERIDKKVEGLSKHIKLEEERRSEDAQSKAALTDWLRAKASFVIEGLKEADKDEFCRCELKLQKWYGDLRGKPFAIEAENSILDISGFSKQYNCAFIWQKDGVKKLNLYLIINYFKGGKLRFKKIKPEAFEANRFYTVINKKSGEIVPMEVNFNFDDPNLIILPLAFGKRQGREFIWNDLLSLETGSLKLANGRVIEKTLYNRRTRQDEPALFVALTFERREVLDSSNIKPMNLIGVDRGENIPAVIALTDPEGCPLSRFKDSLGNPTHILRIGESYKEKQRTIQAKKEVEQRRAGGYSRKYASKAKNLADDMVRNTARDLLYYAVTQDAMLIFENLSRGFGRQGKRTFMAERQYTRMEDWLTAKLAYEGLPSKTYLSKTLAQYTSKTCSNCGFTITSADYDRVLEKLKKTATGWMTTINGKELKVEGQITYYNRYKRQNVVKDLSVELDRLSEESVNNDISSWTKGRSGEALSLLKKRFSHRPVQEKFVCLNCGFETHADEQAALNIARSWLFLRSQEYKKYQTNKTTGNTDKRAFVETWQSFYRKKLKEVWKPAV

SEQ ID NO: 35408 - protein, 978 aa, synthetic construct
  REGION 1..978: note = engineered CasX variant
QEIKRINKIRRRLVKDSNTKKAGKTGPMKTLLVRVMTPDLRERLENLRKKPENIPQPISNTSRANLNKLLTDYTEMKKAILHVYWEEFQKDPVGLMSRVAQPASKKIDQNKLKPEMDEKGNLTTAGFACSQCGQPLFVYKLEQVSEKGKAYTNYFGRCNVAEHEKLILLAQLKPEKDSDEAVTYSLGKFGQRALDFYSIHVTKESTHPVKPLAQIAGNRYASAPVGKALSDACMGTIASFLSKYQDIIIEHQKVVKGNQKRLESLRELAGKENLEYPSVTLPPQPHTKEGVDAYNEVIARVRWWVNLNLWQKLKLSRDDAKPLLRLKGFPSFPLVERQANEVDWWDMVCNVKKLINEKKEDGKVFWQNLAGYKRQEALRPYLSSEEDRKKGKKFARYQLGDLLLHLEKKHGEDWGKVYDEAWERIDKKVEGLSKHIKLEEERRSEDAQSKAALTDWLRAKASFVIEGLKEADKDEFCRCELKLQKWYGDLRGKPFAIEAENSILDISGFSKQYNCAFIWQKDGVKKLNLYLIINYFKGGKLRFKKIKPEAFEANRFYTVINKKSGEIVPMEVNFNFDDPNLIILPLAFGKRQGREFIWNDLLSLETGSLKLANGRVIEKTLYNRRTRQDEPALFVALTFERREVLDSSNIKPMNLIGVDRGENIPAVIALTDPEGCPLSRFKDSLGNPTHILRIGESYKEKQRTIQAKKEVEQRRAGGYSRKYASKAKNLADDMVRNTARDLLYYAVTQDAMLIFENLSRGFGRQGKRTFMAERQYTRMEDWLTAKLAYEGLPSKTYLSKTLAQYTSKTCSNCGFTITSADYDRVLEKLKKTATGWMTTINGKELKVEGQITYYNRYKRQNVVKDLSVELDRLSEESVNNDISSWTKGRSGEALSLLKKRFSHRPVQEKFVCLNCGFETHADEQAALNIARSWLFLRSQEYKKYQTNKTTGNTDKRAFVETWQSFYRKKLKEVWKPAV

SEQ ID NO: 35409 - protein, 978 aa, synthetic construct
  REGION 1..978: note = engineered CasX variant
QEIKRINKIRRRLVKDSNTKKAGKTGPMKTLLVRVMTPDLRERLENLRKKPENIPQPISNTSRANLNKLLTDYTEMKKAILHVYWEEFQKDPVGLMSRVAQPASKKIDQNKLKPEMDEKGNLTTAGFACSQCGQPLFVYKLEQVSEKGKAYTNYFGRCNVAEHEKLILLAQLKPEKDSDEAVTYSLGKFGQRALDFYSIHVTKESTHPVKPLAQIAGNRYASVPVGKALSDACMGTIASFLSKYQDIIIEHQKVVKGNQKRLESLRELAGKENLEYPSVTLPPQPHTKEGVDAYNEVIARVRWWVNLNLWQKLKLSRDDAKPLLRLKGFPSFPLVERQANEVDWWDMVCNVKKLINEKKEDGKVFWQNLAGYKRQEALRPYLSSEEDRKKGKKFARYQLGDLLLHLEKKHGEDWGKVYDEAWERIDKKVEGLSKHIKLEEERRSEDAQSKAALTDWLRAKASFVIEGLKEADKDEFCRCELKLQKWYGDLRGKPFAIEAENSILDISGFSKQYNCAFIWQKDGVKKLNLYLIINYFKGGKLRFKKIKPEAFEANRFYTVINKKSGEIVPMEVNFNFDDPNLIILPLAFGKRQGREFIWNDLLSLETGSLKLANGRVIEKTLYNRRTRQDEPALFVALTFERREVLDSSNIKPMNLIGVDRGENIPAVIALTDPEGCPLSRFKDSLGNPTHILRIGESYKEKQRTIQAKKEVEQRRAGGYSRKYASKAKNLADDMVRNTARDLLYYAVTQDAMLIFENLSRGFGRQGKRTFMAERQYTRMEDWLTAKLAYEGLPSKTYLSKTLAQYTSKTCSNCGFTITSADYDRVLEKLKKTATGWMTTINGKELKVEGQITYYNRYKRQNVVKDLSVELDRLSEESVNNDISSWTKGRSGEALSLLKKRFSHRPVQEKFVCLNCGFETHADEQAALNIARSWLFLRSQEYKKYQTNKTTGNTDKRAFVETWQSFYRKKLKEVWKPAV

SEQ ID NO: 35410 - protein, 979 aa, synthetic construct
  REGION 1..979: note = engineered CasX variant
QEIKRINKIRRRLVKDSNTKKAGKTGPMKTLLVRVMTPDLRERLENLRKKPENIPQPISNTSRANLNKLLTDYTEMKKAILHVYWEEFQKDPVGLMSRVAQPASKKIDQNKLKPEMDEKGNLTTAGFACSQCGQPLFVYKLEQVSEKGKAYTNYFGRCNVAEHEKLILLAQLKPEKDSDEAVTYSLGKFGQRALDFYSIHVTKESTHPVKPLAQIAGNRYASYPVGKALSDACMGTIASFLSKYQDIIIEHQKVVKGNQKRLESLRELAGKENLEYPSVTLPPQPHTKEGVDAYNEVIARVRMWVNLNLWQKLKLSRDDAKPLLRLKGFPSFPLVERQQANEVDWWDMVCNVKKLINEKKEDGKVFWQNLAGYKRQEALRPYLSSEEDRKKGKKFARYQLGDLLLHLEKKHGEDWGKVYDEAWERIDKKVEGLSKHIKLEEERRSEDAQSKAALTDWLRAKASFVIEGLKEADKDEFCRCELKLQKWYGDLRGKPFAIEAENSILDISGFSKQYNCAFIWQKDGVKKLNLYLIINYFKGGKLRFKKIKPEAFEANRFYTVINKKSGEIVPMEVNFNFDDPNLIILPLAFGKRQGREFIWNDLLSLETGSLKLANGRVIEKTLYNRRTRQDEPALFVALTFERREVLDSSNIKPMNLIGVDRGENIPAVIALTDPEGCPLSRFKDSLGNPTHILRIGESYKEKQRTIQAKKEVEQRRAGGYSRKYASKAKNLADDMVRNTARDLLYYAVTQDAMLIFENLSRGFGRQGKRTFMAERQYTRMEDWLTAKLAYEGLPSKTYLSKTLAQYTSKTCSNCGFTITSADYDRVLEKLKKTATGWMTTINGKELKVEGQITYYNRYKRQNVVKDLSVELDRLSEESVNNDISSWTKGRSGEALSLLKKRFSHRPVQEKFVCLNCGFETHADEQAALNIARSWLFLRSQEYKKYQTNKTTGNTDKRAFVETWQSFYRKKLKEVWKPAV

SEQ ID NO: 35411 - protein, 979 aa, synthetic construct
  REGION 1..979: note = engineered CasX variant
QEIKRINKIRRRLVKDSNTKKAGKTGPMKTLLVRVMTPDLRERLENLRKKPENIPQPISNTSRANLNKLLTDYTEMKKAILHVYWEEFQKDPVGLMSRVAQPASKKIDQNKLKPEMDEKGNLTTAGFACSQCGQPLFVYKLEQVSEKGKAYTNYFGRCNVAEHEKLILLAQLKPEKDSDEAVTYSLGKFGQRALDFYSIHVTKESTHPVKPLAQIAGNRYASHPVGKALSDACMGTIASFLSKYQDIIIEHQKVVKGNQKRLESLRELAGKENLEYPSVTLPPQPHTKEGVDAYNEVIARVRMWVNLNLWQKLKLSRDDAKPLLRLKGFPSFPLVERQQANEVDWWDMVCNVKKLINEKKEDGKVFWQNLAGYKRQEALRPYLSSEEDRKKGKKFARYQLGDLLLHLEKKHGEDWGKVYDEAWERIDKKVEGLSKHIKLEEERRSEDAQSKAALTDWLRAKASFVIEGLKEADKDEFCRCELKLQKWYGDLRGKPFAIEAENSILDISGFSKQYNCAFIWQKDGVKKLNLYLIINYFKGGKLRFKKIKPEAFEANRFYTVINKKSGEIVPMEVNFNFDDPNLIILPLAFGKRQGREFIWNDLLSLETGSLKLANGRVIEKTLYNRRTRQDEPALFVALTFERREVLDSSNIKPMNLIGVDRGENIPAVIALTDPEGCPLSRFKDSLGNPTHILRIGESYKEKQRTIQAKKEVEQRRAGGYSRKYASKAKNLADDMVRNTARDLLYYAVTQDAMLIFENLSRGFGRQGKRTFMAERQYTRMEDWLTAKLAYEGLPSKTYLSKTLAQYTSKTCSNCGFTITSADYDRVLEKLKKTATGWMTTINGKELKVEGQITYYNRYKRQNVVKDLSVELDRLSEESVNNDISSWTKGRSGEALSLLKKRFSHRPVQEKFVCLNCGFETHADEQAALNIARSWLFLRSQEYKKYQTNKTTGNTDKRAFVETWQSFYRKKLKEVWKPAV

SEQ ID NO: 35412 - protein, 979 aa, synthetic construct
  REGION 1..979: note = engineered CasX variant
QEIKRINKIRRRLVKDSNTKKAGKTGPMKTLLVRVMTPDLRERLENLRKKPENIPQPISNTSRANLNKLLTDYTEMKKAILHVYWEEFQKDPVGLMSRVAQPASKKIDQNKLKPEMDEKGNLTTAGFACSQCGQPLFVYKLEQVSEKGKAYTNYFGRCNVAEHEKLILLAQLKPEKDSDEAVTYSLGKFGQRALDFYSIHVTKESTHPVKPLAQIAGNRYASTPVGKALSDACMGTIASFLSKYQDIIIEHQKVVKGNQKRLESLRELAGKENLEYPSVTLPPQPHTKEGVDAYNEVIARVRMWVNLNLWQKLKLSRDDAKPLLRLKGFPSFPLVERQQANEVDWWDMVCNVKKLINEKKEDGKVFWQNLAGYKRQEALRPYLSSEEDRKKGKKFARYQLGDLLLHLEKKHGEDWGKVYDEAWERIDKKVEGLSKHIKLEEERRSEDAQSKAALTDWLRAKASFVIEGLKEADKDEFCRCELKLQKWYGDLRGKPFAIEAENSILDISGFSKQYNCAFIWQKDGVKKLNLYLIINYFKGGKLRFKKIKPEAFEANRFYTVINKKSGEIVPMEVNFNFDDPNLIILPLAFGKRQGREFIWNDLLSLETGSLKLANGRVIEKTLYNRRTRQDEPALFVALTFERREVLDSSNIKPMNLIGVDRGENIPAVIALTDPEGCPLSRFKDSLGNPTHILRIGESYKEKQRTIQAKKEVEQRRAGGYSRKYASKAKNLADDMVRNTARDLLYYAVTQDAMLIFENLSRGFGRQGKRTFMAERQYTRMEDWLTAKLAYEGLPSKTYLSKTLAQYTSKTCSNCGFTITSADYDRVLEKLKKTATGWMTTINGKELKVEGQITYYNRYKRQNVVKDLSVELDRLSEESVNNDISSWTKGRSGEALSLLKKRFSHRPVQEKFVCLNCGFETHADEQAALNIARSWLFLRSQEYKKYQTNKTTGNTDKRAFVETWQSFYRKKLKEVWKPAV

SEQ ID NO: 35413 - protein, 979 aa, synthetic construct
  REGION 1..979: note = engineered CasX variant
QEIKRINKIRRRLVKDSNTKKAGKTGPMKTLLVRVMTPDLRERLENLRKKPENIPQPISNTSRANLNKLLTDYTEMKKAILHVYWEEFQKDPVGLMSRVAQPASKKIDQNKLKPEMDEKGNLTTAGFACSQCGQPLFVYKLEQVSEKGKAYTNYFGRCNVAEHEKLILLAQLKPEKDSDEAVTYSLGKFGQRALDFYSIHVTKESTHPVKPLAQIAGNRYASAPVGKALSDACMGTIASFLSKYQDIIIEHQKVVKGNQKRLESLRELAGKENLEYPSVTLPPQPHTKEGVDAYNEVIARVRMWVNLNLWQKLKLSRDDAKPLLRLKGFPSFPLVERQQANEVDWWDMVCNVKKLINEKKEDGKVFWQNLAGYKRQEALRPYLSSEEDRKKGKKFARYQLGDLLLHLEKKHGEDWGKVYDEAWERIDKKVEGLSKHIKLEEERRSEDAQSKAALTDWLRAKASFVIEGLKEADKDEFCRCELKLQKWYGDLRGKPFAIEAENSILDISGFSKQYNCAFIWQKDGVKKLNLYLIINYFKGGKLRFKKIKPEAFEANRFYTVINKKSGEIVPMEVNFNFDDPNLIILPLAFGKRQGREFIWNDLLSLETGSLKLANGRVIEKTLYNRRTRQDEPALFVALTFERREVLDSSNIKPMNLIGVDRGENIPAVIALTDPEGCPLSRFKDSLGNPTHILRIGESYKEKQRTIQAKKEVEQRRAGGYSRKYASKAKNLADDMVRNTARDLLYYAVTQDAMLIFENLSRGFGRQGKRTFMAERQYTRMEDWLTAKLAYEGLPSKTYLSKTLAQYTSKTCSNCGFTITSADYDRVLEKLKKTATGWMTTINGKELKVEGQITYYNRYKRQNVVKDLSVELDRLSEESVNNDISSWTKGRSGEALSLLKKRFSHRPVQEKFVCLNCGFETHADEQAALNIARSWLFLRSQEYKKYQTNKTTGNTDKRAFVETWQSFYRKKLKEVWKPAV

SEQ ID NO: 35414 - protein, 979 aa, synthetic construct
  REGION 1..979: note = engineered CasX variant
QEIKRINKIRRRLVKDSNTKKAGKTGPMKTLLVRVMTPDLRERLENLRKKPENIPQPISNTSRANLNKLLTDYTEMKKAILHVYWEEFQKDPVGLMSRVAQPASKKIDQNKLKPEMDEKGNLTTAGFACSQCGQPLFVYKLEQVSEKGKAYTNYFGRCNVAEHEKLILLAQLKPEKDSDEAVTYSLGKFGQRALDFYSIHVTKESTHPVKPLAQIAGNRYASVPVGKALSDACMGTIASFLSKYQDIIIEHQKVVKGNQKRLESLRELAGKENLEYPSVTLPPQPHTKEGVDAYNEVIARVRMWVNLNLWQKLKLSRDDAKPLLRLKGFPSFPLVERQQANEVDWWDMVCNVKKLINEKKEDGKVFWQNLAGYKRQEALRPYLSSEEDRKKGKKFARYQLGDLLLHLEKKHGEDWGKVYDEAWERIDKKVEGLSKHIKLEEERRSEDAQSKAALTDWLRAKASFVIEGLKEADKDEFCRCELKLQKWYGDLRGKPFAIEAENSILDISGFSKQYNCAFIWQKDGVKKLNLYLIINYFKGGKLRFKKIKPEAFEANRFYTVINKKSGEIVPMEVNFNFDDPNLIILPLAFGKRQGREFIWNDLLSLETGSLKLANGRVIEKTLYNRRTRQDEPALFVALTFERREVLDSSNIKPMNLIGVDRGENIPAVIALTDPEGCPLSRFKDSLGNPTHILRIGESYKEKQRTIQAKKEVEQRRAGGYSRKYASKAKNLADDMVRNTARDLLYYAVTQDAMLIFENLSRGFGRQGKRTFMAERQYTRMEDWLTAKLAYEGLPSKTYLSKTLAQYTSKTCSNCGFTITSADYDRVLEKLKKTATGWMTTINGKELKVEGQITYYNRYKRQNVVKDLSVELDRLSEESVNNDISSWTKGRSGEALSLLKKRFSHRPVQEKFVCLNCGFETHADEQAALNIARSWLFLRSQEYKKYQTNKTTGNTDKRAFVETWQSFYRKKLKEVWKPAV

SEQ ID NO: 35415 - protein, 979 aa, synthetic construct
  REGION 1..979: note = engineered CasX variant
QEIKRINKIRRRLVKDSNTKKAGKTGPMKTLLVRVMTPDLRERLENLRKKPENIPQPISNTSRANLNKLLTDYTEMKKAILHVYWEEFQKDPVGLMSRVAQPASKKIDQNKLKPEMDEKGNLTTAGFACSQCGQPLFVYKLEQVSEKGKAYTNYFGRCNVAEHEKLILLAQLKPEKDSDEAVTYSLGKFGQRALDFYSIHVTKESTHPVKPLAQIAGNRYASYPVGKALSDACMGTIASFLSKYQDIIIEHQKVVKGNQKRLESLRELAGKENLEYPSVTLPPQPHTKEGVDAYNEVIARVRMWVNLNLWQKLKLSRDDAKPLLRLKGFPSFPLVERQANAEVDWWDMVCNVKKLINEKKEDGKVFWQNLAGYKRQEALRPYLSSEEDRKKGKKFARYQLGDLLLHLEKKHGEDWGKVYDEAWERIDKKVEGLSKHIKLEEERRSEDAQSKAALTDWLRAKASFVIEGLKEADKDEFCRCELKLQKWYGDLRGKPFAIEAENSILDISGFSKQYNCAFIWQKDGVKKLNLYLIINYFKGGKLRFKKIKPEAFEANRFYTVINKKSGEIVPMEVNFNFDDPNLIILPLAFGKRQGREFIWNDLLSLETGSLKLANGRVIEKTLYNRRTRQDEPALFVALTFERREVLDSSNIKPMNLIGVDRGENIPAVIALTDPEGCPLSRFKDSLGNPTHILRIGESYKEKQRTIQAKKEVEQRRAGGYSRKYASKAKNLADDMVRNTARDLLYYAVTQDAMLIFENLSRGFGRQGKRTFMAERQYTRMEDWLTAKLAYEGLPSKTYLSKTLAQYTSKTCSNCGFTITSADYDRVLEKLKKTATGWMTTINGKELKVEGQITYYNRYKRQNVVKDLSVELDRLSEESVNNDISSWTKGRSGEALSLLKKRFSHRPVQEKFVCLNCGFETHADEQAALNIARSWLFLRSQEYKKYQTNKTTGNTDKRAFVETWQSFYRKKLKEVWKPAV

SEQ ID NO: 35416 - protein, 979 aa, synthetic construct
  REGION 1..979: note = engineered CasX variant
QEIKRINKIRRRLVKDSNTKKAGKTGPMKTLLVRVMTPDLRERLENLRKKPENIPQPISNTSRANLNKLLTDYTEMKKAILHVYWEEFQKDPVGLMSRVAQPASKKIDQNKLKPEMDEKGNLTTAGFACSQCGQPLFVYKLEQVSEKGKAYTNYFGRCNVAEHEKLILLAQLKPEKDSDEAVTYSLGKFGQRALDFYSIHVTKESTHPVKPLAQIAGNRYASHPVGKALSDACMGTIASFLSKYQDIIIEHQKVVKGNQKRLESLRELAGKENLEYPSVTLPPQPHTKEGVDAYNEVIARVRMWVNLNLWQKLKLSRDDAKPLLRLKGFPSFPLVERQANAEVDWWDMVCNVKKLINEKKEDGKVFWQNLAGYKRQEALRPYLSSEEDRKKGKKFARYQLGDLLLHLEKKHGEDWGKVYDEAWERIDKKVEGLSKHIKLEEERRSEDAQSKAALTDWLRAKASFVIEGLKEADKDEFCRCELKLQKWYGDLRGKPFAIEAENSILDISGFSKQYNCAFIWQKDGVKKLNLYLIINYFKGGKLRFKKIKPEAFEANRFYTVINKKSGEIVPMEVNFNFDDPNLIILPLAFGKRQGREFIWNDLLSLETGSLKLANGRVIEKTLYNRRTRQDEPALFVALTFERREVLDSSNIKPMNLIGVDRGENIPAVIALTDPEGCPLSRFKDSLGNPTHILRIGESYKEKQRTIQAKKEVEQRRAGGYSRKYASKAKNLADDMVRNTARDLLYYAVTQDAMLIFENLSRGFGRQGKRTFMAERQYTRMEDWLTAKLAYEGLPSKTYLSKTLAQYTSKTCSNCGFTITSADYDRVLEKLKKTATGWMTTINGKELKVEGQITYYNRYKRQNVVKDLSVELDRLSEESVNNDISSWTKGRSGEALSLLKKRFSHRPVQEKFVCLNCGFETHADEQAALNIARSWLFLRSQEYKKYQTNKTTGNTDKRAFVETWQSFYRKKLKEVWKPAV

SEQ ID NO: 35417 - protein, 979 aa, synthetic construct
  REGION 1..979: note = engineered CasX variant
QEIKRINKIRRRLVKDSNTKKAGKTGPMKTLLVRVMTPDLRERLENLRKKPENIPQPISNTSRANLNKLLTDYTEMKKAILHVYWEEFQKDPVGLMSRVAQPASKKIDQNKLKPEMDEKGNLTTAGFACSQCGQPLFVYKLEQVSEKGKAYTNYFGRCNVAEHEKLILLAQLKPEKDSDEAVTYSLGKFGQRALDFYSIHVTKESTHPVKPLAQIAGNRYASTPVGKALSDACMGTIASFLSKYQDIIIEHQKVVKGNQKRLESLRELAGKENLEYPSVTLPPQPHTKEGVDAYNEVIARVRMWVNLNLWQKLKLSRDDAKPLLRLKGFPSFPLVERQANAEVDWWDMVCNVKKLINEKKEDGKVFWQNLAGYKRQEALRPYLSSEEDRKKGKKFARYQLGDLLLHLEKKHGEDWGKVYDEAWERIDKKVEGLSKHIKLEEERRSEDAQSKAALTDWLRAKASFVIEGLKEADKDEFCRCELKLQKWYGDLRGKPFAIEAENSILDISGFSKQYNCAFIWQKDGVKKLNLYLIINYFKGGKLRFKKIKPEAFEANRFYTVINKKSGEIVPMEVNFNFDDPNLIILPLAFGKRQGREFIWNDLLSLETGSLKLANGRVIEKTLYNRRTRQDEPALFVALTFERREVLDSSNIKPMNLIGVDRGENIPAVIALTDPEGCPLSRFKDSLGNPTHILRIGESYKEKQRTIQAKKEVEQRRAGGYSRKYASKAKNLADDMVRNTARDLLYYAVTQDAMLIFENLSRGFGRQGKRTFMAERQYTRMEDWLTAKLAYEGLPSKTYLSKTLAQYTSKTCSNCGFTITSADYDRVLEKLKKTATGWMTTINGKELKVEGQITYYNRYKRQNVVKDLSVELDRLSEESVNNDISSWTKGRSGEALSLLKKRFSHRPVQEKFVCLNCGFETHADEQAALNIARSWLFLRSQEYKKYQTNKTTGNTDKRAFVETWQSFYRKKLKEVWKPAV

SEQ ID NO: 35418 - protein, 979 aa, synthetic construct
  REGION 1..979: note = engineered CasX variant
QEIKRINKIRRRLVKDSNTKKAGKTGPMKTLLVRVMTPDLRERLENLRKKPENIPQPISNTSRANLNKLLTDYTEMKKAILHVYWEEFQKDPVGLMSRVAQPASKKIDQNKLKPEMDEKGNLTTAGFACSQCGQPLFVYKLEQVSEKGKAYTNYFGRCNVAEHEKLILLAQLKPEKDSDEAVTYSLGKFGQRALDFYSIHVTKESTHPVKPLAQIAGNRYASAPVGKALSDACMGTIASFLSKYQDIIIEHQKVVKGNQKRLESLRELAGKENLEYPSVTLPPQPHTKEGVDAYNEVIARVRMWVNLNLWQKLKLSRDDAKPLLRLKGFPSFPLVERQANAEVDWWDMVCNVKKLINEKKEDGKVFWQNLAGYKRQEALRPYLSSEEDRKKGKKFARYQLGDLLLHLEKKHGEDWGKVYDEAWERIDKKVEGLSKHIKLEEERRSEDAQSKAALTDWLRAKASFVIEGLKEADKDEFCRCELKLQKWYGDLRGKPFAIEAENSILDISGFSKQYNCAFIWQKDGVKKLNLYLIINYFKGGKLRFKKIKPEAFEANRFYTVINKKSGEIVPMEVNFNFDDPNLIILPLAFGKRQGREFIWNDLLSLETGSLKLANGRVIEKTLYNRRTRQDEPALFVALTFERREVLDSSNIKPMNLIGVDRGENIPAVIALTDPEGCPLSRFKDSLGNPTHILRIGESYKEKQRTIQAKKEVEQRRAGGYSRKYASKAKNLADDMVRNTARDLLYYAVTQDAMLIFENLSRGFGRQGKRTFMAERQYTRMEDWLTAKLAYEGLPSKTYLSKTLAQYTSKTCSNCGFTITSADYDRVLEKLKKTATGWMTTINGKELKVEGQITYYNRYKRQNVVKDLSVELDRLSEESVNNDISSWTKGRSGEALSLLKKRFSHRPVQEKFVCLNCGFETHADEQAALNIARSWLFLRSQEYKKYQTNKTTGNTDKRAFVETWQSFYRKKLKEVWKPAV

SEQ ID NO: 35419 - protein, 979 aa, synthetic construct
  REGION 1..979: note = engineered CasX variant
QEIKRINKIRRRLVKDSNTKKAGKTGPMKTLLVRVMTPDLRERLENLRKKPENIPQPISNTSRANLNKLLTDYTEMKKAILHVYWEEFQKDPVGLMSRVAQPASKKIDQNKLKPEMDEKGNLTTAGFACSQCGQPLFVYKLEQVSEKGKAYTNYFGRCNVAEHEKLILLAQLKPEKDSDEAVTYSLGKFGQRALDFYSIHVTKESTHPVKPLAQIAGNRYASVPVGKALSDACMGTIASFLSKYQDIIIEHQKVVKGNQKRLESLRELAGKENLEYPSVTLPPQPHTKEGVDAYNEVIARVRMWVNLNLWQKLKLSRDDAKPLLRLKGFPSFPLVERQANAEVDWWDMVCNVKKLINEKKEDGKVFWQNLAGYKRQEALRPYLSSEEDRKKGKKFARYQLGDLLLHLEKKHGEDWGKVYDEAWERIDKKVEGLSKHIKLEEERRSEDAQSKAALTDWLRAKASFVIEGLKEADKDEFCRCELKLQKWYGDLRGKPFAIEAENSILDISGFSKQYNCAFIWQKDGVKKLNLYLIINYFKGGKLRFKKIKPEAFEANRFYTVINKKSGEIVPMEVNFNFDDPNLIILPLAFGKRQGREFIWNDLLSLETGSLKLANGRVIEKTLYNRRTRQDEPALFVALTFERREVLDSSNIKPMNLIGVDRGENIPAVIALTDPEGCPLSRFKDSLGNPTHILRIGESYKEKQRTIQAKKEVEQRRAGGYSRKYASKAKNLADDMVRNTARDLLYYAVTQDAMLIFENLSRGFGRQGKRTFMAERQYTRMEDWLTAKLAYEGLPSKTYLSKTLAQYTSKTCSNCGFTITSADYDRVLEKLKKTATGWMTTINGKELKVEGQITYYNRYKRQNVVKDLSVELDRLSEESVNNDISSWTKGRSGEALSLLKKRFSHRPVQEKFVCLNCGFETHADEQAALNIARSWLFLRSQEYKKYQTNKTTGNTDKRAFVETWQSFYRKKLKEVWKPAV

SEQ ID NO: 35420 - protein, 978 aa, synthetic construct
  REGION 1..978: note = engineered CasX variant
QEIKRINKIRRRLVKDSNTKKAGKTGPMKTLLVRVMTPDLRERLENLRKKPENIPQPISNTSRANLNKLLTDYTEMKKAILHVYWEEFQKDPVGLMSRVAQPASKKIDQNKLKPEMDEKGNLTTAGFACSQCGQPLFVYKLEQVSEKGKAYTNYFGRCNVAEHEKLILLAQLKPEKDSDEAVTYSLGKFGQRALDFYSIHVTKESTHPVKPLAQIAGNRYASYPVGKALSDACMGTIASFLSKYQDIIIEHQKVVKGNQKRLESLRELAGKENLEYPSVTLPPQPHTKEGVDAYNEVIARVRMWVNLNLWQKLKLSRDDAKPLLRLKGFPSFPLVERQANEVDWWDMVCNVKKLINEKKEDGKVFWQNLAGYKRQEALRPYLSSEEDRKKGKKFARTQLGDLLLHLEKKHGEDWGKVYDEAWERIDKKVEGLSKHIKLEEERRSEDAQSKAALTDWLRAKASFVIEGLKEADKDEFCRCELKLQKWYGDLRGKPFAIEAENSILDISGFSKQYNCAFIWQKDGVKKLNLYLIINYFKGGKLRFKKIKPEAFEANRFYTVINKKSGEIVPMEVNFNFDDPNLIILPLAFGKRQGREFIWNDLLSLETGSLKLANGRVIEKTLYNRRTRQDEPALFVALTFERREVLDSSNIKPMNLIGVDRGENIPAVIALTDPEGCPLSRFKDSLGNPTHILRIGESYKEKQRTIQAKKEVEQRRAGGYSRKYASKAKNLADDMVRNTARDLLYYAVTQDAMLIFENLSRGFGRQGKRTFMAERQYTRMEDWLTAKLAYEGLPSKTYLSKTLAQYTSKTCSNCGFTITSADYDRVLEKLKKTATGWMTTINGKELKVEGQITYYNRYKRQNVVKDLSVELDRLSEESVNNDISSWTKGRSGEALSLLKKRFSHRPVQEKFVCLNCGFETHADEQAALNIARSWLFLRSQEYKKYQTNKTTGNTDKRAFVETWQSFYRKKLKEVWKPAV

SEQ ID NO: 35421 - protein, 978 aa, synthetic construct
  REGION 1..978: note = engineered CasX variant
QEIKRINKIRRRLVKDSNTKKAGKTGPMKTLLVRVMTPDLRERLENLRKKPENIPQPISNTSRANLNKLLTDYTEMKKAILHVYWEEFQKDPVGLMSRVAQPASKKIDQNKLKPEMDEKGNLTTAGFACSQCGQPLFVYKLEQVSEKGKAYTNYFGRCNVAEHEKLILLAQLKPEKDSDEAVTYSLGKFGQRALDFYSIHVTKESTHPVKPLAQIAGNRYASHPVGKALSDACMGTIASFLSKYQDIIIEHQKVVKGNQKRLESLRELAGKENLEYPSVTLPPQPHTKEGVDAYNEVIARVRMWVNLNLWQKLKLSRDDAKPLLRLKGFPSFPLVERQANEVDWWDMVCNVKKLINEKKEDGKVFWQNLAGYKRQEALRPYLSSEEDRKKGKKFARTQLGDLLLHLEKKHGEDWGKVYDEAWERIDKKVEGLSKHIKLEEERRSEDAQSKAALTDWLRAKASFVIEGLKEADKDEFCRCELKLQKWYGDLRGKPFAIEAENSILDISGFSKQYNCAFIWQKDGVKKLNLYLIINYFKGGKLRFKKIKPEAFEANRFYTVINKKSGEIVPMEVNFNFDDPNLIILPLAFGKRQGREFIWNDLLSLETGSLKLANGRVIEKTLYNRRTRQDEPALFVALTFERREVLDSSNIKPMNLIGVDRGENIPAVIALTDPEGCPLSRFKDSLGNPTHILRIGESYKEKQRTIQAKKEVEQRRAGGYSRKYASKAKNLADDMVRNTARDLLYYAVTQDAMLIFENLSRGFGRQGKRTFMAERQYTRMEDWLTAKLAYEGLPSKTYLSKTLAQYTSKTCSNCGFTITSADYDRVLEKLKKTATGWMTTINGKELKVEGQITYYNRYKRQNVVKDLSVELDRLSEESVNNDISSWTKGRSGEALSLLKKRFSHRPVQEKFVCLNCGFETHADEQAALNIARSWLFLRSQEYKKYQTNKTTGNTDKRAFVETWQSFYRKKLKEVWKPAV

SEQ ID NO: 35422 - protein, 978 aa, synthetic construct
  REGION 1..978: note = engineered CasX variant
QEIKRINKIRRRLVKDSNTKKAGKTGPMKTLLVRVMTPDLRERLENLRKKPENIPQPISNTSRANLNKLLTDYTEMKKAILHVYWEEFQKDPVGLMSRVAQPASKKIDQNKLKPEMDEKGNLTTAGFACSQCGQPLFVYKLEQVSEKGKAYTNYFGRCNVAEHEKLILLAQLKPEKDSDEAVTYSLGKFGQRALDFYSIHVTKESTHPVKPLAQIAGNRYASTPVGKALSDACMGTIASFLSKYQDIIIEHQKVVKGNQKRLESLRELAGKENLEYPSVTLPPQPHTKEGVDAYNEVIARVRMWVNLNLWQKLKLSRDDAKPLLRLKGFPSFPLVERQANEVDWWDMVCNVKKLINEKKEDGKVFWQNLAGYKRQEALRPYLSSEEDRKKGKKFARTQLGDLLLHLEKKHGEDWGKVYDEAWERIDKKVEGLSKHIKLEEERRSEDAQSKAALTDWLRAKASFVIEGLKEADKDEFCRCELKLQKWYGDLRGKPFAIEAENSILDISGFSKQYNCAFIWQKDGVKKLNLYLIINYFKGGKLRFKKIKPEAFEANRFYTVINKKSGEIVPMEVNFNFDDPNLIILPLAFGKRQGREFIWNDLLSLETGSLKLANGRVIEKTLYNRRTRQDEPALFVALTFERREVLDSSNIKPMNLIGVDRGENIPAVIALTDPEGCPLSRFKDSLGNPTHILRIGESYKEKQRTIQAKKEVEQRRAGGYSRKYASKAKNLADDMVRNTARDLLYYAVTQDAMLIFENLSRGFGRQGKRTFMAERQYTRMEDWLTAKLAYEGLPSKTYLSKTLAQYTSKTCSNCGFTITSADYDRVLEKLKKTATGWMTTINGKELKVEGQITYYNRYKRQNVVKDLSVELDRLSEESVNNDISSWTKGRSGEALSLLKKRFSHRPVQEKFVCLNCGFETHADEQAALNIARSWLFLRSQEYKKYQTNKTTGNTDKRAFVETWQSFYRKKLKEVWKPAV

SEQ ID NO: 35423 - protein, 978 aa, synthetic construct
  REGION 1..978: note = engineered CasX variant
QEIKRINKIRRRLVKDSNTKKAGKTGPMKTLLVRVMTPDLRERLENLRKKPENIPQPISNTSRANLNKLLTDYTEMKKAILHVYWEEFQKDPVGLMSRVAQPASKKIDQNKLKPEMDEKGNLTTAGFACSQCGQPLFVYKLEQVSEKGKAYTNYFGRCNVAEHEKLILLAQLKPEKDSDEAVTYSLGKFGQRALDFYSIHVTKESTHPVKPLAQIAGNRYASAPVGKALSDACMGTIASFLSKYQDIIIEHQKVVKGNQKRLESLRELAGKENLEYPSVTLPPQPHTKEGVDAYNEVIARVRMWVNLNLWQKLKLSRDDAKPLLRLKGFPSFPLVERQANEVDWWDMVCNVKKLINEKKEDGKVFWQNLAGYKRQEALRPYLSSEEDRKKGKKFARTQLGDLLLHLEKKHGEDWGKVYDEAWERIDKKVEGLSKHIKLEEERRSEDAQSKAALTDWLRAKASFVIEGLKEADKDEFCRCELKLQKWYGDLRGKPFAIEAENSILDISGFSKQYNCAFIWQKDGVKKLNLYLIINYFKGGKLRFKKIKPEAFEANRFYTVINKKSGEIVPMEVNFNFDDPNLIILPLAFGKRQGREFIWNDLLSLETGSLKLANGRVIEKTLYNRRTRQDEPALFVALTFERREVLDSSNIKPMNLIGVDRGENIPAVIALTDPEGCPLSRFKDSLGNPTHILRIGESYKEKQRTIQAKKEVEQRRAGGYSRKYASKAKNLADDMVRNTARDLLYYAVTQDAMLIFENLSRGFGRQGKRTFMAERQYTRMEDWLTAKLAYEGLPSKTYLSKTLAQYTSKTCSNCGFTITSADYDRVLEKLKKTATGWMTTINGKELKVEGQITYYNRYKRQNVVKDLSVELDRLSEESVNNDISSWTKGRSGEALSLLKKRFSHRPVQEKFVCLNCGFETHADEQAALNIARSWLFLRSQEYKKYQTNKTTGNTDKRAFVETWQSFYRKKLKEVWKPAV

SEQ ID NO: 35424 - protein, 978 aa, synthetic construct
  REGION 1..978: note = engineered CasX variant
QEIKRINKIRRRLVKDSNTKKAGKTGPMKTLLVRVMTPDLRERLENLRKKPENIPQPISNTSRANLNKLLTDYTEMKKAILHVYWEEFQKDPVGLMSRVAQPASKKIDQNKLKPEMDEKGNLTTAGFACSQCGQPLFVYKLEQVSEKGKAYTNYFGRCNVAEHEKLILLAQLKPEKDSDEAVTYSLGKFGQRALDFYSIHVTKESTHPVKPLAQIAGNRYASVPVGKALSDACMGTIASFLSKYQDIIIEHQKVVKGNQKRLESLRELAGKENLEYPSVTLPPQPHTKEGVDAYNEVIARVRMWVNLNLWQKLKLSRDDAKPLLRLKGFPSFPLVERQANEVDWWDMVCNVKKLINEKKEDGKVFWQNLAGYKRQEALRPYLSSEEDRKKGKKFARTQLGDLLLHLEKKHGEDWGKVYDEAWERIDKKVEGLSKHIKLEEERRSEDAQSKAALTDWLRAKASFVIEGLKEADKDEFCRCELKLQKWYGDLRGKPFAIEAENSILDISGFSKQYNCAFIWQKDGVKKLNLYLIINYFKGGKLRFKKIKPEAFEANRFYTVINKKSGEIVPMEVNFNFDDPNLIILPLAFGKRQGREFIWNDLLSLETGSLKLANGRVIEKTLYNRRTRQDEPALFVALTFERREVLDSSNIKPMNLIGVDRGENIPAVIALTDPEGCPLSRFKDSLGNPTHILRIGESYKEKQRTIQAKKEVEQRRAGGYSRKYASKAKNLADDMVRNTARDLLYYAVTQDAMLIFENLSRGFGRQGKRTFMAERQYTRMEDWLTAKLAYEGLPSKTYLSKTLAQYTSKTCSNCGFTITSADYDRVLEKLKKTATGWMTTINGKELKVEGQITYYNRYKRQNVVKDLSVELDRLSEESVNNDISSWTKGRSGEALSLLKKRFSHRPVQEKFVCLNCGFETHADEQAALNIARSWLFLRSQEYKKYQTNKTTGNTDKRAFVETWQSFYRKKLKEVWKPAV

SEQ ID NO: 35425 - protein, 979 aa, synthetic construct
  REGION 1..979: note = engineered CasX variant
QEIKRINKIRRRLVKDSNTKKAGKTGPMKTLLVRVMTPDLRERLENLRKKPENIPQPISNTSRANLNKLLTDYTEMKKAILHVYWEEFQKDPVGLMSRVAQPASKKIDQNKLKPEMDEKGNLTTAGFACSQCGQPLFVYKLEQVSEKGKAYTNYFGRCNVAEHEKLILLAQLKPEKDSDEAVTYSLGKFGQRALDFYSIHVTKESTHPVKPLAQIAGNRYASYPVGKALSDACMGTIASFLSKYQDIIIEHQKVVKGNQKRLESLRELAGKENLEYPSVTLPPQPHTKEGVDAYNEVIARVRMWVNLNLWQKLKLSRDDAKPLLRLKGFPSFPLVERQANEVDWWDMVCNVKKLINEKKEDGKVFWQNLAGYKRQEALRPYLSSEEDRKKGKKFARYQLGDLLLHLEKKHEGEDWGKVYDEAWERIDKKVEGLSKHIKLEEERRSEDAQSKAALTDWLRAKASFVIEGLKEADKDEFCRCELKLQKWYGDLRGKPFAIEAENSILDISGFSKQYNCAFIWQKDGVKKLNLYLIINYFKGGKLRFKKIKPEAFEANRFYTVINKKSGEIVPMEVNFNFDDPNLIILPLAFGKRQGREFIWNDLLSLETGSLKLANGRVIEKTLYNRRTRQDEPALFVALTFERREVLDSSNIKPMNLIGVDRGENIPAVIALTDPEGCPLSRFKDSLGNPTHILRIGESYKEKQRTIQAKKEVEQRRAGGYSRKYASKAKNLADDMVRNTARDLLYYAVTQDAMLIFENLSRGFGRQGKRTFMAERQYTRMEDWLTAKLAYEGLPSKTYLSKTLAQYTSKTCSNCGFTITSADYDRVLEKLKKTATGWMTTINGKELKVEGQITYYNRYKRQNVVKDLSVELDRLSEESVNNDISSWTKGRSGEALSLLKKRFSHRPVQEKFVCLNCGFETHADEQAALNIARSWLFLRSQEYKKYQTNKTTGNTDKRAFVETWQSFYRKKLKEVWKPAV

SEQ ID NO: 35426 - protein, 979 aa, synthetic construct
  REGION 1..979: note = engineered CasX variant
QEIKRINKIRRRLVKDSNTKKAGKTGPMKTLLVRVMTPDLRERLENLRKKPENIPQPISNTSRANLNKLLTDYTEMKKAILHVYWEEFQKDPVGLMSRVAQPASKKIDQNKLKPEMDEKGNLTTAGFACSQCGQPLFVYKLEQVSEKGKAYTNYFGRCNVAEHEKLILLAQLKPEKDSDEAVTYSLGKFGQRALDFYSIHVTKESTHPVKPLAQIAGNRYASHPVGKALSDACMGTIASFLSKYQDIIIEHQKVVKGNQKRLESLRELAGKENLEYPSVTLPPQPHTKEGVDAYNEVIARVRMWVNLNLWQKLKLSRDDAKPLLRLKGFPSFPLVERQANEVDWWDMVCNVKKLINEKKEDGKVFWQNLAGYKRQEALRPYLSSEEDRKKGKKFARYQLGDLLLHLEKKHEGEDWGKVYDEAWERIDKKVEGLSKHIKLEEERRSEDAQSKAALTDWLRAKASFVIEGLKEADKDEFCRCELKLQKWYGDLRGKPFAIEAENSILDISGFSKQYNCAFIWQKDGVKKLNLYLIINYFKGGKLRFKKIKPEAFEANRFYTVINKKSGEIVPMEVNFNFDDPNLIILPLAFGKRQGREFIWNDLLSLETGSLKLANGRVIEKTLYNRRTRQDEPALFVALTFERREVLDSSNIKPMNLIGVDRGENIPAVIALTDPEGCPLSRFKDSLGNPTHILRIGESYKEKQRTIQAKKEVEQRRAGGYSRKYASKAKNLADDMVRNTARDLLYYAVTQDAMLIFENLSRGFGRQGKRTFMAERQYTRMEDWLTAKLAYEGLPSKTYLSKTLAQYTSKTCSNCGFTITSADYDRVLEKLKKTATGWMTTINGKELKVEGQITYYNRYKRQNVVKDLSVELDRLSEESVNNDISSWTKGRSGEALSLLKKRFSHRPVQEKFVCLNCGFETHADEQAALNIARSWLFLRSQEYKKYQTNKTTGNTDKRAFVETWQSFYRKKLKEVWKPAV

SEQ ID NO: 35427 - protein, 979 aa, synthetic construct
  REGION 1..979: note = engineered CasX variant
QEIKRINKIRRRLVKDSNTKKAGKTGPMKTLLVRVMTPDLRERLENLRKKPENIPQPISNTSRANLNKLLTDYTEMKKAILHVYWEEFQKDPVGLMSRVAQPASKKIDQNKLKPEMDEKGNLTTAGFACSQCGQPLFVYKLEQVSEKGKAYTNYFGRCNVAEHEKLILLAQLKPEKDSDEAVTYSLGKFGQRALDFYSIHVTKESTHPVKPLAQIAGNRYASTPVGKALSDACMGTIASFLSKYQDIIIEHQKVVKGNQKRLESLRELAGKENLEYPSVTLPPQPHTKEGVDAYNEVIARVRMWVNLNLWQKLKLSRDDAKPLLRLKGFPSFPLVERQANEVDWWDMVCNVKKLINEKKEDGKVFWQNLAGYKRQEALRPYLSSEEDRKKGKKFARYQLGDLLLHLEKKHEGEDWGKVYDEAWERIDKKVEGLSKHIKLEEERRSEDAQSKAALTDWLRAKASFVIEGLKEADKDEFCRCELKLQKWYGDLRGKPFAIEAENSILDISGFSKQYNCAFIWQKDGVKKLNLYLIINYFKGGKLRFKKIKPEAFEANRFYTVINKKSGEIVPMEVNFNFDDPNLIILPLAFGKRQGREFIWNDLLSLETGSLKLANGRVIEKTLYNRRTRQDEPALFVALTFERREVLDSSNIKPMNLIGVDRGENIPAVIALTDPEGCPLSRFKDSLGNPTHILRIGESYKEKQRTIQAKKEVEQRRAGGYSRKYASKAKNLADDMVRNTARDLLYYAVTQDAMLIFENLSRGFGRQGKRTFMAERQYTRMEDWLTAKLAYEGLPSKTYLSKTLAQYTSKTCSNCGFTITSADYDRVLEKLKKTATGWMTTINGKELKVEGQITYYNRYKRQNVVKDLSVELDRLSEESVNNDISSWTKGRSGEALSLLKKRFSHRPVQEKFVCLNCGFETHADEQAALNIARSWLFLRSQEYKKYQTNKTTGNTDKRAFVETWQSFYRKKLKEVWKPAV

SEQ ID NO: 35428 - protein, 979 aa, synthetic construct
  REGION 1..979: note = engineered CasX variant
QEIKRINKIRRRLVKDSNTKKAGKTGPMKTLLVRVMTPDLRERLENLRKKPENIPQPISNTSRANLNKLLTDYTEMKKAILHVYWEEFQKDPVGLMSRVAQPASKKIDQNKLKPEMDEKGNLTTAGFACSQCGQPLFVYKLEQVSEKGKAYTNYFGRCNVAEHEKLILLAQLKPEKDSDEAVTYSLGKFGQRALDFYSIHVTKESTHPVKPLAQIAGNRYASAPVGKALSDACMGTIASFLSKYQDIIIEHQKVVKGNQKRLESLRELAGKENLEYPSVTLPPQPHTKEGVDAYNEVIARVRMWVNLNLWQKLKLSRDDAKPLLRLKGFPSFPLVERQANEVDWWDMVCNVKKLINEKKEDGKVFWQNLAGYKRQEALRPYLSSEEDRKKGKKFARYQLGDLLLHLEKKHEGEDWGKVYDEAWERIDKKVEGLSKHIKLEEERRSEDAQSKAALTDWLRAKASFVIEGLKEADKDEFCRCELKLQKWYGDLRGKPFAIEAENSILDISGFSKQYNCAFIWQKDGVKKLNLYLIINYFKGGKLRFKKIKPEAFEANRFYTVINKKSGEIVPMEVNFNFDDPNLIILPLAFGKRQGREFIWNDLLSLETGSLKLANGRVIEKTLYNRRTRQDEPALFVALTFERREVLDSSNIKPMNLIGVDRGENIPAVIALTDPEGCPLSRFKDSLGNPTHILRIGESYKEKQRTIQAKKEVEQRRAGGYSRKYASKAKNLADDMVRNTARDLLYYAVTQDAMLIFENLSRGFGRQGKRTFMAERQYTRMEDWLTAKLAYEGLPSKTYLSKTLAQYTSKTCSNCGFTITSADYDRVLEKLKKTATGWMTTINGKELKVEGQITYYNRYKRQNVVKDLSVELDRLSEESVNNDISSWTKGRSGEALSLLKKRFSHRPVQEKFVCLNCGFETHADEQAALNIARSWLFLRSQEYKKYQTNKTTGNTDKRAFVETWQSFYRKKLKEVWKPAV

SEQ ID NO: 35429 - protein, 979 aa, synthetic construct
  REGION 1..979: note = engineered CasX variant
QEIKRINKIRRRLVKDSNTKKAGKTGPMKTLLVRVMTPDLRERLENLRKKPENIPQPISNTSRANLNKLLTDYTEMKKAILHVYWEEFQKDPVGLMSRVAQPASKKIDQNKLKPEMDEKGNLTTAGFACSQCGQPLFVYKLEQVSEKGKAYTNYFGRCNVAEHEKLILLAQLKPEKDSDEAVTYSLGKFGQRALDFYSIHVTKESTHPVKPLAQIAGNRYASVPVGKALSDACMGTIASFLSKYQDIIIEHQKVVKGNQKRLESLRELAGKENLEYPSVTLPPQPHTKEGVDAYNEVIARVRMWVNLNLWQKLKLSRDDAKPLLRLKGFPSFPLVERQANEVDWWDMVCNVKKLINEKKEDGKVFWQNLAGYKRQEALRPYLSSEEDRKKGKKFARYQLGDLLLHLEKKHEGEDWGKVYDEAWERIDKKVEGLSKHIKLEEERRSEDAQSKAALTDWLRAKASFVIEGLKEADKDEFCRCELKLQKWYGDLRGKPFAIEAENSILDISGFSKQYNCAFIWQKDGVKKLNLYLIINYFKGGKLRFKKIKPEAFEANRFYTVINKKSGEIVPMEVNFNFDDPNLIILPLAFGKRQGREFIWNDLLSLETGSLKLANGRVIEKTLYNRRTRQDEPALFVALTFERREVLDSSNIKPMNLIGVDRGENIPAVIALTDPEGCPLSRFKDSLGNPTHILRIGESYKEKQRTIQAKKEVEQRRAGGYSRKYASKAKNLADDMVRNTARDLLYYAVTQDAMLIFENLSRGFGRQGKRTFMAERQYTRMEDWLTAKLAYEGLPSKTYLSKTLAQYTSKTCSNCGFTITSADYDRVLEKLKKTATGWMTTINGKELKVEGQITYYNRYKRQNVVKDLSVELDRLSEESVNNDISSWTKGRSGEALSLLKKRFSHRPVQEKFVCLNCGFETHADEQAALNIARSWLFLRSQEYKKYQTNKTTGNTDKRAFVETWQSFYRKKLKEVWKPAV

SEQ ID NO: 35430 - protein, 978 aa, synthetic construct
  REGION 1..978: note = engineered CasX variant
QEIKRINKIRRRLVKDSNTKKAGKTGPMKTLLVRVMTPDLRERLENLRKKPENIPQPISNTSRANLNKLLTDYTEMKKAILHVYWEEFQKDPVGLMSRVAQPASKKIDQNKLKPEMDEKGNLTTAGFACSQCGQPLFVYKLEQVSEKGKAYTNYFGRCNVAEHEKLILLAQLKPEKDSDEAVTYSLGKFGQRALDFYSIHVTKESTHPVKPLAQIAGNRYASYPVGKALSDACMGTIASFLSKYQDIIIEHQKVVKGNQKRLESLRELAGKENLEYPSVTLPPQPHTKEGVDAYNEVIARVRMWVNLNLWQKLKLSRDDAKPLLRLKGFPSFPLVERQANEVDWWDMVCNVKKLINEKKEDGKVFWQNLAGYKRQEALRPYLSSEEDRKKGKKFARYQLGDLLLHLEKKHGEDWGKVYDEAWERIDKKVEGLSKHIKLEEERRSEDAQSKAALTDWLRAKASFVIEGLKEADKDEFCRCDLKLQKWYGDLRGKPFAIEAENSILDISGFSKQYNCAFIWQKDGVKKLNLYLIINYFKGGKLRFKKIKPEAFEANRFYTVINKKSGEIVPMEVNFNFDDPNLIILPLAFGKRQGREFIWNDLLSLETGSLKLANGRVIEKTLYNRRTRQDEPALFVALTFERREVLDSSNIKPMNLIGVDRGENIPAVIALTDPEGCPLSRFKDSLGNPTHILRIGESYKEKQRTIQAKKEVEQRRAGGYSRKYASKAKNLADDMVRNTARDLLYYAVTQDAMLIFENLSRGFGRQGKRTFMAERQYTRMEDWLTAKLAYEGLPSKTYLSKTLAQYTSKTCSNCGFTITSADYDRVLEKLKKTATGWMTTINGKELKVEGQITYYNRYKRQNVVKDLSVELDRLSEESVNNDISSWTKGRSGEALSLLKKRFSHRPVQEKFVCLNCGFETHADEQAALNIARSWLFLRSQEYKKYQTNKTTGNTDKRAFVETWQSFYRKKLKEVWKPAV

SEQ ID NO: 35431 - protein, 978 aa, synthetic construct
  REGION 1..978: note = engineered CasX variant
QEIKRINKIRRRLVKDSNTKKAGKTGPMKTLLVRVMTPDLRERLENLRKKPENIPQPISNTSRANLNKLLTDYTEMKKAILHVYWEEFQKDPVGLMSRVAQPASKKIDQNKLKPEMDEKGNLTTAGFACSQCGQPLFVYKLEQVSEKGKAYTNYFGRCNVAEHEKLILLAQLKPEKDSDEAVTYSLGKFGQRALDFYSIHVTKESTHPVKPLAQIAGNRYASHPVGKALSDACMGTIASFLSKYQDIIIEHQKVVKGNQKRLESLRELAGKENLEYPSVTLPPQPHTKEGVDAYNEVIARVRMWVNLNLWQKLKLSRDDAKPLLRLKGFPSFPLVERQANEVDWWDMVCNVKKLINEKKEDGKVFWQNLAGYKRQEALRPYLSSEEDRKKGKKFARYQLGDLLLHLEKKHGEDWGKVYDEAWERIDKKVEGLSKHIKLEEERRSEDAQSKAALTDWLRAKASFVIEGLKEADKDEFCRCDLKLQKWYGDLRGKPFAIEAENSILDISGFSKQYNCAFIWQKDGVKKLNLYLIINYFKGGKLRFKKIKPEAFEANRFYTVINKKSGEIVPMEVNFNFDDPNLIILPLAFGKRQGREFIWNDLLSLETGSLKLANGRVIEKTLYNRRTRQDEPALFVALTFERREVLDSSNIKPMNLIGVDRGENIPAVIALTDPEGCPLSRFKDSLGNPTHILRIGESYKEKQRTIQAKKEVEQRRAGGYSRKYASKAKNLADDMVRNTARDLLYYAVTQDAMLIFENLSRGFGRQGKRTFMAERQYTRMEDWLTAKLAYEGLPSKTYLSKTLAQYTSKTCSNCGFTITSADYDRVLEKLKKTATGWMTTINGKELKVEGQITYYNRYKRQNVVKDLSVELDRLSEESVNNDISSWTKGRSGEALSLLKKRFSHRPVQEKFVCLNCGFETHADEQAALNIARSWLFLRSQEYKKYQTNKTTGNTDKRAFVETWQSFYRKKLKEVWKPAV

SEQ ID NO: 35432 - protein, 978 aa, synthetic construct
  REGION 1..978: note = engineered CasX variant
QEIKRINKIRRRLVKDSNTKKAGKTGPMKTLLVRVMTPDLRERLENLRKKPENIPQPISNTSRANLNKLLTDYTEMKKAILHVYWEEFQKDPVGLMSRVAQPASKKIDQNKLKPEMDEKGNLTTAGFACSQCGQPLFVYKLEQVSEKGKAYTNYFGRCNVAEHEKLILLAQLKPEKDSDEAVTYSLGKFGQRALDFYSIHVTKESTHPVKPLAQIAGNRYASTPVGKALSDACMGTIASFLSKYQDIIIEHQKVVKGNQKRLESLRELAGKENLEYPSVTLPPQPHTKEGVDAYNEVIARVRMWVNLNLWQKLKLSRDDAKPLLRLKGFPSFPLVERQANEVDWWDMVCNVKKLINEKKEDGKVFWQNLAGYKRQEALRPYLSSEEDRKKGKKFARYQLGDLLLHLEKKHGEDWGKVYDEAWERIDKKVEGLSKHIKLEEERRSEDAQSKAALTDWLRAKASFVIEGLKEADKDEFCRCDLKLQKWYGDLRGKPFAIEAENSILDISGFSKQYNCAFIWQKDGVKKLNLYLIINYFKGGKLRFKKIKPEAFEANRFYTVINKKSGEIVPMEVNFNFDDPNLIILPLAFGKRQGREFIWNDLLSLETGSLKLANGRVIEKTLYNRRTRQDEPALFVALTFERREVLDSSNIKPMNLIGVDRGENIPAVIALTDPEGCPLSRFKDSLGNPTHILRIGESYKEKQRTIQAKKEVEQRRAGGYSRKYASKAKNLADDMVRNTARDLLYYAVTQDAMLIFENLSRGFGRQGKRTFMAERQYTRMEDWLTAKLAYEGLPSKTYLSKTLAQYTSKTCSNCGFTITSADYDRVLEKLKKTATGWMTTINGKELKVEGQITYYNRYKRQNVVKDLSVELDRLSEESVNNDISSWTKGRSGEALSLLKKRFSHRPVQEKFVCLNCGFETHADEQAALNIARSWLFLRSQEYKKYQTNKTTGNTDKRAFVETWQSFYRKKLKEVWKPAV

SEQ ID NO: 35433 - protein, 978 aa, synthetic construct
  REGION 1..978: note = engineered CasX variant
QEIKRINKIRRRLVKDSNTKKAGKTGPMKTLLVRVMTPDLRERLENLRKKPENIPQPISNTSRANLNKLLTDYTEMKKAILHVYWEEFQKDPVGLMSRVAQPASKKIDQNKLKPEMDEKGNLTTAGFACSQCGQPLFVYKLEQVSEKGKAYTNYFGRCNVAEHEKLILLAQLKPEKDSDEAVTYSLGKFGQRALDFYSIHVTKESTHPVKPLAQIAGNRYASAPVGKALSDACMGTIASFLSKYQDIIIEHQKVVKGNQKRLESLRELAGKENLEYPSVTLPPQPHTKEGVDAYNEVIARVRMWVNLNLWQKLKLSRDDAKPLLRLKGFPSFPLVERQANEVDWWDMVCNVKKLINEKKEDGKVFWQNLAGYKRQEALRPYLSSEEDRKKGKKFARYQLGDLLLHLEKKHGEDWGKVYDEAWERIDKKVEGLSKHIKLEEERRSEDAQSKAALTDWLRAKASFVIEGLKEADKDEFCRCDLKLQKWYGDLRGKPFAIEAENSILDISGFSKQYNCAFIWQKDGVKKLNLYLIINYFKGGKLRFKKIKPEAFEANRFYTVINKKSGEIVPMEVNFNFDDPNLIILPLAFGKRQGREFIWNDLLSLETGSLKLANGRVIEKTLYNRRTRQDEPALFVALTFERREVLDSSNIKPMNLIGVDRGENIPAVIALTDPEGCPLSRFKDSLGNPTHILRIGESYKEKQRTIQAKKEVEQRRAGGYSRKYASKAKNLADDMVRNTARDLLYYAVTQDAMLIFENLSRGFGRQGKRTFMAERQYTRMEDWLTAKLAYEGLPSKTYLSKTLAQYTSKTCSNCGFTITSADYDRVLEKLKKTATGWMTTINGKELKVEGQITYYNRYKRQNVVKDLSVELDRLSEESVNNDISSWTKGRSGEALSLLKKRFSHRPVQEKFVCLNCGFETHADEQAALNIARSWLFLRSQEYKKYQTNKTTGNTDKRAFVETWQSFYRKKLKEVWKPAV

SEQ ID NO: 35434 - protein, 978 aa, synthetic construct
  REGION 1..978: note = engineered CasX variant
QEIKRINKIRRRLVKDSNTKKAGKTGPMKTLLVRVMTPDLRERLENLRKKPENIPQPISNTSRANLNKLLTDYTEMKKAILHVYWEEFQKDPVGLMSRVAQPASKKIDQNKLKPEMDEKGNLTTAGFACSQCGQPLFVYKLEQVSEKGKAYTNYFGRCNVAEHEKLILLAQLKPEKDSDEAVTYSLGKFGQRALDFYSIHVTKESTHPVKPLAQIAGNRYASVPVGKALSDACMGTIASFLSKYQDIIIEHQKVVKGNQKRLESLRELAGKENLEYPSVTLPPQPHTKEGVDAYNEVIARVRMWVNLNLWQKLKLSRDDAKPLLRLKGFPSFPLVERQANEVDWWDMVCNVKKLINEKKEDGKVFWQNLAGYKRQEALRPYLSSEEDRKKGKKFARYQLGDLLLHLEKKHGEDWGKVYDEAWERIDKKVEGLSKHIKLEEERRSEDAQSKAALTDWLRAKASFVIEGLKEADKDEFCRCDLKLQKWYGDLRGKPFAIEAENSILDISGFSKQYNCAFIWQKDGVKKLNLYLIINYFKGGKLRFKKIKPEAFEANRFYTVINKKSGEIVPMEVNFNFDDPNLIILPLAFGKRQGREFIWNDLLSLETGSLKLANGRVIEKTLYNRRTRQDEPALFVALTFERREVLDSSNIKPMNLIGVDRGENIPAVIALTDPEGCPLSRFKDSLGNPTHILRIGESYKEKQRTIQAKKEVEQRRAGGYSRKYASKAKNLADDMVRNTARDLLYYAVTQDAMLIFENLSRGFGRQGKRTFMAERQYTRMEDWLTAKLAYEGLPSKTYLSKTLAQYTSKTCSNCGFTITSADYDRVLEKLKKTATGWMTTINGKELKVEGQITYYNRYKRQNVVKDLSVELDRLSEESVNNDISSWTKGRSGEALSLLKKRFSHRPVQEKFVCLNCGFETHADEQAALNIARSWLFLRSQEYKKYQTNKTTGNTDKRAFVETWQSFYRKKLKEVWKPAV

SEQ ID NO: 35435 - protein, 978 aa, synthetic construct
  REGION 1..978: note = engineered CasX variant
QEIKRINKIRRRLVKDSNTKKAGKTGPMKTLLVRVMTPDLRERLENLRKKPENIPQPISNTSRANLNKLLTDYTEMKKAILHVYWEEFQKDPVGLMSRVAQPASKKIDQNKLKPEMDEKGNLTTAGFACSQCGQPLFVYKLEQVSEKGKAYTNYFGRCNVAEHEKLILLAQLKPEKDSDEAVTYSLGKFGQRALDFYSIHVTKESTHPVKPLAQIAGNRYASYPVGKALSDACMGTIASFLSKYQDIIIEHQKVVKGNQKRLESLRELAGKENLEYPSVTLPPQPHTKEGVDAYNEVIARVRMWVNLNLWQKLKLSRDDAKPLLRLKGFPSFPLVERQANEVDWWDMVCNVKKLINEKKEDGKVFWQNLAGYKRQEALRPYLSSEEDRKKGKKFARYQLGDLLLHLEKKHGEDWGKVYDEAWERIDKKVEGLSKHIKLEEERRSEDAQSKAALTDWLRAKASFVIEGLKEADKDEFCRCELKLQKWYGDLRGKPFAIEAENSILDISGFSKQYNCAFIWQKDGVKKLNLYLIINYFKGGKLRFKKIKPEAFEANRFYTVINKKSGEIVPMEVNFNFDDPNLIILPLAFGKRFGREFIWNDLLSLETGSLKLANGRVIEKTLYNRRTRQDEPALFVALTFERREVLDSSNIKPMNLIGVDRGENIPAVIALTDPEGCPLSRFKDSLGNPTHILRIGESYKEKQRTIQAKKEVEQRRAGGYSRKYASKAKNLADDMVRNTARDLLYYAVTQDAMLIFENLSRGFGRQGKRTFMAERQYTRMEDWLTAKLAYEGLPSKTYLSKTLAQYTSKTCSNCGFTITSADYDRVLEKLKKTATGWMTTINGKELKVEGQITYYNRYKRQNVVKDLSVELDRLSEESVNNDISSWTKGRSGEALSLLKKRFSHRPVQEKFVCLNCGFETHADEQAALNIARSWLFLRSQEYKKYQTNKTTGNTDKRAFVETWQSFYRKKLKEVWKPAV

SEQ ID NO: 35436 - protein, 978 aa, synthetic construct
  REGION 1..978: note = engineered CasX variant
QEIKRINKIRRRLVKDSNTKKAGKTGPMKTLLVRVMTPDLRERLENLRKKPENIPQPISNTSRANLNKLLTDYTEMKKAILHVYWEEFQKDPVGLMSRVAQPASKKIDQNKLKPEMDEKGNLTTAGFACSQCGQPLFVYKLEQVSEKGKAYTNYFGRCNVAEHEKLILLAQLKPEKDSDEAVTYSLGKFGQRALDFYSIHVTKESTHPVKPLAQIAGNRYASHPVGKALSDACMGTIASFLSKYQDIIIEHQKVVKGNQKRLESLRELAGKENLEYPSVTLPPQPHTKEGVDAYNEVIARVRMWVNLNLWQKLKLSRDDAKPLLRLKGFPSFPLVERQANEVDWWDMVCNVKKLINEKKEDGKVFWQNLAGYKRQEALRPYLSSEEDRKKGKKFARYQLGDLLLHLEKKHGEDWGKVYDEAWERIDKKVEGLSKHIKLEEERRSEDAQSKAALTDWLRAKASFVIEGLKEADKDEFCRCELKLQKWYGDLRGKPFAIEAENSILDISGFSKQYNCAFIWQKDGVKKLNLYLIINYFKGGKLRFKKIKPEAFEANRFYTVINKKSGEIVPMEVNFNFDDPNLIILPLAFGKRFGREFIWNDLLSLETGSLKLANGRVIEKTLYNRRTRQDEPALFVALTFERREVLDSSNIKPMNLIGVDRGENIPAVIALTDPEGCPLSRFKDSLGNPTHILRIGESYKEKQRTIQAKKEVEQRRAGGYSRKYASKAKNLADDMVRNTARDLLYYAVTQDAMLIFENLSRGFGRQGKRTFMAERQYTRMEDWLTAKLAYEGLPSKTYLSKTLAQYTSKTCSNCGFTITSADYDRVLEKLKKTATGWMTTINGKELKVEGQITYYNRYKRQNVVKDLSVELDRLSEESVNNDISSWTKGRSGEALSLLKKRFSHRPVQEKFVCLNCGFETHADEQAALNIARSWLFLRSQEYKKYQTNKTTGNTDKRAFVETWQSFYRKKLKEVWKPAV

SEQ ID NO: 35437 - protein, 978 aa, synthetic construct
  REGION 1..978: note = engineered CasX variant
QEIKRINKIRRRLVKDSNTKKAGKTGPMKTLLVRVMTPDLRERLENLRKKPENIPQPISNTSRANLNKLLTDYTEMKKAILHVYWEEFQKDPVGLMSRVAQPASKKIDQNKLKPEMDEKGNLTTAGFACSQCGQPLFVYKLEQVSEKGKAYTNYFGRCNVAEHEKLILLAQLKPEKDSDEAVTYSLGKFGQRALDFYSIHVTKESTHPVKPLAQIAGNRYASTPVGKALSDACMGTIASFLSKYQDIIIEHQKVVKGNQKRLESLRELAGKENLEYPSVTLPPQPHTKEGVDAYNEVIARVRMWVNLNLWQKLKLSRDDAKPLLRLKGFPSFPLVERQANEVDWWDMVCNVKKLINEKKEDGKVFWQNLAGYKRQEALRPYLSSEEDRKKGKKFARYQLGDLLLHLEKKHGEDWGKVYDEAWERIDKKVEGLSKHIKLEEERRSEDAQSKAALTDWLRAKASFVIEGLKEADKDEFCRCELKLQKWYGDLRGKPFAIEAENSILDISGFSKQYNCAFIWQKDGVKKLNLYLIINYFKGGKLRFKKIKPEAFEANRFYTVINKKSGEIVPMEVNFNFDDPNLIILPLAFGKRFGREFIWNDLLSLETGSLKLANGRVIEKTLYNRRTRQDEPALFVALTFERREVLDSSNIKPMNLIGVDRGENIPAVIALTDPEGCPLSRFKDSLGNPTHILRIGESYKEKQRTIQAKKEVEQRRAGGYSRKYASKAKNLADDMVRNTARDLLYYAVTQDAMLIFENLSRGFGRQGKRTFMAERQYTRMEDWLTAKLAYEGLPSKTYLSKTLAQYTSKTCSNCGFTITSADYDRVLEKLKKTATGWMTTINGKELKVEGQITYYNRYKRQNVVKDLSVELDRLSEESVNNDISSWTKGRSGEALSLLKKRFSHRPVQEKFVCLNCGFETHADEQAALNIARSWLFLRSQEYKKYQTNKTTGNTDKRAFVETWQSFYRKKLKEVWKPAV

SEQ ID NO: 35438 - protein, 978 aa, synthetic construct
  REGION 1..978: note = engineered CasX variant
QEIKRINKIRRRLVKDSNTKKAGKTGPMKTLLVRVMTPDLRERLENLRKKPENIPQPISNTSRANLNKLLTDYTEMKKAILHVYWEEFQKDPVGLMSRVAQPASKKIDQNKLKPEMDEKGNLTTAGFACSQCGQPLFVYKLEQVSEKGKAYTNYFGRCNVAEHEKLILLAQLKPEKDSDEAVTYSLGKFGQRALDFYSIHVTKESTHPVKPLAQIAGNRYASAPVGKALSDACMGTIASFLSKYQDIIIEHQKVVKGNQKRLESLRELAGKENLEYPSVTLPPQPHTKEGVDAYNEVIARVRMWVNLNLWQKLKLSRDDAKPLLRLKGFPSFPLVERQANEVDWWDMVCNVKKLINEKKEDGKVFWQNLAGYKRQEALRPYLSSEEDRKKGKKFARYQLGDLLLHLEKKHGEDWGKVYDEAWERIDKKVEGLSKHIKLEEERRSEDAQSKAALTDWLRAKASFVIEGLKEADKDEFCRCELKLQKWYGDLRGKPFAIEAENSILDISGFSKQYNCAFIWQKDGVKKLNLYLIINYFKGGKLRFKKIKPEAFEANRFYTVINKKSGEIVPMEVNFNFDDPNLIILPLAFGKRFGREFIWNDLLSLETGSLKLANGRVIEKTLYNRRTRQDEPALFVALTFERREVLDSSNIKPMNLIGVDRGENIPAVIALTDPEGCPLSRFKDSLGNPTHILRIGESYKEKQRTIQAKKEVEQRRAGGYSRKYASKAKNLADDMVRNTARDLLYYAVTQDAMLIFENLSRGFGRQGKRTFMAERQYTRMEDWLTAKLAYEGLPSKTYLSKTLAQYTSKTCSNCGFTITSADYDRVLEKLKKTATGWMTTINGKELKVEGQITYYNRYKRQNVVKDLSVELDRLSEESVNNDISSWTKGRSGEALSLLKKRFSHRPVQEKFVCLNCGFETHADEQAALNIARSWLFLRSQEYKKYQTNKTTGNTDKRAFVETWQSFYRKKLKEVWKPAV

SEQ ID NO: 35439 - protein, 978 aa, synthetic construct
  REGION 1..978: note = engineered CasX variant
QEIKRINKIRRRLVKDSNTKKAGKTGPMKTLLVRVMTPDLRERLENLRKKPENIPQPISNTSRANLNKLLTDYTEMKKAILHVYWEEFQKDPVGLMSRVAQPASKKIDQNKLKPEMDEKGNLTTAGFACSQCGQPLFVYKLEQVSEKGKAYTNYFGRCNVAEHEKLILLAQLKPEKDSDEAVTYSLGKFGQRALDFYSIHVTKESTHPVKPLAQIAGNRYASVPVGKALSDACMGTIASFLSKYQDIIIEHQKVVKGNQKRLESLRELAGKENLEYPSVTLPPQPHTKEGVDAYNEVIARVRMWVNLNLWQKLKLSRDDAKPLLRLKGFPSFPLVERQANEVDWWDMVCNVKKLINEKKEDGKVFWQNLAGYKRQEALRPYLSSEEDRKKGKKFARYQLGDLLLHLEKKHGEDWGKVYDEAWERIDKKVEGLSKHIKLEEERRSEDAQSKAALTDWLRAKASFVIEGLKEADKDEFCRCELKLQKWYGDLRGKPFAIEAENSILDISGFSKQYNCAFIWQKDGVKKLNLYLIINYFKGGKLRFKKIKPEAFEANRFYTVINKKSGEIVPMEVNFNFDDPNLIILPLAFGKRFGREFIWNDLLSLETGSLKLANGRVIEKTLYNRRTRQDEPALFVALTFERREVLDSSNIKPMNLIGVDRGENIPAVIALTDPEGCPLSRFKDSLGNPTHILRIGESYKEKQRTIQAKKEVEQRRAGGYSRKYASKAKNLADDMVRNTARDLLYYAVTQDAMLIFENLSRGFGRQGKRTFMAERQYTRMEDWLTAKLAYEGLPSKTYLSKTLAQYTSKTCSNCGFTITSADYDRVLEKLKKTATGWMTTINGKELKVEGQITYYNRYKRQNVVKDLSVELDRLSEESVNNDISSWTKGRSGEALSLLKKRFSHRPVQEKFVCLNCGFETHADEQAALNIARSWLFLRSQEYKKYQTNKTTGNTDKRAFVETWQSFYRKKLKEVWKPAV

SEQ ID NO: 35440 - protein, 978 aa, synthetic construct
  REGION 1..978: note = engineered CasX variant
QEIKRINKIRRRLVKDSNTKKAGKTGPMKTLLVRVMTPDLRERLENLRKKPENIPQPISNTSRANLNKLLTDYTEMKKAILHVYWEEFQKDPVGLMSRVAQPASKKIDQNKLKPEMDEKGNLTTAGFACSQCGQPLFVYKLEQVSEKGKAYTNYFGRCNVAEHEKLILLAQLKPEKDSDEAVTYSLGKFGQRALDFYSIHVTKESTHPVKPLAQIAGNRYASYPVGKALSDACMGTIASFLSKYQDIIIEHQKVVKGNQKRLESLRELAGKENLEYPSVTLPPQPHTKEGVDAYNEVIARVRMWVNLNLWQKLKLSRDDAKPLLRLKGFPSFPLVERQANEVDWWDMVCNVKKLINEKKEDGKVFWQNLAGYKRQEALRPYLSSEEDRKKGKKFARYQLGDLLLHLEKKHGEDWGKVYDEAWERIDKKVEGLSKHIKLEEERRSEDAQSKAALTDWLRAKASFVIEGLKEADKDEFCRCELKLQKWYGDLRGKPFAIEAENSILDISGFSKQYNCAFIWQKDGVKKLNLYLIINYFKGGKLRFKKIKPEAFEANRFYTVINKKSGEIVPMEVNFNFDDPNLIILPLAFGKRVGREFIWNDLLSLETGSLKLANGRVIEKTLYNRRTRQDEPALFVALTFERREVLDSSNIKPMNLIGVDRGENIPAVIALTDPEGCPLSRFKDSLGNPTHILRIGESYKEKQRTIQAKKEVEQRRAGGYSRKYASKAKNLADDMVRNTARDLLYYAVTQDAMLIFENLSRGFGRQGKRTFMAERQYTRMEDWLTAKLAYEGLPSKTYLSKTLAQYTSKTCSNCGFTITSADYDRVLEKLKKTATGWMTTINGKELKVEGQITYYNRYKRQNVVKDLSVELDRLSEESVNNDISSWTKGRSGEALSLLKKRFSHRPVQEKFVCLNCGFETHADEQAALNIARSWLFLRSQEYKKYQTNKTTGNTDKRAFVETWQSFYRKKLKEVWKPAV

SEQ ID NO: 35441 - protein, 978 aa, synthetic construct
  REGION 1..978: note = engineered CasX variant
QEIKRINKIRRRLVKDSNTKKAGKTGPMKTLLVRVMTPDLRERLENLRKKPENIPQPISNTSRANLNKLLTDYTEMKKAILHVYWEEFQKDPVGLMSRVAQPASKKIDQNKLKPEMDEKGNLTTAGFACSQCGQPLFVYKLEQVSEKGKAYTNYFGRCNVAEHEKLILLAQLKPEKDSDEAVTYSLGKFGQRALDFYSIHVTKESTHPVKPLAQIAGNRYASHPVGKALSDACMGTIASFLSKYQDIIIEHQKVVKGNQKRLESLRELAGKENLEYPSVTLPPQPHTKEGVDAYNEVIARVRMWVNLNLWQKLKLSRDDAKPLLRLKGFPSFPLVERQANEVDWWDMVCNVKKLINEKKEDGKVFWQNLAGYKRQEALRPYLSSEEDRKKGKKFARYQLGDLLLHLEKKHGEDWGKVYDEAWERIDKKVEGLSKHIKLEEERRSEDAQSKAALTDWLRAKASFVIEGLKEADKDEFCRCELKLQKWYGDLRGKPFAIEAENSILDISGFSKQYNCAFIWQKDGVKKLNLYLIINYFKGGKLRFKKIKPEAFEANRFYTVINKKSGEIVPMEVNFNFDDPNLIILPLAFGKRVGREFIWNDLLSLETGSLKLANGRVIEKTLYNRRTRQDEPALFVALTFERREVLDSSNIKPMNLIGVDRGENIPAVIALTDPEGCPLSRFKDSLGNPTHILRIGESYKEKQRTIQAKKEVEQRRAGGYSRKYASKAKNLADDMVRNTARDLLYYAVTQDAMLIFENLSRGFGRQGKRTFMAERQYTRMEDWLTAKLAYEGLPSKTYLSKTLAQYTSKTCSNCGFTITSADYDRVLEKLKKTATGWMTTINGKELKVEGQITYYNRYKRQNVVKDLSVELDRLSEESVNNDISSWTKGRSGEALSLLKKRFSHRPVQEKFVCLNCGFETHADEQAALNIARSWLFLRSQEYKKYQTNKTTGNTDKRAFVETWQSFYRKKLKEVWKPAV

SEQ ID NO: 35442 - protein, 978 aa, synthetic construct
  REGION 1..978: note = engineered CasX variant
QEIKRINKIRRRLVKDSNTKKAGKTGPMKTLLVRVMTPDLRERLENLRKKPENIPQPISNTSRANLNKLLTDYTEMKKAILHVYWEEFQKDPVGLMSRVAQPASKKIDQNKLKPEMDEKGNLTTAGFACSQCGQPLFVYKLEQVSEKGKAYTNYFGRCNVAEHEKLILLAQLKPEKDSDEAVTYSLGKFGQRALDFYSIHVTKESTHPVKPLAQIAGNRYASTPVGKALSDACMGTIASFLSKYQDIIIEHQKVVKGNQKRLESLRELAGKENLEYPSVTLPPQPHTKEGVDAYNEVIARVRMWVNLNLWQKLKLSRDDAKPLLRLKGFPSFPLVERQANEVDWWDMVCNVKKLINEKKEDGKVFWQNLAGYKRQEALRPYLSSEEDRKKGKKFARYQLGDLLLHLEKKHGEDWGKVYDEAWERIDKKVEGLSKHIKLEEERRSEDAQSKAALTDWLRAKASFVIEGLKEADKDEFCRCELKLQKWYGDLRGKPFAIEAENSILDISGFSKQYNCAFIWQKDGVKKLNLYLIINYFKGGKLRFKKIKPEAFEANRFYTVINKKSGEIVPMEVNFNFDDPNLIILPLAFGKRVGREFIWNDLLSLETGSLKLANGRVIEKTLYNRRTRQDEPALFVALTFERREVLDSSNIKPMNLIGVDRGENIPAVIALTDPEGCPLSRFKDSLGNPTHILRIGESYKEKQRTIQAKKEVEQRRAGGYSRKYASKAKNLADDMVRNTARDLLYYAVTQDAMLIFENLSRGFGRQGKRTFMAERQYTRMEDWLTAKLAYEGLPSKTYLSKTLAQYTSKTCSNCGFTITSADYDRVLEKLKKTATGWMTTINGKELKVEGQITYYNRYKRQNVVKDLSVELDRLSEESVNNDISSWTKGRSGEALSLLKKRFSHRPVQEKFVCLNCGFETHADEQAALNIARSWLFLRSQEYKKYQTNKTTGNTDKRAFVETWQSFYRKKLKEVWKPAV

SEQ ID NO: 35443 - protein, 978 aa, synthetic construct
  REGION 1..978: note = engineered CasX variant
QEIKRINKIRRRLVKDSNTKKAGKTGPMKTLLVRVMTPDLRERLENLRKKPENIPQPISNTSRANLNKLLTDYTEMKKAILHVYWEEFQKDPVGLMSRVAQPASKKIDQNKLKPEMDEKGNLTTAGFACSQCGQPLFVYKLEQVSEKGKAYTNYFGRCNVAEHEKLILLAQLKPEKDSDEAVTYSLGKFGQRALDFYSIHVTKESTHPVKPLAQIAGNRYASAPVGKALSDACMGTIASFLSKYQDIIIEHQKVVKGNQKRLESLRELAGKENLEYPSVTLPPQPHTKEGVDAYNEVIARVRMWVNLNLWQKLKLSRDDAKPLLRLKGFPSFPLVERQANEVDWWDMVCNVKKLINEKKEDGKVFWQNLAGYKRQEALRPYLSSEEDRKKGKKFARYQLGDLLLHLEKKHGEDWGKVYDEAWERIDKKVEGLSKHIKLEEERRSEDAQSKAALTDWLRAKASFVIEGLKEADKDEFCRCELKLQKWYGDLRGKPFAIEAENSILDISGFSKQYNCAFIWQKDGVKKLNLYLIINYFKGGKLRFKKIKPEAFEANRFYTVINKKSGEIVPMEVNFNFDDPNLIILPLAFGKRVGREFIWNDLLSLETGSLKLANGRVIEKTLYNRRTRQDEPALFVALTFERREVLDSSNIKPMNLIGVDRGENIPAVIALTDPEGCPLSRFKDSLGNPTHILRIGESYKEKQRTIQAKKEVEQRRAGGYSRKYASKAKNLADDMVRNTARDLLYYAVTQDAMLIFENLSRGFGRQGKRTFMAERQYTRMEDWLTAKLAYEGLPSKTYLSKTLAQYTSKTCSNCGFTITSADYDRVLEKLKKTATGWMTTINGKELKVEGQITYYNRYKRQNVVKDLSVELDRLSEESVNNDISSWTKGRSGEALSLLKKRFSHRPVQEKFVCLNCGFETHADEQAALNIARSWLFLRSQEYKKYQTNKTTGNTDKRAFVETWQSFYRKKLKEVWKPAV

SEQ ID NO: 35444 - protein, 978 aa, synthetic construct
  REGION 1..978: note = engineered CasX variant
QEIKRINKIRRRLVKDSNTKKAGKTGPMKTLLVRVMTPDLRERLENLRKKPENIPQPISNTSRANLNKLLTDYTEMKKAILHVYWEEFQKDPVGLMSRVAQPASKKIDQNKLKPEMDEKGNLTTAGFACSQCGQPLFVYKLEQVSEKGKAYTNYFGRCNVAEHEKLILLAQLKPEKDSDEAVTYSLGKFGQRALDFYSIHVTKESTHPVKPLAQIAGNRYASVPVGKALSDACMGTIASFLSKYQDIIIEHQKVVKGNQKRLESLRELAGKENLEYPSVTLPPQPHTKEGVDAYNEVIARVRMWVNLNLWQKLKLSRDDAKPLLRLKGFPSFPLVERQANEVDWWDMVCNVKKLINEKKEDGKVFWQNLAGYKRQEALRPYLSSEEDRKKGKKFARYQLGDLLLHLEKKHGEDWGKVYDEAWERIDKKVEGLSKHIKLEEERRSEDAQSKAALTDWLRAKASFVIEGLKEADKDEFCRCELKLQKWYGDLRGKPFAIEAENSILDISGFSKQYNCAFIWQKDGVKKLNLYLIINYFKGGKLRFKKIKPEAFEANRFYTVINKKSGEIVPMEVNFNFDDPNLIILPLAFGKRVGREFIWNDLLSLETGSLKLANGRVIEKTLYNRRTRQDEPALFVALTFERREVLDSSNIKPMNLIGVDRGENIPAVIALTDPEGCPLSRFKDSLGNPTHILRIGESYKEKQRTIQAKKEVEQRRAGGYSRKYASKAKNLADDMVRNTARDLLYYAVTQDAMLIFENLSRGFGRQGKRTFMAERQYTRMEDWLTAKLAYEGLPSKTYLSKTLAQYTSKTCSNCGFTITSADYDRVLEKLKKTATGWMTTINGKELKVEGQITYYNRYKRQNVVKDLSVELDRLSEESVNNDISSWTKGRSGEALSLLKKRFSHRPVQEKFVCLNCGFETHADEQAALNIARSWLFLRSQEYKKYQTNKTTGNTDKRAFVETWQSFYRKKLKEVWKPAV

SEQ ID NO: 35445 - protein, 979 aa, synthetic construct
  REGION 1..979: note = engineered CasX variant
QEIKRINKIRRRLVKDSNTKKAGKTGPMKTLLVRVMTPDLRERLENLRKKPENIPQPISNTSRANLNKLLTDYTEMKKAILHVYWEEFQKDPVGLMSRVAQPASKKIDQNKLKPEMDEKGNLTTAGFACSQCGQPLFVYKLEQVSEKGKAYTNYFGRCNVAEHEKLILLAQLKPEKDSDEAVTYSLGKFGQRALDFYSIHVTKESTHPVKPLAQIAGNRYASYPVGKALSDACMGTIASFLSKYQDIIIEHQKVVKGNQKRLESLRELAGKENLEYPSVTLPPQPHTKEGVDAYNEVIARVRMWVNLNLWQKLKLSRDDAKPLLRLKGFPSFPLVERQANEVDWWDMVCNVKKLINEKKEDGKVFWQNLAGYKRQEALRPYLSSEEDRKKGKKFARYQLGDLLLHLEKKHGEDWGKVYDEAWERIDKKVEGLSKHIKLEEERRSEDAQSKAALTDWLRAKASFVIEGLKEADKDEFCRCELKLQKWYGDLRGKPFAIEAENSILDISGFSKQYNCAFIWQKDGVKKLNLYLIINYFKGGKLRFKKIKPEAFEANRFYTVINKKSGEIVPMEVNFNFDDPNLIILPLAFGKRQGREFIWNDLLSLETGSLKLANGRVIEKTLYNRRTRQDEPALFVALTFERREVLDSSNIKTPMNLIGVDRGENIPAVIALTDPEGCPLSRFKDSLGNPTHILRIGESYKEKQRTIQAKKEVEQRRAGGYSRKYASKAKNLADDMVRNTARDLLYYAVTQDAMLIFENLSRGFGRQGKRTFMAERQYTRMEDWLTAKLAYEGLPSKTYLSKTLAQYTSKTCSNCGFTITSADYDRVLEKLKKTATGWMTTINGKELKVEGQITYYNRYKRQNVVKDLSVELDRLSEESVNNDISSWTKGRSGEALSLLKKRFSHRPVQEKFVCLNCGFETHADEQAALNIARSWLFLRSQEYKKYQTNKTTGNTDKRAFVETWQSFYRKKLKEVWKPAV

SEQ ID NO: 35446 - protein, 979 aa, synthetic construct
  REGION 1..979: note = engineered CasX variant
QEIKRINKIRRRLVKDSNTKKAGKTGPMKTLLVRVMTPDLRERLENLRKKPENIPQPISNTSRANLNKLLTDYTEMKKAILHVYWEEFQKDPVGLMSRVAQPASKKIDQNKLKPEMDEKGNLTTAGFACSQCGQPLFVYKLEQVSEKGKAYTNYFGRCNVAEHEKLILLAQLKPEKDSDEAVTYSLGKFGQRALDFYSIHVTKESTHPVKPLAQIAGNRYASHPVGKALSDACMGTIASFLSKYQDIIIEHQKVVKGNQKRLESLRELAGKENLEYPSVTLPPQPHTKEGVDAYNEVIARVRMWVNLNLWQKLKLSRDDAKPLLRLKGFPSFPLVERQANEVDWWDMVCNVKKLINEKKEDGKVFWQNLAGYKRQEALRPYLSSEEDRKKGKKFARYQLGDLLLHLEKKHGEDWGKVYDEAWERIDKKVEGLSKHIKLEEERRSEDAQSKAALTDWLRAKASFVIEGLKEADKDEFCRCELKLQKWYGDLRGKPFAIEAENSILDISGFSKQYNCAFIWQKDGVKKLNLYLIINYFKGGKLRFKKIKPEAFEANRFYTVINKKSGEIVPMEVNFNFDDPNLIILPLAFGKRQGREFIWNDLLSLETGSLKLANGRVIEKTLYNRRTRQDEPALFVALTFERREVLDSSNIKTPMNLIGVDRGENIPAVIALTDPEGCPLSRFKDSLGNPTHILRIGESYKEKQRTIQAKKEVEQRRAGGYSRKYASKAKNLADDMVRNTARDLLYYAVTQDAMLIFENLSRGFGRQGKRTFMAERQYTRMEDWLTAKLAYEGLPSKTYLSKTLAQYTSKTCSNCGFTITSADYDRVLEKLKKTATGWMTTINGKELKVEGQITYYNRYKRQNVVKDLSVELDRLSEESVNNDISSWTKGRSGEALSLLKKRFSHRPVQEKFVCLNCGFETHADEQAALNIARSWLFLRSQEYKKYQTNKTTGNTDKRAFVETWQSFYRKKLKEVWKPAV

SEQ ID NO: 35447 - protein, 979 aa, synthetic construct
  REGION 1..979: note = engineered CasX variant
QEIKRINKIRRRLVKDSNTKKAGKTGPMKTLLVRVMTPDLRERLENLRKKPENIPQPISNTSRANLNKLLTDYTEMKKAILHVYWEEFQKDPVGLMSRVAQPASKKIDQNKLKPEMDEKGNLTTAGFACSQCGQPLFVYKLEQVSEKGKAYTNYFGRCNVAEHEKLILLAQLKPEKDSDEAVTYSLGKFGQRALDFYSIHVTKESTHPVKPLAQIAGNRYASTPVGKALSDACMGTIASFLSKYQDIIIEHQKVVKGNQKRLESLRELAGKENLEYPSVTLPPQPHTKEGVDAYNEVIARVRMWVNLNLWQKLKLSRDDAKPLLRLKGFPSFPLVERQANEVDWWDMVCNVKKLINEKKEDGKVFWQNLAGYKRQEALRPYLSSEEDRKKGKKFARYQLGDLLLHLEKKHGEDWGKVYDEAWERIDKKVEGLSKHIKLEEERRSEDAQSKAALTDWLRAKASFVIEGLKEADKDEFCRCELKLQKWYGDLRGKPFAIEAENSILDISGFSKQYNCAFIWQKDGVKKLNLYLIINYFKGGKLRFKKIKPEAFEANRFYTVINKKSGEIVPMEVNFNFDDPNLIILPLAFGKRQGREFIWNDLLSLETGSLKLANGRVIEKTLYNRRTRQDEPALFVALTFERREVLDSSNIKTPMNLIGVDRGENIPAVIALTDPEGCPLSRFKDSLGNPTHILRIGESYKEKQRTIQAKKEVEQRRAGGYSRKYASKAKNLADDMVRNTARDLLYYAVTQDAMLIFENLSRGFGRQGKRTFMAERQYTRMEDWLTAKLAYEGLPSKTYLSKTLAQYTSKTCSNCGFTITSADYDRVLEKLKKTATGWMTTINGKELKVEGQITYYNRYKRQNVVKDLSVELDRLSEESVNNDISSWTKGRSGEALSLLKKRFSHRPVQEKFVCLNCGFETHADEQAALNIARSWLFLRSQEYKKYQTNKTTGNTDKRAFVETWQSFYRKKLKEVWKPAV

SEQ ID NO: 35448 - protein, 979 aa, synthetic construct
  REGION 1..979: note = engineered CasX variant
QEIKRINKIRRRLVKDSNTKKAGKTGPMKTLLVRVMTPDLRERLENLRKKPENIPQPISNTSRANLNKLLTDYTEMKKAILHVYWEEFQKDPVGLMSRVAQPASKKIDQNKLKPEMDEKGNLTTAGFACSQCGQPLFVYKLEQVSEKGKAYTNYFGRCNVAEHEKLILLAQLKPEKDSDEAVTYSLGKFGQRALDFYSIHVTKESTHPVKPLAQIAGNRYASAPVGKALSDACMGTIASFLSKYQDIIIEHQKVVKGNQKRLESLRELAGKENLEYPSVTLPPQPHTKEGVDAYNEVIARVRMWVNLNLWQKLKLSRDDAKPLLRLKGFPSFPLVERQANEVDWWDMVCNVKKLINEKKEDGKVFWQNLAGYKRQEALRPYLSSEEDRKKGKKFARYQLGDLLLHLEKKHGEDWGKVYDEAWERIDKKVEGLSKHIKLEEERRSEDAQSKAALTDWLRAKASFVIEGLKEADKDEFCRCELKLQKWYGDLRGKPFAIEAENSILDISGFSKQYNCAFIWQKDGVKKLNLYLIINYFKGGKLRFKKIKPEAFEANRFYTVINKKSGEIVPMEVNFNFDDPNLIILPLAFGKRQGREFIWNDLLSLETGSLKLANGRVIEKTLYNRRTRQDEPALFVALTFERREVLDSSNIKTPMNLIGVDRGENIPAVIALTDPEGCPLSRFKDSLGNPTHILRIGESYKEKQRTIQAKKEVEQRRAGGYSRKYASKAKNLADDMVRNTARDLLYYAVTQDAMLIFENLSRGFGRQGKRTFMAERQYTRMEDWLTAKLAYEGLPSKTYLSKTLAQYTSKTCSNCGFTITSADYDRVLEKLKKTATGWMTTINGKELKVEGQITYYNRYKRQNVVKDLSVELDRLSEESVNNDISSWTKGRSGEALSLLKKRFSHRPVQEKFVCLNCGFETHADEQAALNIARSWLFLRSQEYKKYQTNKTTGNTDKRAFVETWQSFYRKKLKEVWKPAV

SEQ ID NO: 35449 - protein, 979 aa, synthetic construct
  REGION 1..979: note = engineered CasX variant
QEIKRINKIRRRLVKDSNTKKAGKTGPMKTLLVRVMTPDLRERLENLRKKPENIPQPISNTSRANLNKLLTDYTEMKKAILHVYWEEFQKDPVGLMSRVAQPASKKIDQNKLKPEMDEKGNLTTAGFACSQCGQPLFVYKLEQVSEKGKAYTNYFGRCNVAEHEKLILLAQLKPEKDSDEAVTYSLGKFGQRALDFYSIHVTKESTHPVKPLAQIAGNRYASVPVGKALSDACMGTIASFLSKYQDIIIEHQKVVKGNQKRLESLRELAGKENLEYPSVTLPPQPHTKEGVDAYNEVIARVRMWVNLNLWQKLKLSRDDAKPLLRLKGFPSFPLVERQANEVDWWDMVCNVKKLINEKKEDGKVFWQNLAGYKRQEALRPYLSSEEDRKKGKKFARYQLGDLLLHLEKKHGEDWGKVYDEAWERIDKKVEGLSKHIKLEEERRSEDAQSKAALTDWLRAKASFVIEGLKEADKDEFCRCELKLQKWYGDLRGKPFAIEAENSILDISGFSKQYNCAFIWQKDGVKKLNLYLIINYFKGGKLRFKKIKPEAFEANRFYTVINKKSGEIVPMEVNFNFDDPNLIILPLAFGKRQGREFIWNDLLSLETGSLKLANGRVIEKTLYNRRTRQDEPALFVALTFERREVLDSSNIKTPMNLIGVDRGENIPAVIALTDPEGCPLSRFKDSLGNPTHILRIGESYKEKQRTIQAKKEVEQRRAGGYSRKYASKAKNLADDMVRNTARDLLYYAVTQDAMLIFENLSRGFGRQGKRTFMAERQYTRMEDWLTAKLAYEGLPSKTYLSKTLAQYTSKTCSNCGFTITSADYDRVLEKLKKTATGWMTTINGKELKVEGQITYYNRYKRQNVVKDLSVELDRLSEESVNNDISSWTKGRSGEALSLLKKRFSHRPVQEKFVCLNCGFETHADEQAALNIARSWLFLRSQEYKKYQTNKTTGNTDKRAFVETWQSFYRKKLKEVWKPAV

SEQ ID NO: 35450 - protein, 979 aa, synthetic construct
  REGION 1..979: note = engineered CasX variant
QEIKRINKIRRRLVKDSNTKKAGKTGPMKTLLVRVMTPDLRERLENLRKKPENIPQPISNTSRANLNKLLTDYTEMKKAILHVYWEEFQKDPVGLMSRVAQPASKKIDQNKLKPEMDEKGNLTTAGFACSQCGQPLFVYKLEQVSEKGKAYTNYFGRCNVAEHEKLILLAQLKPEKDSDEAVTYSLGKFGQRALDFYSIHVTKESTHPVKPLAQIAGNRYASYPVGKALSDACMGTIASFLSKYQDIIIEHQKVVKGNQKRLESLRELAGKENLEYPSVTLPPQPHTKEGVDAYNEVIARVRMWVNLNLWQKLKLSRDDAKPLLRLKGFPSFPLVERQANEVDWWDMVCNVKKLINEKKEDGKVFWQNLAGYKRQEALRPYLSSEEDRKKGKKFARYQLGDLLLHLEKKHGEDWGKVYDEAWERIDKKVEGLSKHIKLEEERRSEDAQSKAALTDWLRAKASFVIEGLKEADKDEFCRCELKLQKWYGDLRGKPFAIEAENSILDISGFSKQYNCAFIWQKDGVKKLNLYLIINYFKGGKLRFKKIKPEAFEANRFYTVINKKSGEIVPMEVNFNFDDPNLIILPLAFGKRQGREFIWNDLLSLETGSLKLANGRVIEKTLYNRRTRQDEPALFVALTFERREVLDSSNIKPMSNLIGVDRGENIPAVIALTDPEGCPLSRFKDSLGNPTHILRIGESYKEKQRTIQAKKEVEQRRAGGYSRKYASKAKNLADDMVRNTARDLLYYAVTQDAMLIFENLSRGFGRQGKRTFMAERQYTRMEDWLTAKLAYEGLPSKTYLSKTLAQYTSKTCSNCGFTITSADYDRVLEKLKKTATGWMTTINGKELKVEGQITYYNRYKRQNVVKDLSVELDRLSEESVNNDISSWTKGRSGEALSLLKKRFSHRPVQEKFVCLNCGFETHADEQAALNIARSWLFLRSQEYKKYQTNKTTGNTDKRAFVETWQSFYRKKLKEVWKPAV

SEQ ID NO: 35451 - protein, 979 aa, synthetic construct
  REGION 1..979: note = engineered CasX variant
QEIKRINKIRRRLVKDSNTKKAGKTGPMKTLLVRVMTPDLRERLENLRKKPENIPQPISNTSRANLNKLLTDYTEMKKAILHVYWEEFQKDPVGLMSRVAQPASKKIDQNKLKPEMDEKGNLTTAGFACSQCGQPLFVYKLEQVSEKGKAYTNYFGRCNVAEHEKLILLAQLKPEKDSDEAVTYSLGKFGQRALDFYSIHVTKESTHPVKPLAQIAGNRYASHPVGKALSDACMGTIASFLSKYQDIIIEHQKVVKGNQKRLESLRELAGKENLEYPSVTLPPQPHTKEGVDAYNEVIARVRMWVNLNLWQKLKLSRDDAKPLLRLKGFPSFPLVERQANEVDWWDMVCNVKKLINEKKEDGKVFWQNLAGYKRQEALRPYLSSEEDRKKGKKFARYQLGDLLLHLEKKHGEDWGKVYDEAWERIDKKVEGLSKHIKLEEERRSEDAQSKAALTDWLRAKASFVIEGLKEADKDEFCRCELKLQKWYGDLRGKPFAIEAENSILDISGFSKQYNCAFIWQKDGVKKLNLYLIINYFKGGKLRFKKIKPEAFEANRFYTVINKKSGEIVPMEVNFNFDDPNLIILPLAFGKRQGREFIWNDLLSLETGSLKLANGRVIEKTLYNRRTRQDEPALFVALTFERREVLDSSNIKPMSNLIGVDRGENIPAVIALTDPEGCPLSRFKDSLGNPTHILRIGESYKEKQRTIQAKKEVEQRRAGGYSRKYASKAKNLADDMVRNTARDLLYYAVTQDAMLIFENLSRGFGRQGKRTFMAERQYTRMEDWLTAKLAYEGLPSKTYLSKTLAQYTSKTCSNCGFTITSADYDRVLEKLKKTATGWMTTINGKELKVEGQITYYNRYKRQNVVKDLSVELDRLSEESVNNDISSWTKGRSGEALSLLKKRFSHRPVQEKFVCLNCGFETHADEQAALNIARSWLFLRSQEYKKYQTNKTTGNTDKRAFVETWQSFYRKKLKEVWKPAV

SEQ ID NO: 35452 - protein, 979 aa, synthetic construct
  REGION 1..979: note = engineered CasX variant
QEIKRINKIRRRLVKDSNTKKAGKTGPMKTLLVRVMTPDLRERLENLRKKPENIPQPISNTSRANLNKLLTDYTEMKKAILHVYWEEFQKDPVGLMSRVAQPASKKIDQNKLKPEMDEKGNLTTAGFACSQCGQPLFVYKLEQVSEKGKAYTNYFGRCNVAEHEKLILLAQLKPEKDSDEAVTYSLGKFGQRALDFYSIHVTKESTHPVKPLAQIAGNRYASTPVGKALSDACMGTIASFLSKYQDIIIEHQKVVKGNQKRLESLRELAGKENLEYPSVTLPPQPHTKEGVDAYNEVIARVRMWVNLNLWQKLKLSRDDAKPLLRLKGFPSFPLVERQANEVDWWDMVCNVKKLINEKKEDGKVFWQNLAGYKRQEALRPYLSSEEDRKKGKKFARYQLGDLLLHLEKKHGEDWGKVYDEAWERIDKKVEGLSKHIKLEEERRSEDAQSKAALTDWLRAKASFVIEGLKEADKDEFCRCELKLQKWYGDLRGKPFAIEAENSILDISGFSKQYNCAFIWQKDGVKKLNLYLIINYFKGGKLRFKKIKPEAFEANRFYTVINKKSGEIVPMEVNFNFDDPNLIILPLAFGKRQGREFIWNDLLSLETGSLKLANGRVIEKTLYNRRTRQDEPALFVALTFERREVLDSSNIKPMSNLIGVDRGENIPAVIALTDPEGCPLSRFKDSLGNPTHILRIGESYKEKQRTIQAKKEVEQRRAGGYSRKYASKAKNLADDMVRNTARDLLYYAVTQDAMLIFENLSRGFGRQGKRTFMAERQYTRMEDWLTAKLAYEGLPSKTYLSKTLAQYTSKTCSNCGFTITSADYDRVLEKLKKTATGWMTTINGKELKVEGQITYYNRYKRQNVVKDLSVELDRLSEESVNNDISSWTKGRSGEALSLLKKRFSHRPVQEKFVCLNCGFETHADEQAALNIARSWLFLRSQEYKKYQTNKTTGNTDKRAFVETWQSFYRKKLKEVWKPAV

SEQ ID NO: 35453 - protein, 979 aa, synthetic construct
  REGION 1..979: note = engineered CasX variant
QEIKRINKIRRRLVKDSNTKKAGKTGPMKTLLVRVMTPDLRERLENLRKKPENIPQPISNTSRANLNKLLTDYTEMKKAILHVYWEEFQKDPVGLMSRVAQPASKKIDQNKLKPEMDEKGNLTTAGFACSQCGQPLFVYKLEQVSEKGKAYTNYFGRCNVAEHEKLILLAQLKPEKDSDEAVTYSLGKFGQRALDFYSIHVTKESTHPVKPLAQIAGNRYASAPVGKALSDACMGTIASFLSKYQDIIIEHQKVVKGNQKRLESLRELAGKENLEYPSVTLPPQPHTKEGVDAYNEVIARVRMWVNLNLWQKLKLSRDDAKPLLRLKGFPSFPLVERQANEVDWWDMVCNVKKLINEKKEDGKVFWQNLAGYKRQEALRPYLSSEEDRKKGKKFARYQLGDLLLHLEKKHGEDWGKVYDEAWERIDKKVEGLSKHIKLEEERRSEDAQSKAALTDWLRAKASFVIEGLKEADKDEFCRCELKLQKWYGDLRGKPFAIEAENSILDISGFSKQYNCAFIWQKDGVKKLNLYLIINYFKGGKLRFKKIKPEAFEANRFYTVINKKSGEIVPMEVNFNFDDPNLIILPLAFGKRQGREFIWNDLLSLETGSLKLANGRVIEKTLYNRRTRQDEPALFVALTFERREVLDSSNIKPMSNLIGVDRGENIPAVIALTDPEGCPLSRFKDSLGNPTHILRIGESYKEKQRTIQAKKEVEQRRAGGYSRKYASKAKNLADDMVRNTARDLLYYAVTQDAMLIFENLSRGFGRQGKRTFMAERQYTRMEDWLTAKLAYEGLPSKTYLSKTLAQYTSKTCSNCGFTITSADYDRVLEKLKKTATGWMTTINGKELKVEGQITYYNRYKRQNVVKDLSVELDRLSEESVNNDISSWTKGRSGEALSLLKKRFSHRPVQEKFVCLNCGFETHADEQAALNIARSWLFLRSQEYKKYQTNKTTGNTDKRAFVETWQSFYRKKLKEVWKPAV

SEQ ID NO: 35454 - protein, 979 aa, synthetic construct
  REGION 1..979: note = engineered CasX variant
QEIKRINKIRRRLVKDSNTKKAGKTGPMKTLLVRVMTPDLRERLENLRKKPENIPQPISNTSRANLNKLLTDYTEMKKAILHVYWEEFQKDPVGLMSRVAQPASKKIDQNKLKPEMDEKGNLTTAGFACSQCGQPLFVYKLEQVSEKGKAYTNYFGRCNVAEHEKLILLAQLKPEKDSDEAVTYSLGKFGQRALDFYSIHVTKESTHPVKPLAQIAGNRYASVPVGKALSDACMGTIASFLSKYQDIIIEHQKVVKGNQKRLESLRELAGKENLEYPSVTLPPQPHTKEGVDAYNEVIARVRMWVNLNLWQKLKLSRDDAKPLLRLKGFPSFPLVERQANEVDWWDMVCNVKKLINEKKEDGKVFWQNLAGYKRQEALRPYLSSEEDRKKGKKFARYQLGDLLLHLEKKHGEDWGKVYDEAWERIDKKVEGLSKHIKLEEERRSEDAQSKAALTDWLRAKASFVIEGLKEADKDEFCRCELKLQKWYGDLRGKPFAIEAENSILDISGFSKQYNCAFIWQKDGVKKLNLYLIINYFKGGKLRFKKIKPEAFEANRFYTVINKKSGEIVPMEVNFNFDDPNLIILPLAFGKRQGREFIWNDLLSLETGSLKLANGRVIEKTLYNRRTRQDEPALFVALTFERREVLDSSNIKPMSNLIGVDRGENIPAVIALTDPEGCPLSRFKDSLGNPTHILRIGESYKEKQRTIQAKKEVEQRRAGGYSRKYASKAKNLADDMVRNTARDLLYYAVTQDAMLIFENLSRGFGRQGKRTFMAERQYTRMEDWLTAKLAYEGLPSKTYLSKTLAQYTSKTCSNCGFTITSADYDRVLEKLKKTATGWMTTINGKELKVEGQITYYNRYKRQNVVKDLSVELDRLSEESVNNDISSWTKGRSGEALSLLKKRFSHRPVQEKFVCLNCGFETHADEQAALNIARSWLFLRSQEYKKYQTNKTTGNTDKRAFVETWQSFYRKKLKEVWKPAV

SEQ ID NO: 35455 - protein, 978 aa, synthetic construct
  REGION 1..978: note = engineered CasX variant
QEIKRINKIRRRLVKDSNTKKAGKTGPMKTLLVRVMTPDLRERLENLRKKPENIPQPISNTSRANLNKLLTDYTEMKKAILHVYWEEFQKDPVGLMSRVAQPASKKIDQNKLKPEMDEKGNLTTAGFACSQCGQPLFVYKLEQVSEKGKAYTNYFGRCNVAEHEKLILLAQLKPEKDSDEAVTYSLGKFGQRALDFYSIHVTKESTHPVKPLAQIAGNRYASYPVGKALSDACMGTIASFLSKYQDIIIEHQKVVKGNQKRLESLRELAGKENLEYPSVTLPPQPHTKEGVDAYNEVIARVRMWVNLNLWQKLKLSRDDAKPLLRLKGFPSFPLVERQANEVDWWDMVCNVKKLINEKKEDGKVFWQNLAGYKRQEALRPYLSSEEDRKKGKKFARYQLGDLLLHLEKKHGEDWGKVYDEAWERIDKKVEGLSKHIKLEEERRSEDAQSKAALTDWLRAKASFVIEGLKEADKDEFCRCELKLQKWYGDLRGKPFAIEAENSILDISGFSKQYNCAFIWQKDGVKKLNLYLIINYFKGGKLRFKKIKPEAFEANRFYTVINKKSGEIVPMEVNFNFDDPNLIILPLAFGKRQGREFIWNDLLSLETGSLKLANGRVIEKTLYNRRTRQDEPALFVALTFERREVLDSSNIKPMNLIGVDRGENIPAVIALTDPEGCPLSRFKDSLGNPTHILRIRESYKEKQRTIQAKKEVEQRRAGGYSRKYASKAKNLADDMVRNTARDLLYYAVTQDAMLIFENLSRGFGRQGKRTFMAERQYTRMEDWLTAKLAYEGLPSKTYLSKTLAQYTSKTCSNCGFTITSADYDRVLEKLKKTATGWMTTINGKELKVEGQITYYNRYKRQNVVKDLSVELDRLSEESVNNDISSWTKGRSGEALSLLKKRFSHRPVQEKFVCLNCGFETHADEQAALNIARSWLFLRSQEYKKYQTNKTTGNTDKRAFVETWQSFYRKKLKEVWKPAV

SEQ ID NO: 35456 - protein, 978 aa, synthetic construct
  REGION 1..978: note = engineered CasX variant
QEIKRINKIRRRLVKDSNTKKAGKTGPMKTLLVRVMTPDLRERLENLRKKPENIPQPISNTSRANLNKLLTDYTEMKKAILHVYWEEFQKDPVGLMSRVAQPASKKIDQNKLKPEMDEKGNLTTAGFACSQCGQPLFVYKLEQVSEKGKAYTNYFGRCNVAEHEKLILLAQLKPEKDSDEAVTYSLGKFGQRALDFYSIHVTKESTHPVKPLAQIAGNRYASHPVGKALSDACMGTIASFLSKYQDIIIEHQKVVKGNQKRLESLRELAGKENLEYPSVTLPPQPHTKEGVDAYNEVIARVRMWVNLNLWQKLKLSRDDAKPLLRLKGFPSFPLVERQANEVDWWDMVCNVKKLINEKKEDGKVFWQNLAGYKRQEALRPYLSSEEDRKKGKKFARYQLGDLLLHLEKKHGEDWGKVYDEAWERIDKKVEGLSKHIKLEEERRSEDAQSKAALTDWLRAKASFVIEGLKEADKDEFCRCELKLQKWYGDLRGKPFAIEAENSILDISGFSKQYNCAFIWQKDGVKKLNLYLIINYFKGGKLRFKKIKPEAFEANRFYTVINKKSGEIVPMEVNFNFDDPNLIILPLAFGKRQGREFIWNDLLSLETGSLKLANGRVIEKTLYNRRTRQDEPALFVALTFERREVLDSSNIKPMNLIGVDRGENIPAVIALTDPEGCPLSRFKDSLGNPTHILRIRESYKEKQRTIQAKKEVEQRRAGGYSRKYASKAKNLADDMVRNTARDLLYYAVTQDAMLIFENLSRGFGRQGKRTFMAERQYTRMEDWLTAKLAYEGLPSKTYLSKTLAQYTSKTCSNCGFTITSADYDRVLEKLKKTATGWMTTINGKELKVEGQITYYNRYKRQNVVKDLSVELDRLSEESVNNDISSWTKGRSGEALSLLKKRFSHRPVQEKFVCLNCGFETHADEQAALNIARSWLFLRSQEYKKYQTNKTTGNTDKRAFVETWQSFYRKKLKEVWKPAV

SEQ ID NO: 35457 - protein, 978 aa, synthetic construct
  REGION 1..978: note = engineered CasX variant
QEIKRINKIRRRLVKDSNTKKAGKTGPMKTLLVRVMTPDLRERLENLRKKPENIPQPISNTSRANLNKLLTDYTEMKKAILHVYWEEFQKDPVGLMSRVAQPASKKIDQNKLKPEMDEKGNLTTAGFACSQCGQPLFVYKLEQVSEKGKAYTNYFGRCNVAEHEKLILLAQLKPEKDSDEAVTYSLGKFGQRALDFYSIHVTKESTHPVKPLAQIAGNRYASTPVGKALSDACMGTIASFLSKYQDIIIEHQKVVKGNQKRLESLRELAGKENLEYPSVTLPPQPHTKEGVDAYNEVIARVRMWVNLNLWQKLKLSRDDAKPLLRLKGFPSFPLVERQANEVDWWDMVCNVKKLINEKKEDGKVFWQNLAGYKRQEALRPYLSSEEDRKKGKKFARYQLGDLLLHLEKKHGEDWGKVYDEAWERIDKKVEGLSKHIKLEEERRSEDAQSKAALTDWLRAKASFVIEGLKEADKDEFCRCELKLQKWYGDLRGKPFAIEAENSILDISGFSKQYNCAFIWQKDGVKKLNLYLIINYFKGGKLRFKKIKPEAFEANRFYTVINKKSGEIVPMEVNFNFDDPNLIILPLAFGKRQGREFIWNDLLSLETGSLKLANGRVIEKTLYNRRTRQDEPALFVALTFERREVLDSSNIKPMNLIGVDRGENIPAVIALTDPEGCPLSRFKDSLGNPTHILRIRESYKEKQRTIQAKKEVEQRRAGGYSRKYASKAKNLADDMVRNTARDLLYYAVTQDAMLIFENLSRGFGRQGKRTFMAERQYTRMEDWLTAKLAYEGLPSKTYLSKTLAQYTSKTCSNCGFTITSADYDRVLEKLKKTATGWMTTINGKELKVEGQITYYNRYKRQNVVKDLSVELDRLSEESVNNDISSWTKGRSGEALSLLKKRFSHRPVQEKFVCLNCGFETHADEQAALNIARSWLFLRSQEYKKYQTNKTTGNTDKRAFVETWQSFYRKKLKEVWKPAV

SEQ ID NO: 35458 - protein, 978 aa, synthetic construct
  REGION 1..978: note = engineered CasX variant
QEIKRINKIRRRLVKDSNTKKAGKTGPMKTLLVRVMTPDLRERLENLRKKPENIPQPISNTSRANLNKLLTDYTEMKKAILHVYWEEFQKDPVGLMSRVAQPASKKIDQNKLKPEMDEKGNLTTAGFACSQCGQPLFVYKLEQVSEKGKAYTNYFGRCNVAEHEKLILLAQLKPEKDSDEAVTYSLGKFGQRALDFYSIHVTKESTHPVKPLAQIAGNRYASAPVGKALSDACMGTIASFLSKYQDIIIEHQKVVKGNQKRLESLRELAGKENLEYPSVTLPPQPHTKEGVDAYNEVIARVRMWVNLNLWQKLKLSRDDAKPLLRLKGFPSFPLVERQANEVDWWDMVCNVKKLINEKKEDGKVFWQNLAGYKRQEALRPYLSSEEDRKKGKKFARYQLGDLLLHLEKKHGEDWGKVYDEAWERIDKKVEGLSKHIKLEEERRSEDAQSKAALTDWLRAKASFVIEGLKEADKDEFCRCELKLQKWYGDLRGKPFAIEAENSILDISGFSKQYNCAFIWQKDGVKKLNLYLIINYFKGGKLRFKKIKPEAFEANRFYTVINKKSGEIVPMEVNFNFDDPNLIILPLAFGKRQGREFIWNDLLSLETGSLKLANGRVIEKTLYNRRTRQDEPALFVALTFERREVLDSSNIKPMNLIGVDRGENIPAVIALTDPEGCPLSRFKDSLGNPTHILRIRESYKEKQRTIQAKKEVEQRRAGGYSRKYASKAKNLADDMVRNTARDLLYYAVTQDAMLIFENLSRGFGRQGKRTFMAERQYTRMEDWLTAKLAYEGLPSKTYLSKTLAQYTSKTCSNCGFTITSADYDRVLEKLKKTATGWMTTINGKELKVEGQITYYNRYKRQNVVKDLSVELDRLSEESVNNDISSWTKGRSGEALSLLKKRFSHRPVQEKFVCLNCGFETHADEQAALNIARSWLFLRSQEYKKYQTNKTTGNTDKRAFVETWQSFYRKKLKEVWKPAV

SEQ ID NO: 35459 - protein, 978 aa, synthetic construct
  REGION 1..978: note = engineered CasX variant
QEIKRINKIRRRLVKDSNTKKAGKTGPMKTLLVRVMTPDLRERLENLRKKPENIPQPISNTSRANLNKLLTDYTEMKKAILHVYWEEFQKDPVGLMSRVAQPASKKIDQNKLKPEMDEKGNLTTAGFACSQCGQPLFVYKLEQVSEKGKAYTNYFGRCNVAEHEKLILLAQLKPEKDSDEAVTYSLGKFGQRALDFYSIHVTKESTHPVKPLAQIAGNRYASVPVGKALSDACMGTIASFLSKYQDIIIEHQKVVKGNQKRLESLRELAGKENLEYPSVTLPPQPHTKEGVDAYNEVIARVRMWVNLNLWQKLKLSRDDAKPLLRLKGFPSFPLVERQANEVDWWDMVCNVKKLINEKKEDGKVFWQNLAGYKRQEALRPYLSSEEDRKKGKKFARYQLGDLLLHLEKKHGEDWGKVYDEAWERIDKKVEGLSKHIKLEEERRSEDAQSKAALTDWLRAKASFVIEGLKEADKDEFCRCELKLQKWYGDLRGKPFAIEAENSILDISGFSKQYNCAFIWQKDGVKKLNLYLIINYFKGGKLRFKKIKPEAFEANRFYTVINKKSGEIVPMEVNFNFDDPNLIILPLAFGKRQGREFIWNDLLSLETGSLKLANGRVIEKTLYNRRTRQDEPALFVALTFERREVLDSSNIKPMNLIGVDRGENIPAVIALTDPEGCPLSRFKDSLGNPTHILRIRESYKEKQRTIQAKKEVEQRRAGGYSRKYASKAKNLADDMVRNTARDLLYYAVTQDAMLIFENLSRGFGRQGKRTFMAERQYTRMEDWLTAKLAYEGLPSKTYLSKTLAQYTSKTCSNCGFTITSADYDRVLEKLKKTATGWMTTINGKELKVEGQITYYNRYKRQNVVKDLSVELDRLSEESVNNDISSWTKGRSGEALSLLKKRFSHRPVQEKFVCLNCGFETHADEQAALNIARSWLFLRSQEYKKYQTNKTTGNTDKRAFVETWQSFYRKKLKEVWKPAV

SEQ ID NO: 35460 - protein, 978 aa, synthetic construct
  REGION 1..978: note = engineered CasX variant
QEIKRINKIRRRLVKDSNTKKAGKTGPMKTLLVRVMTPDLRERLENLRKKPENIPQPISNTSRANLNKLLTDYTEMKKAILHVYWEEFQKDPVGLMSRVAQPASKKIDQNKLKPEMDEKGNLTTAGFACSQCGQPLFVYKLEQVSEKGKAYTNYFGRCNVAEHEKLILLAQLKPEKDSDEAVTYSLGKFGQRALDFYSIHVTKESTHPVKPLAQIAGNRYASYPVGKALSDACMGTIASFLSKYQDIIIEHQKVVKGNQKRLESLRELAGKENLEYPSVTLPPQPHTKEGVDAYNEVIARVRMWVNLNLWQKLKLSRDDAKPLLRLKGFPSFPLVERQANEVDWWDMVCNVKKLINEKKEDGKVFWQNLAGYKRQEALRPYLSSEEDRKKGKKFARYQLGDLLLHLEKKHGEDWGKVYDEAWERIDKKVEGLSKHIKLEEERRSEDAQSKAALTDWLRAKASFVIEGLKEADKDEFCRCELKLQKWYGDLRGKPFAIEAENSILDISGFSKQYNCAFIWQKDGVKKLNLYLIINYFKGGKLRFKKIKPEAFEANRFYTVINKKSGEIVPMEVNFNFDDPNLIILPLAFGKRQGREFIWNDLLSLETGSLKLANGRVIEKTLYNRRTRQDEPALFVALTFERREVLDSSNIKPMNLIGVDRGENIPAVIALTDPEGCPLSRFKDSLGNPTHILRIGESYKEKQRTIQAKKEVEQRRAGGYSRKYASKAKNLADDMVRNTARDLLYYAVTQDAMLIFENLSRGFGRQGKRTFSAERQYTRMEDWLTAKLAYEGLPSKTYLSKTLAQYTSKTCSNCGFTITSADYDRVLEKLKKTATGWMTTINGKELKVEGQITYYNRYKRQNVVKDLSVELDRLSEESVNNDISSWTKGRSGEALSLLKKRFSHRPVQEKFVCLNCGFETHADEQAALNIARSWLFLRSQEYKKYQTNKTTGNTDKRAFVETWQSFYRKKLKEVWKPAV

SEQ ID NO: 35461 - protein, 978 aa, synthetic construct
  REGION 1..978: note = engineered CasX variant
QEIKRINKIRRRLVKDSNTKKAGKTGPMKTLLVRVMTPDLRERLENLRKKPENIPQPISNTSRANLNKLLTDYTEMKKAILHVYWEEFQKDPVGLMSRVAQPASKKIDQNKLKPEMDEKGNLTTAGFACSQCGQPLFVYKLEQVSEKGKAYTNYFGRCNVAEHEKLILLAQLKPEKDSDEAVTYSLGKFGQRALDFYSIHVTKESTHPVKPLAQIAGNRYASHPVGKALSDACMGTIASFLSKYQDIIIEHQKVVKGNQKRLESLRELAGKENLEYPSVTLPPQPHTKEGVDAYNEVIARVRMWVNLNLWQKLKLSRDDAKPLLRLKGFPSFPLVERQANEVDWWDMVCNVKKLINEKKEDGKVFWQNLAGYKRQEALRPYLSSEEDRKKGKKFARYQLGDLLLHLEKKHGEDWGKVYDEAWERIDKKVEGLSKHIKLEEERRSEDAQSKAALTDWLRAKASFVIEGLKEADKDEFCRCELKLQKWYGDLRGKPFAIEAENSILDISGFSKQYNCAFIWQKDGVKKLNLYLIINYFKGGKLRFKKIKPEAFEANRFYTVINKKSGEIVPMEVNFNFDDPNLIILPLAFGKRQGREFIWNDLLSLETGSLKLANGRVIEKTLYNRRTRQDEPALFVALTFERREVLDSSNIKPMNLIGVDRGENIPAVIALTDPEGCPLSRFKDSLGNPTHILRIGESYKEKQRTIQAKKEVEQRRAGGYSRKYASKAKNLADDMVRNTARDLLYYAVTQDAMLIFENLSRGFGRQGKRTFSAERQYTRMEDWLTAKLAYEGLPSKTYLSKTLAQYTSKTCSNCGFTITSADYDRVLEKLKKTATGWMTTINGKELKVEGQITYYNRYKRQNVVKDLSVELDRLSEESVNNDISSWTKGRSGEALSLLKKRFSHRPVQEKFVCLNCGFETHADEQAALNIARSWLFLRSQEYKKYQTNKTTGNTDKRAFVETWQSFYRKKLKEVWKPAV

SEQ ID NO: 35462 - protein, 978 aa, synthetic construct
  REGION 1..978: note = engineered CasX variant
QEIKRINKIRRRLVKDSNTKKAGKTGPMKTLLVRVMTPDLRERLENLRKKPENIPQPISNTSRANLNKLLTDYTEMKKAILHVYWEEFQKDPVGLMSRVAQPASKKIDQNKLKPEMDEKGNLTTAGFACSQCGQPLFVYKLEQVSEKGKAYTNYFGRCNVAEHEKLILLAQLKPEKDSDEAVTYSLGKFGQRALDFYSIHVTKESTHPVKPLAQIAGNRYASTPVGKALSDACMGTIASFLSKYQDIIIEHQKVVKGNQKRLESLRELAGKENLEYPSVTLPPQPHTKEGVDAYNEVIARVRMWVNLNLWQKLKLSRDDAKPLLRLKGFPSFPLVERQANEVDWWDMVCNVKKLINEKKEDGKVFWQNLAGYKRQEALRPYLSSEEDRKKGKKFARYQLGDLLLHLEKKHGEDWGKVYDEAWERIDKKVEGLSKHIKLEEERRSEDAQSKAALTDWLRAKASFVIEGLKEADKDEFCRCELKLQKWYGDLRGKPFAIEAENSILDISGFSKQYNCAFIWQKDGVKKLNLYLIINYFKGGKLRFKKIKPEAFEANRFYTVINKKSGEIVPMEVNFNFDDPNLIILPLAFGKRQGREFIWNDLLSLETGSLKLANGRVIEKTLYNRRTRQDEPALFVALTFERREVLDSSNIKPMNLIGVDRGENIPAVIALTDPEGCPLSRFKDSLGNPTHILRIGESYKEKQRTIQAKKEVEQRRAGGYSRKYASKAKNLADDMVRNTARDLLYYAVTQDAMLIFENLSRGFGRQGKRTFSAERQYTRMEDWLTAKLAYEGLPSKTYLSKTLAQYTSKTCSNCGFTITSADYDRVLEKLKKTATGWMTTINGKELKVEGQITYYNRYKRQNVVKDLSVELDRLSEESVNNDISSWTKGRSGEALSLLKKRFSHRPVQEKFVCLNCGFETHADEQAALNIARSWLFLRSQEYKKYQTNKTTGNTDKRAFVETWQSFYRKKLKEVWKPAV

SEQ ID NO: 35463 - protein, 978 aa, synthetic construct
  REGION 1..978: note = engineered CasX variant
QEIKRINKIRRRLVKDSNTKKAGKTGPMKTLLVRVMTPDLRERLENLRKKPENIPQPISNTSRANLNKLLTDYTEMKKAILHVYWEEFQKDPVGLMSRVAQPASKKIDQNKLKPEMDEKGNLTTAGFACSQCGQPLFVYKLEQVSEKGKAYTNYFGRCNVAEHEKLILLAQLKPEKDSDEAVTYSLGKFGQRALDFYSIHVTKESTHPVKPLAQIAGNRYASAPVGKALSDACMGTIASFLSKYQDIIIEHQKVVKGNQKRLESLRELAGKENLEYPSVTLPPQPHTKEGVDAYNEVIARVRMWVNLNLWQKLKLSRDDAKPLLRLKGFPSFPLVERQANEVDWWDMVCNVKKLINEKKEDGKVFWQNLAGYKRQEALRPYLSSEEDRKKGKKFARYQLGDLLLHLEKKHGEDWGKVYDEAWERIDKKVEGLSKHIKLEEERRSEDAQSKAALTDWLRAKASFVIEGLKEADKDEFCRCELKLQKWYGDLRGKPFAIEAENSILDISGFSKQYNCAFIWQKDGVKKLNLYLIINYFKGGKLRFKKIKPEAFEANRFYTVINKKSGEIVPMEVNFNFDDPNLIILPLAFGKRQGREFIWNDLLSLETGSLKLANGRVIEKTLYNRRTRQDEPALFVALTFERREVLDSSNIKPMNLIGVDRGENIPAVIALTDPEGCPLSRFKDSLGNPTHILRIGESYKEKQRTIQAKKEVEQRRAGGYSRKYASKAKNLADDMVRNTARDLLYYAVTQDAMLIFENLSRGFGRQGKRTFSAERQYTRMEDWLTAKLAYEGLPSKTYLSKTLAQYTSKTCSNCGFTITSADYDRVLEKLKKTATGWMTTINGKELKVEGQITYYNRYKRQNVVKDLSVELDRLSEESVNNDISSWTKGRSGEALSLLKKRFSHRPVQEKFVCLNCGFETHADEQAALNIARSWLFLRSQEYKKYQTNKTTGNTDKRAFVETWQSFYRKKLKEVWKPAV

SEQ ID NO: 35464 - protein, 978 aa, synthetic construct
  REGION 1..978: note = engineered CasX variant
QEIKRINKIRRRLVKDSNTKKAGKTGPMKTLLVRVMTPDLRERLENLRKKPENIPQPISNTSRANLNKLLTDYTEMKKAILHVYWEEFQKDPVGLMSRVAQPASKKIDQNKLKPEMDEKGNLTTAGFACSQCGQPLFVYKLEQVSEKGKAYTNYFGRCNVAEHEKLILLAQLKPEKDSDEAVTYSLGKFGQRALDFYSIHVTKESTHPVKPLAQIAGNRYASVPVGKALSDACMGTIASFLSKYQDIIIEHQKVVKGNQKRLESLRELAGKENLEYPSVTLPPQPHTKEGVDAYNEVIARVRMWVNLNLWQKLKLSRDDAKPLLRLKGFPSFPLVERQANEVDWWDMVCNVKKLINEKKEDGKVFWQNLAGYKRQEALRPYLSSEEDRKKGKKFARYQLGDLLLHLEKKHGEDWGKVYDEAWERIDKKVEGLSKHIKLEEERRSEDAQSKAALTDWLRAKASFVIEGLKEADKDEFCRCELKLQKWYGDLRGKPFAIEAENSILDISGFSKQYNCAFIWQKDGVKKLNLYLIINYFKGGKLRFKKIKPEAFEANRFYTVINKKSGEIVPMEVNFNFDDPNLIILPLAFGKRQGREFIWNDLLSLETGSLKLANGRVIEKTLYNRRTRQDEPALFVALTFERREVLDSSNIKPMNLIGVDRGENIPAVIALTDPEGCPLSRFKDSLGNPTHILRIGESYKEKQRTIQAKKEVEQRRAGGYSRKYASKAKNLADDMVRNTARDLLYYAVTQDAMLIFENLSRGFGRQGKRTFSAERQYTRMEDWLTAKLAYEGLPSKTYLSKTLAQYTSKTCSNCGFTITSADYDRVLEKLKKTATGWMTTINGKELKVEGQITYYNRYKRQNVVKDLSVELDRLSEESVNNDISSWTKGRSGEALSLLKKRFSHRPVQEKFVCLNCGFETHADEQAALNIARSWLFLRSQEYKKYQTNKTTGNTDKRAFVETWQSFYRKKLKEVWKPAV

SEQ ID NO: 35465 - protein, 978 aa, synthetic construct
  REGION 1..978: note = engineered CasX variant
QEIKRINKIRRRLVKDSNTKKAGKTGPMKTLLVRVMTPDLRERLENLRKKPENIPQPISNTSRANLNKLLTDYTEMKKAILHVYWEEFQKDPVGLMSRVAQPASKKIDQNKLKPEMDEKGNLTTAGFACSQCGQPLFVYKLEQVSEKGKAYTNYFGRCNVAEHEKLILLAQLKPEKDSDEAVTYSLGKFGQRALDFYSIHVTKESTHPVKPLAQIAGNRYASYPVGKALSDACMGTIASFLSKYQDIIIEHQKVVKGNQKRLESLRELAGKENLEYPSVTLPPQPHTKEGVDAYNEVIARVRMWVNLNLWQKLKLSRDDAKPLLRLKGFPSFPLVERQANEVDWWDMVCNVKKLINEKKEDGKVFWQNLAGYKRQEALRPYLSSEEDRKKGKKFARYQLGDLLLHLEKKHGEDWGKVYDEAWERIDKKVEGLSKHIKLEEERRSEDAQSKAALTDWLRAKASFVIEGLKEADKDEFCRCELKLQKWYGDLRGKPFAIEAENSILDISGFSKQYNCAFIWQKDGVKKLNLYLIINYFKGGKLRFKKIKPEAFEANRFYTVINKKSGEIVPMEVNFNFDDPNLIILPLAFGKRQGREFIWNDLLSLETGSLKLANGRVIEKTLYNRRTRQDEPALFVALTFERREVLDSSNIKPMNLIGVDRGENIPAVIALTDPEGCPLSRFKDSLGNPTHILRIGESYKEKQRTIQAKKEVEQRRAGGYSRKYASKAKNLADDMVRNTARDLLYYAVTQDAMLIFENLSRGFGRQGKRTFMAERQYTRMEDWLTAKLAYEGLPSKTYLSKTLAQYTSKTCSNCGFTITSADYDRVLEKLKKTATGWMTTINGKELKVEGQITYYNRYKRQNVVKDLSVELDRLSEESVNNDISSWDKGRSGEALSLLKKRFSHRPVQEKFVCLNCGFETHADEQAALNIARSWLFLRSQEYKKYQTNKTTGNTDKRAFVETWQSFYRKKLKEVWKPAV

SEQ ID NO: 35466 - protein, 978 aa, synthetic construct
  REGION 1..978: note = engineered CasX variant
QEIKRINKIRRRLVKDSNTKKAGKTGPMKTLLVRVMTPDLRERLENLRKKPENIPQPISNTSRANLNKLLTDYTEMKKAILHVYWEEFQKDPVGLMSRVAQPASKKIDQNKLKPEMDEKGNLTTAGFACSQCGQPLFVYKLEQVSEKGKAYTNYFGRCNVAEHEKLILLAQLKPEKDSDEAVTYSLGKFGQRALDFYSIHVTKESTHPVKPLAQIAGNRYASHPVGKALSDACMGTIASFLSKYQDIIIEHQKVVKGNQKRLESLRELAGKENLEYPSVTLPPQPHTKEGVDAYNEVIARVRMWVNLNLWQKLKLSRDDAKPLLRLKGFPSFPLVERQANEVDWWDMVCNVKKLINEKKEDGKVFWQNLAGYKRQEALRPYLSSEEDRKKGKKFARYQLGDLLLHLEKKHGEDWGKVYDEAWERIDKKVEGLSKHIKLEEERRSEDAQSKAALTDWLRAKASFVIEGLKEADKDEFCRCELKLQKWYGDLRGKPFAIEAENSILDISGFSKQYNCAFIWQKDGVKKLNLYLIINYFKGGKLRFKKIKPEAFEANRFYTVINKKSGEIVPMEVNFNFDDPNLIILPLAFGKRQGREFIWNDLLSLETGSLKLANGRVIEKTLYNRRTRQDEPALFVALTFERREVLDSSNIKPMNLIGVDRGENIPAVIALTDPEGCPLSRFKDSLGNPTHILRIGESYKEKQRTIQAKKEVEQRRAGGYSRKYASKAKNLADDMVRNTARDLLYYAVTQDAMLIFENLSRGFGRQGKRTFMAERQYTRMEDWLTAKLAYEGLPSKTYLSKTLAQYTSKTCSNCGFTITSADYDRVLEKLKKTATGWMTTINGKELKVEGQITYYNRYKRQNVVKDLSVELDRLSEESVNNDISSWDKGRSGEALSLLKKRFSHRPVQEKFVCLNCGFETHADEQAALNIARSWLFLRSQEYKKYQTNKTTGNTDKRAFVETWQSFYRKKLKEVWKPAV

SEQ ID NO: 35467 - protein, 978 aa, synthetic construct
  REGION 1..978: note = engineered CasX variant
QEIKRINKIRRRLVKDSNTKKAGKTGPMKTLLVRVMTPDLRERLENLRKKPENIPQPISNTSRANLNKLLTDYTEMKKAILHVYWEEFQKDPVGLMSRVAQPASKKIDQNKLKPEMDEKGNLTTAGFACSQCGQPLFVYKLEQVSEKGKAYTNYFGRCNVAEHEKLILLAQLKPEKDSDEAVTYSLGKFGQRALDFYSIHVTKESTHPVKPLAQIAGNRYASTPVGKALSDACMGTIASFLSKYQDIIIEHQKVVKGNQKRLESLRELAGKENLEYPSVTLPPQPHTKEGVDAYNEVIARVRMWVNLNLWQKLKLSRDDAKPLLRLKGFPSFPLVERQANEVDWWDMVCNVKKLINEKKEDGKVFWQNLAGYKRQEALRPYLSSEEDRKKGKKFARYQLGDLLLHLEKKHGEDWGKVYDEAWERIDKKVEGLSKHIKLEEERRSEDAQSKAALTDWLRAKASFVIEGLKEADKDEFCRCELKLQKWYGDLRGKPFAIEAENSILDISGFSKQYNCAFIWQKDGVKKLNLYLIINYFKGGKLRFKKIKPEAFEANRFYTVINKKSGEIVPMEVNFNFDDPNLIILPLAFGKRQGREFIWNDLLSLETGSLKLANGRVIEKTLYNRRTRQDEPALFVALTFERREVLDSSNIKPMNLIGVDRGENIPAVIALTDPEGCPLSRFKDSLGNPTHILRIGESYKEKQRTIQAKKEVEQRRAGGYSRKYASKAKNLADDMVRNTARDLLYYAVTQDAMLIFENLSRGFGRQGKRTFMAERQYTRMEDWLTAKLAYEGLPSKTYLSKTLAQYTSKTCSNCGFTITSADYDRVLEKLKKTATGWMTTINGKELKVEGQITYYNRYKRQNVVKDLSVELDRLSEESVNNDISSWDKGRSGEALSLLKKRFSHRPVQEKFVCLNCGFETHADEQAALNIARSWLFLRSQEYKKYQTNKTTGNTDKRAFVETWQSFYRKKLKEVWKPAV

SEQ ID NO: 35468 - protein, 978 aa, synthetic construct
  REGION 1..978: note = engineered CasX variant
QEIKRINKIRRRLVKDSNTKKAGKTGPMKTLLVRVMTPDLRERLENLRKKPENIPQPISNTSRANLNKLLTDYTEMKKAILHVYWEEFQKDPVGLMSRVAQPASKKIDQNKLKPEMDEKGNLTTAGFACSQCGQPLFVYKLEQVSEKGKAYTNYFGRCNVAEHEKLILLAQLKPEKDSDEAVTYSLGKFGQRALDFYSIHVTKESTHPVKPLAQIAGNRYASAPVGKALSDACMGTIASFLSKYQDIIIEHQKVVKGNQKRLESLRELAGKENLEYPSVTLPPQPHTKEGVDAYNEVIARVRMWVNLNLWQKLKLSRDDAKPLLRLKGFPSFPLVERQANEVDWWDMVCNVKKLINEKKEDGKVFWQNLAGYKRQEALRPYLSSEEDRKKGKKFARYQLGDLLLHLEKKHGEDWGKVYDEAWERIDKKVEGLSKHIKLEEERRSEDAQSKAALTDWLRAKASFVIEGLKEADKDEFCRCELKLQKWYGDLRGKPFAIEAENSILDISGFSKQYNCAFIWQKDGVKKLNLYLIINYFKGGKLRFKKIKPEAFEANRFYTVINKKSGEIVPMEVNFNFDDPNLIILPLAFGKRQGREFIWNDLLSLETGSLKLANGRVIEKTLYNRRTRQDEPALFVALTFERREVLDSSNIKPMNLIGVDRGENIPAVIALTDPEGCPLSRFKDSLGNPTHILRIGESYKEKQRTIQAKKEVEQRRAGGYSRKYASKAKNLADDMVRNTARDLLYYAVTQDAMLIFENLSRGFGRQGKRTFMAERQYTRMEDWLTAKLAYEGLPSKTYLSKTLAQYTSKTCSNCGFTITSADYDRVLEKLKKTATGWMTTINGKELKVEGQITYYNRYKRQNVVKDLSVELDRLSEESVNNDISSWDKGRSGEALSLLKKRFSHRPVQEKFVCLNCGFETHADEQAALNIARSWLFLRSQEYKKYQTNKTTGNTDKRAFVETWQSFYRKKLKEVWKPAV

SEQ ID NO: 35469 - protein, 978 aa, synthetic construct
  REGION 1..978: note = engineered CasX variant
QEIKRINKIRRRLVKDSNTKKAGKTGPMKTLLVRVMTPDLRERLENLRKKPENIPQPISNTSRANLNKLLTDYTEMKKAILHVYWEEFQKDPVGLMSRVAQPASKKIDQNKLKPEMDEKGNLTTAGFACSQCGQPLFVYKLEQVSEKGKAYTNYFGRCNVAEHEKLILLAQLKPEKDSDEAVTYSLGKFGQRALDFYSIHVTKESTHPVKPLAQIAGNRYASVPVGKALSDACMGTIASFLSKYQDIIIEHQKVVKGNQKRLESLRELAGKENLEYPSVTLPPQPHTKEGVDAYNEVIARVRMWVNLNLWQKLKLSRDDAKPLLRLKGFPSFPLVERQANEVDWWDMVCNVKKLINEKKEDGKVFWQNLAGYKRQEALRPYLSSEEDRKKGKKFARYQLGDLLLHLEKKHGEDWGKVYDEAWERIDKKVEGLSKHIKLEEERRSEDAQSKAALTDWLRAKASFVIEGLKEADKDEFCRCELKLQKWYGDLRGKPFAIEAENSILDISGFSKQYNCAFIWQKDGVKKLNLYLIINYFKGGKLRFKKIKPEAFEANRFYTVINKKSGEIVPMEVNFNFDDPNLIILPLAFGKRQGREFIWNDLLSLETGSLKLANGRVIEKTLYNRRTRQDEPALFVALTFERREVLDSSNIKPMNLIGVDRGENIPAVIALTDPEGCPLSRFKDSLGNPTHILRIGESYKEKQRTIQAKKEVEQRRAGGYSRKYASKAKNLADDMVRNTARDLLYYAVTQDAMLIFENLSRGFGRQGKRTFMAERQYTRMEDWLTAKLAYEGLPSKTYLSKTLAQYTSKTCSNCGFTITSADYDRVLEKLKKTATGWMTTINGKELKVEGQITYYNRYKRQNVVKDLSVELDRLSEESVNNDISSWDKGRSGEALSLLKKRFSHRPVQEKFVCLNCGFETHADEQAALNIARSWLFLRSQEYKKYQTNKTTGNTDKRAFVETWQSFYRKKLKEVWKPAV

SEQ ID NO: 35470 - protein, 978 aa, synthetic construct
  REGION 1..978: note = engineered CasX variant
QEIKRINKIRRRLVKDSNTKKAGKTGPMKTLLVRVMTPDLRERLENLRKKPENIPQPISNTSRANLNKLLTDYTEMKKAILHVYWEEFQVDPVGLMSRVAQPASKKIDQNKLKPEMDEKGNLTTAGFACSQCGQPLFVYKLEQVSEKGKAYTNYFGRCNVAEHEKLILLAQLKPEKDSDEAVTYSLGKFGQRALDFYSIHVTKESTHPVKPLAQIAGNRYASYPVGKALSDACMGTIASFLSKYQDIIIEHQKVVKGNQKRLESLRELAGKENLEYPSVTLPPQPHTKEGVDAYNEVIARVRMWVNLNLWQKLKLSRDDAKPLLRLKGFPSFPLVERQANEVDWWDMVCNVKKLINEKKEDGKVFWQNLAGYKRQEALRPYLSSEEDRKKGKKFARYQLGDLLLHLEKKHGEDWGKVYDEAWERIDKKVEGLSKHIKLEEERRSEDAQSKAALTDWLRAKASFVIEGLKEADKDEFCRCELKLQKWYGDLRGKPFAIEAENSILDISGFSKQYNCAFIWQKDGVKKLNLYLIINYFKGGKLRFKKIKPEAFEANRFYTVINKKSGEIVPMEVNFNFDDPNLIILPLAFGKRQGREFIWNDLLSLETGSLKLANGRVIEKTLYNRRTRQDEPALFVALTFERREVLDSSNIKPMNLIGVDRGENIPAVIALTDPEGCPLSRFKDSLGNPTHILRIGESYKEKQRTIQAKKEVEQRRAGGYSRKYASKAKNLADDMVRNTARDLLYYAVTQDAMLIFENLSRGFGRQGKRTFMAERQYTRMEDWLTAKLAYEGLPSKTYLSKTLAQYTSKTCSNCGFTITSADYDRVLEKLKKTATGWMTTINGKELKVEGQITYYNRYKRQNVVKDLSVELDRLSEESVNNDISSWTKGRSGEALSLLKKRFSHRPVQEKFVCLNCGFETHADEQAALNIARSWLFLRSQEYKKYQTNKTTGNTDKRAFVETWQSFYRKKLKEVWKPAV

SEQ ID NO: 35471 - protein, 978 aa, synthetic construct
  REGION 1..978: note = engineered CasX variant
QEIKRINKIRRRLVKDSNTKKAGKTGPMKTLLVRVMTPDLRERLENLRKKPENIPQPISNTSRANLNKLLTDYTEMKKAILHVYWEEFQVDPVGLMSRVAQPASKKIDQNKLKPEMDEKGNLTTAGFACSQCGQPLFVYKLEQVSEKGKAYTNYFGRCNVAEHEKLILLAQLKPEKDSDEAVTYSLGKFGQRALDFYSIHVTKESTHPVKPLAQIAGNRYASHPVGKALSDACMGTIASFLSKYQDIIIEHQKVVKGNQKRLESLRELAGKENLEYPSVTLPPQPHTKEGVDAYNEVIARVRMWVNLNLWQKLKLSRDDAKPLLRLKGFPSFPLVERQANEVDWWDMVCNVKKLINEKKEDGKVFWQNLAGYKRQEALRPYLSSEEDRKKGKKFARYQLGDLLLHLEKKHGEDWGKVYDEAWERIDKKVEGLSKHIKLEEERRSEDAQSKAALTDWLRAKASFVIEGLKEADKDEFCRCELKLQKWYGDLRGKPFAIEAENSILDISGFSKQYNCAFIWQKDGVKKLNLYLIINYFKGGKLRFKKIKPEAFEANRFYTVINKKSGEIVPMEVNFNFDDPNLIILPLAFGKRQGREFIWNDLLSLETGSLKLANGRVIEKTLYNRRTRQDEPALFVALTFERREVLDSSNIKPMNLIGVDRGENIPAVIALTDPEGCPLSRFKDSLGNPTHILRIGESYKEKQRTIQAKKEVEQRRAGGYSRKYASKAKNLADDMVRNTARDLLYYAVTQDAMLIFENLSRGFGRQGKRTFMAERQYTRMEDWLTAKLAYEGLPSKTYLSKTLAQYTSKTCSNCGFTITSADYDRVLEKLKKTATGWMTTINGKELKVEGQITYYNRYKRQNVVKDLSVELDRLSEESVNNDISSWTKGRSGEALSLLKKRFSHRPVQEKFVCLNCGFETHADEQAALNIARSWLFLRSQEYKKYQTNKTTGNTDKRAFVETWQSFYRKKLKEVWKPAV

SEQ ID NO: 35472 - protein, 978 aa, synthetic construct
  REGION 1..978: note = engineered CasX variant
QEIKRINKIRRRLVKDSNTKKAGKTGPMKTLLVRVMTPDLRERLENLRKKPENIPQPISNTSRANLNKLLTDYTEMKKAILHVYWEEFQVDPVGLMSRVAQPASKKIDQNKLKPEMDEKGNLTTAGFACSQCGQPLFVYKLEQVSEKGKAYTNYFGRCNVAEHEKLILLAQLKPEKDSDEAVTYSLGKFGQRALDFYSIHVTKESTHPVKPLAQIAGNRYASTPVGKALSDACMGTIASFLSKYQDIIIEHQKVVKGNQKRLESLRELAGKENLEYPSVTLPPQPHTKEGVDAYNEVIARVRMWVNLNLWQKLKLSRDDAKPLLRLKGFPSFPLVERQANEVDWWDMVCNVKKLINEKKEDGKVFWQNLAGYKRQEALRPYLSSEEDRKKGKKFARYQLGDLLLHLEKKHGEDWGKVYDEAWERIDKKVEGLSKHIKLEEERRSEDAQSKAALTDWLRAKASFVIEGLKEADKDEFCRCELKLQKWYGDLRGKPFAIEAENSILDISGFSKQYNCAFIWQKDGVKKLNLYLIINYFKGGKLRFKKIKPEAFEANRFYTVINKKSGEIVPMEVNFNFDDPNLIILPLAFGKRQGREFIWNDLLSLETGSLKLANGRVIEKTLYNRRTRQDEPALFVALTFERREVLDSSNIKPMNLIGVDRGENIPAVIALTDPEGCPLSRFKDSLGNPTHILRIGESYKEKQRTIQAKKEVEQRRAGGYSRKYASKAKNLADDMVRNTARDLLYYAVTQDAMLIFENLSRGFGRQGKRTFMAERQYTRMEDWLTAKLAYEGLPSKTYLSKTLAQYTSKTCSNCGFTITSADYDRVLEKLKKTATGWMTTINGKELKVEGQITYYNRYKRQNVVKDLSVELDRLSEESVNNDISSWTKGRSGEALSLLKKRFSHRPVQEKFVCLNCGFETHADEQAALNIARSWLFLRSQEYKKYQTNKTTGNTDKRAFVETWQSFYRKKLKEVWKPAV

SEQ ID NO: 35473 - protein, 978 aa, synthetic construct
  REGION 1..978: note = engineered CasX variant
QEIKRINKIRRRLVKDSNTKKAGKTGPMKTLLVRVMTPDLRERLENLRKKPENIPQPISNTSRANLNKLLTDYTEMKKAILHVYWEEFQVDPVGLMSRVAQPASKKIDQNKLKPEMDEKGNLTTAGFACSQCGQPLFVYKLEQVSEKGKAYTNYFGRCNVAEHEKLILLAQLKPEKDSDEAVTYSLGKFGQRALDFYSIHVTKESTHPVKPLAQIAGNRYASAPVGKALSDACMGTIASFLSKYQDIIIEHQKVVKGNQKRLESLRELAGKENLEYPSVTLPPQPHTKEGVDAYNEVIARVRMWVNLNLWQKLKLSRDDAKPLLRLKGFPSFPLVERQANEVDWWDMVCNVKKLINEKKEDGKVFWQNLAGYKRQEALRPYLSSEEDRKKGKKFARYQLGDLLLHLEKKHGEDWGKVYDEAWERIDKKVEGLSKHIKLEEERRSEDAQSKAALTDWLRAKASFVIEGLKEADKDEFCRCELKLQKWYGDLRGKPFAIEAENSILDISGFSKQYNCAFIWQKDGVKKLNLYLIINYFKGGKLRFKKIKPEAFEANRFYTVINKKSGEIVPMEVNFNFDDPNLIILPLAFGKRQGREFIWNDLLSLETGSLKLANGRVIEKTLYNRRTRQDEPALFVALTFERREVLDSSNIKPMNLIGVDRGENIPAVIALTDPEGCPLSRFKDSLGNPTHILRIGESYKEKQRTIQAKKEVEQRRAGGYSRKYASKAKNLADDMVRNTARDLLYYAVTQDAMLIFENLSRGFGRQGKRTFMAERQYTRMEDWLTAKLAYEGLPSKTYLSKTLAQYTSKTCSNCGFTITSADYDRVLEKLKKTATGWMTTINGKELKVEGQITYYNRYKRQNVVKDLSVELDRLSEESVNNDISSWTKGRSGEALSLLKKRFSHRPVQEKFVCLNCGFETHADEQAALNIARSWLFLRSQEYKKYQTNKTTGNTDKRAFVETWQSFYRKKLKEVWKPAV

SEQ ID NO: 35474 - protein, 978 aa, synthetic construct
  REGION 1..978: note = engineered CasX variant
QEIKRINKIRRRLVKDSNTKKAGKTGPMKTLLVRVMTPDLRERLENLRKKPENIPQPISNTSRANLNKLLTDYTEMKKAILHVYWEEFQVDPVGLMSRVAQPASKKIDQNKLKPEMDEKGNLTTAGFACSQCGQPLFVYKLEQVSEKGKAYTNYFGRCNVAEHEKLILLAQLKPEKDSDEAVTYSLGKFGQRALDFYSIHVTKESTHPVKPLAQIAGNRYASVPVGKALSDACMGTIASFLSKYQDIIIEHQKVVKGNQKRLESLRELAGKENLEYPSVTLPPQPHTKEGVDAYNEVIARVRMWVNLNLWQKLKLSRDDAKPLLRLKGFPSFPLVERQANEVDWWDMVCNVKKLINEKKEDGKVFWQNLAGYKRQEALRPYLSSEEDRKKGKKFARYQLGDLLLHLEKKHGEDWGKVYDEAWERIDKKVEGLSKHIKLEEERRSEDAQSKAALTDWLRAKASFVIEGLKEADKDEFCRCELKLQKWYGDLRGKPFAIEAENSILDISGFSKQYNCAFIWQKDGVKKLNLYLIINYFKGGKLRFKKIKPEAFEANRFYTVINKKSGEIVPMEVNFNFDDPNLIILPLAFGKRQGREFIWNDLLSLETGSLKLANGRVIEKTLYNRRTRQDEPALFVALTFERREVLDSSNIKPMNLIGVDRGENIPAVIALTDPEGCPLSRFKDSLGNPTHILRIGESYKEKQRTIQAKKEVEQRRAGGYSRKYASKAKNLADDMVRNTARDLLYYAVTQDAMLIFENLSRGFGRQGKRTFMAERQYTRMEDWLTAKLAYEGLPSKTYLSKTLAQYTSKTCSNCGFTITSADYDRVLEKLKKTATGWMTTINGKELKVEGQITYYNRYKRQNVVKDLSVELDRLSEESVNNDISSWTKGRSGEALSLLKKRFSHRPVQEKFVCLNCGFETHADEQAALNIARSWLFLRSQEYKKYQTNKTTGNTDKRAFVETWQSFYRKKLKEVWKPAV

SEQ ID NO: 35475 - protein, 978 aa, synthetic construct
  REGION 1..978: note = engineered CasX variant
QEIKRLNKIRRRLVKDSNTKKAGKTGPMKTLLVRVMTPDLRERLENLRKKPENIPQPISNTSRANLNKLLTDYTEMKKAILHVYWEEFQKDPVGLMSRVAQPASKKIDQNKLKPEMDEKGNLTTAGFACSQCGQPLFVYKLEQVSEKGKAYTNYFGRCNVAEHEKLILLAQLKPEKDSDEAVTYSLGKFGQRALDFYSIHVTKESTHPVKPLAQIAGNRYASYPVGKALSDACMGTIASFLSKYQDIIIEHQKVVKGNQKRLESLRELAGKENLEYPSVTLPPQPHTKEGVDAYNEVIARVRMWVNLNLWQKLKLSRDDAKPLLRLKGFPSFPLVERQANEVDWWDMVCNVKKLINEKKEDGKVFWQNLAGYKRQEALRPYLSSEEDRKKGKKFARYQLGDLLLHLEKKHGEDWGKVYDEAWERIDKKVEGLSKHIKLEEERRSEDAQSKAALTDWLRAKASFVIEGLKEADKDEFCRCELKLQKWYGDLRGKPFAIEAENSILDISGFSKQYNCAFIWQKDGVKKLNLYLIINYFKGGKLRFKKIKPEAFEANRFYTVINKKSGEIVPMEVNFNFDDPNLIILPLAFGKRQGREFIWNDLLSLETGSLKLANGRVIEKTLYNRRTRQDEPALFVALTFERREVLDSSNIKPMNLIGVDRGENIPAVIALTDPEGCPLSRFKDSLGNPTHILRIGESYKEKQRTIQAKKEVEQRRAGGYSRKYASKAKNLADDMVRNTARDLLYYAVTQDAMLIFENLSRGFGRQGKRTFMAERQYTRMEDWLTAKLAYEGLPSKTYLSKTLAQYTSKTCSNCGFTITSADYDRVLEKLKKTATGWMTTINGKELKVEGQITYYNRYKRQNVVKDLSVELDRLSEESVNNDISSWTKGRSGEALSLLKKRFSHRPVQEKFVCLNCGFETHADEQAALNIARSWLFLRSQEYKKYQTNKTTGNTDKRAFVETWQSFYRKKLKEVWKPAV

SEQ ID NO: 35476 - protein, 978 aa, synthetic construct
  REGION 1..978: note = engineered CasX variant
QEIKRLNKIRRRLVKDSNTKKAGKTGPMKTLLVRVMTPDLRERLENLRKKPENIPQPISNTSRANLNKLLTDYTEMKKAILHVYWEEFQKDPVGLMSRVAQPASKKIDQNKLKPEMDEKGNLTTAGFACSQCGQPLFVYKLEQVSEKGKAYTNYFGRCNVAEHEKLILLAQLKPEKDSDEAVTYSLGKFGQRALDFYSIHVTKESTHPVKPLAQIAGNRYASHPVGKALSDACMGTIASFLSKYQDIIIEHQKVVKGNQKRLESLRELAGKENLEYPSVTLPPQPHTKEGVDAYNEVIARVRMWVNLNLWQKLKLSRDDAKPLLRLKGFPSFPLVERQANEVDWWDMVCNVKKLINEKKEDGKVFWQNLAGYKRQEALRPYLSSEEDRKKGKKFARYQLGDLLLHLEKKHGEDWGKVYDEAWERIDKKVEGLSKHIKLEEERRSEDAQSKAALTDWLRAKASFVIEGLKEADKDEFCRCELKLQKWYGDLRGKPFAIEAENSILDISGFSKQYNCAFIWQKDGVKKLNLYLIINYFKGGKLRFKKIKPEAFEANRFYTVINKKSGEIVPMEVNFNFDDPNLIILPLAFGKRQGREFIWNDLLSLETGSLKLANGRVIEKTLYNRRTRQDEPALFVALTFERREVLDSSNIKPMNLIGVDRGENIPAVIALTDPEGCPLSRFKDSLGNPTHILRIGESYKEKQRTIQAKKEVEQRRAGGYSRKYASKAKNLADDMVRNTARDLLYYAVTQDAMLIFENLSRGFGRQGKRTFMAERQYTRMEDWLTAKLAYEGLPSKTYLSKTLAQYTSKTCSNCGFTITSADYDRVLEKLKKTATGWMTTINGKELKVEGQITYYNRYKRQNVVKDLSVELDRLSEESVNNDISSWTKGRSGEALSLLKKRFSHRPVQEKFVCLNCGFETHADEQAALNIARSWLFLRSQEYKKYQTNKTTGNTDKRAFVETWQSFYRKKLKEVWKPAV

SEQ ID NO: 35477 - protein, 978 aa, synthetic construct
  REGION 1..978: note = engineered CasX variant
QEIKRLNKIRRRLVKDSNTKKAGKTGPMKTLLVRVMTPDLRERLENLRKKPENIPQPISNTSRANLNKLLTDYTEMKKAILHVYWEEFQKDPVGLMSRVAQPASKKIDQNKLKPEMDEKGNLTTAGFACSQCGQPLFVYKLEQVSEKGKAYTNYFGRCNVAEHEKLILLAQLKPEKDSDEAVTYSLGKFGQRALDFYSIHVTKESTHPVKPLAQIAGNRYASTPVGKALSDACMGTIASFLSKYQDIIIEHQKVVKGNQKRLESLRELAGKENLEYPSVTLPPQPHTKEGVDAYNEVIARVRMWVNLNLWQKLKLSRDDAKPLLRLKGFPSFPLVERQANEVDWWDMVCNVKKLINEKKEDGKVFWQNLAGYKRQEALRPYLSSEEDRKKGKKFARYQLGDLLLHLEKKHGEDWGKVYDEAWERIDKKVEGLSKHIKLEEERRSEDAQSKAALTDWLRAKASFVIEGLKEADKDEFCRCELKLQKWYGDLRGKPFAIEAENSILDISGFSKQYNCAFIWQKDGVKKLNLYLIINYFKGGKLRFKKIKPEAFEANRFYTVINKKSGEIVPMEVNFNFDDPNLIILPLAFGKRQGREFIWNDLLSLETGSLKLANGRVIEKTLYNRRTRQDEPALFVALTFERREVLDSSNIKPMNLIGVDRGENIPAVIALTDPEGCPLSRFKDSLGNPTHILRIGESYKEKQRTIQAKKEVEQRRAGGYSRKYASKAKNLADDMVRNTARDLLYYAVTQDAMLIFENLSRGFGRQGKRTFMAERQYTRMEDWLTAKLAYEGLPSKTYLSKTLAQYTSKTCSNCGFTITSADYDRVLEKLKKTATGWMTTINGKELKVEGQITYYNRYKRQNVVKDLSVELDRLSEESVNNDISSWTKGRSGEALSLLKKRFSHRPVQEKFVCLNCGFETHADEQAALNIARSWLFLRSQEYKKYQTNKTTGNTDKRAFVETWQSFYRKKLKEVWKPAV

SEQ ID NO: 35478 - protein, 978 aa, synthetic construct
  REGION 1..978: note = engineered CasX variant
QEIKRLNKIRRRLVKDSNTKKAGKTGPMKTLLVRVMTPDLRERLENLRKKPENIPQPISNTSRANLNKLLTDYTEMKKAILHVYWEEFQKDPVGLMSRVAQPASKKIDQNKLKPEMDEKGNLTTAGFACSQCGQPLFVYKLEQVSEKGKAYTNYFGRCNVAEHEKLILLAQLKPEKDSDEAVTYSLGKFGQRALDFYSIHVTKESTHPVKPLAQIAGNRYASAPVGKALSDACMGTIASFLSKYQDIIIEHQKVVKGNQKRLESLRELAGKENLEYPSVTLPPQPHTKEGVDAYNEVIARVRMWVNLNLWQKLKLSRDDAKPLLRLKGFPSFPLVERQANEVDWWDMVCNVKKLINEKKEDGKVFWQNLAGYKRQEALRPYLSSEEDRKKGKKFARYQLGDLLLHLEKKHGEDWGKVYDEAWERIDKKVEGLSKHIKLEEERRSEDAQSKAALTDWLRAKASFVIEGLKEADKDEFCRCELKLQKWYGDLRGKPFAIEAENSILDISGFSKQYNCAFIWQKDGVKKLNLYLIINYFKGGKLRFKKIKPEAFEANRFYTVINKKSGEIVPMEVNFNFDDPNLIILPLAFGKRQGREFIWNDLLSLETGSLKLANGRVIEKTLYNRRTRQDEPALFVALTFERREVLDSSNIKPMNLIGVDRGENIPAVIALTDPEGCPLSRFKDSLGNPTHILRIGESYKEKQRTIQAKKEVEQRRAGGYSRKYASKAKNLADDMVRNTARDLLYYAVTQDAMLIFENLSRGFGRQGKRTFMAERQYTRMEDWLTAKLAYEGLPSKTYLSKTLAQYTSKTCSNCGFTITSADYDRVLEKLKKTATGWMTTINGKELKVEGQITYYNRYKRQNVVKDLSVELDRLSEESVNNDISSWTKGRSGEALSLLKKRFSHRPVQEKFVCLNCGFETHADEQAALNIARSWLFLRSQEYKKYQTNKTTGNTDKRAFVETWQSFYRKKLKEVWKPAV

SEQ ID NO: 35479 - protein, 978 aa, synthetic construct
  REGION 1..978: note = engineered CasX variant
QEIKRLNKIRRRLVKDSNTKKAGKTGPMKTLLVRVMTPDLRERLENLRKKPENIPQPISNTSRANLNKLLTDYTEMKKAILHVYWEEFQKDPVGLMSRVAQPASKKIDQNKLKPEMDEKGNLTTAGFACSQCGQPLFVYKLEQVSEKGKAYTNYFGRCNVAEHEKLILLAQLKPEKDSDEAVTYSLGKFGQRALDFYSIHVTKESTHPVKPLAQIAGNRYASVPVGKALSDACMGTIASFLSKYQDIIIEHQKVVKGNQKRLESLRELAGKENLEYPSVTLPPQPHTKEGVDAYNEVIARVRMWVNLNLWQKLKLSRDDAKPLLRLKGFPSFPLVERQANEVDWWDMVCNVKKLINEKKEDGKVFWQNLAGYKRQEALRPYLSSEEDRKKGKKFARYQLGDLLLHLEKKHGEDWGKVYDEAWERIDKKVEGLSKHIKLEEERRSEDAQSKAALTDWLRAKASFVIEGLKEADKDEFCRCELKLQKWYGDLRGKPFAIEAENSILDISGFSKQYNCAFIWQKDGVKKLNLYLIINYFKGGKLRFKKIKPEAFEANRFYTVINKKSGEIVPMEVNFNFDDPNLIILPLAFGKRQGREFIWNDLLSLETGSLKLANGRVIEKTLYNRRTRQDEPALFVALTFERREVLDSSNIKPMNLIGVDRGENIPAVIALTDPEGCPLSRFKDSLGNPTHILRIGESYKEKQRTIQAKKEVEQRRAGGYSRKYASKAKNLADDMVRNTARDLLYYAVTQDAMLIFENLSRGFGRQGKRTFMAERQYTRMEDWLTAKLAYEGLPSKTYLSKTLAQYTSKTCSNCGFTITSADYDRVLEKLKKTATGWMTTINGKELKVEGQITYYNRYKRQNVVKDLSVELDRLSEESVNNDISSWTKGRSGEALSLLKKRFSHRPVQEKFVCLNCGFETHADEQAALNIARSWLFLRSQEYKKYQTNKTTGNTDKRAFVETWQSFYRKKLKEVWKPAV

SEQ ID NO: 35480 - protein, 978 aa, synthetic construct
  REGION 1..978: note = engineered CasX variant
QEIKRINKIRRRLVKDSNTKKAGKTGPMKTLLVRVMTPDLRERLENLRKKPENIPQPISNTSRANLNKLLTDYTEMKKAILHVYWEEFQKDPVGLMSRVAQPASKKIDQNKLKPEMDEKGNLTTAGFACSQCGQPLFVYKLEQVSEKGKAYTNYVGRCNVAEHEKLILLAQLKPEKDSDEAVTYSLGKFGQRALDFYSIHVTKESTHPVKPLAQIAGNRYASYPVGKALSDACMGTIASFLSKYQDIIIEHQKVVKGNQKRLESLRELAGKENLEYPSVTLPPQPHTKEGVDAYNEVIARVRMWVNLNLWQKLKLSRDDAKPLLRLKGFPSFPLVERQANEVDWWDMVCNVKKLINEKKEDGKVFWQNLAGYKRQEALRPYLSSEEDRKKGKKFARYQLGDLLLHLEKKHGEDWGKVYDEAWERIDKKVEGLSKHIKLEEERRSEDAQSKAALTDWLRAKASFVIEGLKEADKDEFCRCELKLQKWYGDLRGKPFAIEAENSILDISGFSKQYNCAFIWQKDGVKKLNLYLIINYFKGGKLRFKKIKPEAFEANRFYTVINKKSGEIVPMEVNFNFDDPNLIILPLAFGKRQGREFIWNDLLSLETGSLKLANGRVIEKTLYNRRTRQDEPALFVALTFERREVLDSSNIKPMNLIGVDRGENIPAVIALTDPEGCPLSRFKDSLGNPTHILRIGESYKEKQRTIQAKKEVEQRRAGGYSRKYASKAKNLADDMVRNTARDLLYYAVTQDAMLIFENLSRGFGRQGKRTFMAERQYTRMEDWLTAKLAYEGLPSKTYLSKTLAQYTSKTCSNCGFTITSADYDRVLEKLKKTATGWMTTINGKELKVEGQITYYNRYKRQNVVKDLSVELDRLSEESVNNDISSWTKGRSGEALSLLKKRFSHRPVQEKFVCLNCGFETHADEQAALNIARSWLFLRSQEYKKYQTNKTTGNTDKRAFVETWQSFYRKKLKEVWKPAV

SEQ ID NO: 35481 - protein, 978 aa, synthetic construct
  REGION 1..978: note = engineered CasX variant
QEIKRINKIRRRLVKDSNTKKAGKTGPMKTLLVRVMTPDLRERLENLRKKPENIPQPISNTSRANLNKLLTDYTEMKKAILHVYWEEFQKDPVGLMSRVAQPASKKIDQNKLKPEMDEKGNLTTAGFACSQCGQPLFVYKLEQVSEKGKAYTNYVGRCNVAEHEKLILLAQLKPEKDSDEAVTYSLGKFGQRALDFYSIHVTKESTHPVKPLAQIAGNRYASHPVGKALSDACMGTIASFLSKYQDIIIEHQKVVKGNQKRLESLRELAGKENLEYPSVTLPPQPHTKEGVDAYNEVIARVRMWVNLNLWQKLKLSRDDAKPLLRLKGFPSFPLVERQANEVDWWDMVCNVKKLINEKKEDGKVFWQNLAGYKRQEALRPYLSSEEDRKKGKKFARYQLGDLLLHLEKKHGEDWGKVYDEAWERIDKKVEGLSKHIKLEEERRSEDAQSKAALTDWLRAKASFVIEGLKEADKDEFCRCELKLQKWYGDLRGKPFAIEAENSILDISGFSKQYNCAFIWQKDGVKKLNLYLIINYFKGGKLRFKKIKPEAFEANRFYTVINKKSGEIVPMEVNFNFDDPNLIILPLAFGKRQGREFIWNDLLSLETGSLKLANGRVIEKTLYNRRTRQDEPALFVALTFERREVLDSSNIKPMNLIGVDRGENIPAVIALTDPEGCPLSRFKDSLGNPTHILRIGESYKEKQRTIQAKKEVEQRRAGGYSRKYASKAKNLADDMVRNTARDLLYYAVTQDAMLIFENLSRGFGRQGKRTFMAERQYTRMEDWLTAKLAYEGLPSKTYLSKTLAQYTSKTCSNCGFTITSADYDRVLEKLKKTATGWMTTINGKELKVEGQITYYNRYKRQNVVKDLSVELDRLSEESVNNDISSWTKGRSGEALSLLKKRFSHRPVQEKFVCLNCGFETHADEQAALNIARSWLFLRSQEYKKYQTNKTTGNTDKRAFVETWQSFYRKKLKEVWKPAV

SEQ ID NO: 35482 - protein, 978 aa, synthetic construct
  REGION 1..978: note = engineered CasX variant
QEIKRINKIRRRLVKDSNTKKAGKTGPMKTLLVRVMTPDLRERLENLRKKPENIPQPISNTSRANLNKLLTDYTEMKKAILHVYWEEFQKDPVGLMSRVAQPASKKIDQNKLKPEMDEKGNLTTAGFACSQCGQPLFVYKLEQVSEKGKAYTNYVGRCNVAEHEKLILLAQLKPEKDSDEAVTYSLGKFGQRALDFYSIHVTKESTHPVKPLAQIAGNRYASTPVGKALSDACMGTIASFLSKYQDIIIEHQKVVKGNQKRLESLRELAGKENLEYPSVTLPPQPHTKEGVDAYNEVIARVRMWVNLNLWQKLKLSRDDAKPLLRLKGFPSFPLVERQANEVDWWDMVCNVKKLINEKKEDGKVFWQNLAGYKRQEALRPYLSSEEDRKKGKKFARYQLGDLLLHLEKKHGEDWGKVYDEAWERIDKKVEGLSKHIKLEEERRSEDAQSKAALTDWLRAKASFVIEGLKEADKDEFCRCELKLQKWYGDLRGKPFAIEAENSILDISGFSKQYNCAFIWQKDGVKKLNLYLIINYFKGGKLRFKKIKPEAFEANRFYTVINKKSGEIVPMEVNFNFDDPNLIILPLAFGKRQGREFIWNDLLSLETGSLKLANGRVIEKTLYNRRTRQDEPALFVALTFERREVLDSSNIKPMNLIGVDRGENIPAVIALTDPEGCPLSRFKDSLGNPTHILRIGESYKEKQRTIQAKKEVEQRRAGGYSRKYASKAKNLADDMVRNTARDLLYYAVTQDAMLIFENLSRGFGRQGKRTFMAERQYTRMEDWLTAKLAYEGLPSKTYLSKTLAQYTSKTCSNCGFTITSADYDRVLEKLKKTATGWMTTINGKELKVEGQITYYNRYKRQNVVKDLSVELDRLSEESVNNDISSWTKGRSGEALSLLKKRFSHRPVQEKFVCLNCGFETHADEQAALNIARSWLFLRSQEYKKYQTNKTTGNTDKRAFVETWQSFYRKKLKEVWKPAV

SEQ ID NO: 35483 - protein, 978 aa, synthetic construct
  REGION 1..978: note = engineered CasX variant
QEIKRINKIRRRLVKDSNTKKAGKTGPMKTLLVRVMTPDLRERLENLRKKPENIPQPISNTSRANLNKLLTDYTEMKKAILHVYWEEFQKDPVGLMSRVAQPASKKIDQNKLKPEMDEKGNLTTAGFACSQCGQPLFVYKLEQVSEKGKAYTNYVGRCNVAEHEKLILLAQLKPEKDSDEAVTYSLGKFGQRALDFYSIHVTKESTHPVKPLAQIAGNRYASAPVGKALSDACMGTIASFLSKYQDIIIEHQKVVKGNQKRLESLRELAGKENLEYPSVTLPPQPHTKEGVDAYNEVIARVRMWVNLNLWQKLKLSRDDAKPLLRLKGFPSFPLVERQANEVDWWDMVCNVKKLINEKKEDGKVFWQNLAGYKRQEALRPYLSSEEDRKKGKKFARYQLGDLLLHLEKKHGEDWGKVYDEAWERIDKKVEGLSKHIKLEEERRSEDAQSKAALTDWLRAKASFVIEGLKEADKDEFCRCELKLQKWYGDLRGKPFAIEAENSILDISGFSKQYNCAFIWQKDGVKKLNLYLIINYFKGGKLRFKKIKPEAFEANRFYTVINKKSGEIVPMEVNFNFDDPNLIILPLAFGKRQGREFIWNDLLSLETGSLKLANGRVIEKTLYNRRTRQDEPALFVALTFERREVLDSSNIKPMNLIGVDRGENIPAVIALTDPEGCPLSRFKDSLGNPTHILRIGESYKEKQRTIQAKKEVEQRRAGGYSRKYASKAKNLADDMVRNTARDLLYYAVTQDAMLIFENLSRGFGRQGKRTFMAERQYTRMEDWLTAKLAYEGLPSKTYLSKTLAQYTSKTCSNCGFTITSADYDRVLEKLKKTATGWMTTINGKELKVEGQITYYNRYKRQNVVKDLSVELDRLSEESVNNDISSWTKGRSGEALSLLKKRFSHRPVQEKFVCLNCGFETHADEQAALNIARSWLFLRSQEYKKYQTNKTTGNTDKRAFVETWQSFYRKKLKEVWKPAV

SEQ ID NO: 35484 - protein, 978 aa, synthetic construct
  REGION 1..978: note = engineered CasX variant
QEIKRINKIRRRLVKDSNTKKAGKTGPMKTLLVRVMTPDLRERLENLRKKPENIPQPISNTSRANLNKLLTDYTEMKKAILHVYWEEFQKDPVGLMSRVAQPASKKIDQNKLKPEMDEKGNLTTAGFACSQCGQPLFVYKLEQVSEKGKAYTNYVGRCNVAEHEKLILLAQLKPEKDSDEAVTYSLGKFGQRALDFYSIHVTKESTHPVKPLAQIAGNRYASVPVGKALSDACMGTIASFLSKYQDIIIEHQKVVKGNQKRLESLRELAGKENLEYPSVTLPPQPHTKEGVDAYNEVIARVRMWVNLNLWQKLKLSRDDAKPLLRLKGFPSFPLVERQANEVDWWDMVCNVKKLINEKKEDGKVFWQNLAGYKRQEALRPYLSSEEDRKKGKKFARYQLGDLLLHLEKKHGEDWGKVYDEAWERIDKKVEGLSKHIKLEEERRSEDAQSKAALTDWLRAKASFVIEGLKEADKDEFCRCELKLQKWYGDLRGKPFAIEAENSILDISGFSKQYNCAFIWQKDGVKKLNLYLIINYFKGGKLRFKKIKPEAFEANRFYTVINKKSGEIVPMEVNFNFDDPNLIILPLAFGKRQGREFIWNDLLSLETGSLKLANGRVIEKTLYNRRTRQDEPALFVALTFERREVLDSSNIKPMNLIGVDRGENIPAVIALTDPEGCPLSRFKDSLGNPTHILRIGESYKEKQRTIQAKKEVEQRRAGGYSRKYASKAKNLADDMVRNTARDLLYYAVTQDAMLIFENLSRGFGRQGKRTFMAERQYTRMEDWLTAKLAYEGLPSKTYLSKTLAQYTSKTCSNCGFTITSADYDRVLEKLKKTATGWMTTINGKELKVEGQITYYNRYKRQNVVKDLSVELDRLSEESVNNDISSWTKGRSGEALSLLKKRFSHRPVQEKFVCLNCGFETHADEQAALNIARSWLFLRSQEYKKYQTNKTTGNTDKRAFVETWQSFYRKKLKEVWKPAV

SEQ ID NO: 35485 - protein, 978 aa, synthetic construct
  REGION 1..978: note = engineered CasX variant
QEIKRINKIRRRLVKDSNTKKAGKTGPMKTLLVRVMTPDLRERLENLRKKPENIPQPISNTSRANLNKLLTDYTEMKKAILHVYWEEFQKDPVGLMSRVAQPASKKIDQNKLKPEMDEKGNLTTAGFACSQCGQPLFVYKLEQVSEKGKAYTNYFGRCNVAEHEKLILLAQLKPEKDSDEAVTYSLGKFGQRALDFYSIHVTKESTHPVKPLAQIAGNRYASYPVGKALSDACMGTIASFLSKYQDIIIEHQKVVKGNQKRLESLRELAGKENLEYPSVTLPPQPHTKEGVDAYNEVIARVRMWVNLNLWQKLKLSRDDAKPLLRLKGFPSFPLVERQANEVDWWDMVCNVKKLINEKKEDGKVFWQNLAGYKRQEALRPYLSSEEDRKKGKKFARYQLGDLLLHLEKKHGEDWGKVYDEAWERIDKKVEGLSKHIKLEEERRSEDAQSKAALTDWLRAKASFVIEGLKEADKDEFCRCELKLQKWYGDLRGKPFAIEAENSILDISGFSKQYNCAFIWQKDGVKKLNLYLIINYFKGGKLRFKKIKPEAFEANRFYTVINKKSGEIVPMEVNFNFDDPNLIILPLAFGKRQGREFIWNDLLSLETGSLKLANGRVIEKTLYNRRTRQDEPALFVALTFERREVLDSSNIKPMNLIGVDRGENIPAVIALTDPEGCPLSRFKDSLGNPTHILRIGESYKEKQRTIQAKKEVEQRRAGGYSRKYASKAKNLADDMVRNTARDLLYYAVTQDAMLIFENLSRGFGRQGKRTFMAERQYTRMEDWLTAKLAYEGLASKTYLSKTLAQYTSKTCSNCGFTITSADYDRVLEKLKKTATGWMTTINGKELKVEGQITYYNRYKRQNVVKDLSVELDRLSEESVNNDISSWTKGRSGEALSLLKKRFSHRPVQEKFVCLNCGFETHADEQAALNIARSWLFLRSQEYKKYQTNKTTGNTDKRAFVETWQSFYRKKLKEVWKPAV

SEQ ID NO: 35486 - protein, 978 aa, synthetic construct
  REGION 1..978: note = engineered CasX variant
QEIKRINKIRRRLVKDSNTKKAGKTGPMKTLLVRVMTPDLRERLENLRKKPENIPQPISNTSRANLNKLLTDYTEMKKAILHVYWEEFQKDPVGLMSRVAQPASKKIDQNKLKPEMDEKGNLTTAGFACSQCGQPLFVYKLEQVSEKGKAYTNYFGRCNVAEHEKLILLAQLKPEKDSDEAVTYSLGKFGQRALDFYSIHVTKESTHPVKPLAQIAGNRYASHPVGKALSDACMGTIASFLSKYQDIIIEHQKVVKGNQKRLESLRELAGKENLEYPSVTLPPQPHTKEGVDAYNEVIARVRMWVNLNLWQKLKLSRDDAKPLLRLKGFPSFPLVERQANEVDWWDMVCNVKKLINEKKEDGKVFWQNLAGYKRQEALRPYLSSEEDRKKGKKFARYQLGDLLLHLEKKHGEDWGKVYDEAWERIDKKVEGLSKHIKLEEERRSEDAQSKAALTDWLRAKASFVIEGLKEADKDEFCRCELKLQKWYGDLRGKPFAIEAENSILDISGFSKQYNCAFIWQKDGVKKLNLYLIINYFKGGKLRFKKIKPEAFEANRFYTVINKKSGEIVPMEVNFNFDDPNLIILPLAFGKRQGREFIWNDLLSLETGSLKLANGRVIEKTLYNRRTRQDEPALFVALTFERREVLDSSNIKPMNLIGVDRGENIPAVIALTDPEGCPLSRFKDSLGNPTHILRIGESYKEKQRTIQAKKEVEQRRAGGYSRKYASKAKNLADDMVRNTARDLLYYAVTQDAMLIFENLSRGFGRQGKRTFMAERQYTRMEDWLTAKLAYEGLASKTYLSKTLAQYTSKTCSNCGFTITSADYDRVLEKLKKTATGWMTTINGKELKVEGQITYYNRYKRQNVVKDLSVELDRLSEESVNNDISSWTKGRSGEALSLLKKRFSHRPVQEKFVCLNCGFETHADEQAALNIARSWLFLRSQEYKKYQTNKTTGNTDKRAFVETWQSFYRKKLKEVWKPAV

SEQ ID NO: 35487 - protein, 978 aa, synthetic construct
  REGION 1..978: note = engineered CasX variant
QEIKRINKIRRRLVKDSNTKKAGKTGPMKTLLVRVMTPDLRERLENLRKKPENIPQPISNTSRANLNKLLTDYTEMKKAILHVYWEEFQKDPVGLMSRVAQPASKKIDQNKLKPEMDEKGNLTTAGFACSQCGQPLFVYKLEQVSEKGKAYTNYFGRCNVAEHEKLILLAQLKPEKDSDEAVTYSLGKFGQRALDFYSIHVTKESTHPVKPLAQIAGNRYASTPVGKALSDACMGTIASFLSKYQDIIIEHQKVVKGNQKRLESLRELAGKENLEYPSVTLPPQPHTKEGVDAYNEVIARVRMWVNLNLWQKLKLSRDDAKPLLRLKGFPSFPLVERQANEVDWWDMVCNVKKLINEKKEDGKVFWQNLAGYKRQEALRPYLSSEEDRKKGKKFARYQLGDLLLHLEKKHGEDWGKVYDEAWERIDKKVEGLSKHIKLEEERRSEDAQSKAALTDWLRAKASFVIEGLKEADKDEFCRCELKLQKWYGDLRGKPFAIEAENSILDISGFSKQYNCAFIWQKDGVKKLNLYLIINYFKGGKLRFKKIKPEAFEANRFYTVINKKSGEIVPMEVNFNFDDPNLIILPLAFGKRQGREFIWNDLLSLETGSLKLANGRVIEKTLYNRRTRQDEPALFVALTFERREVLDSSNIKPMNLIGVDRGENIPAVIALTDPEGCPLSRFKDSLGNPTHILRIGESYKEKQRTIQAKKEVEQRRAGGYSRKYASKAKNLADDMVRNTARDLLYYAVTQDAMLIFENLSRGFGRQGKRTFMAERQYTRMEDWLTAKLAYEGLASKTYLSKTLAQYTSKTCSNCGFTITSADYDRVLEKLKKTATGWMTTINGKELKVEGQITYYNRYKRQNVVKDLSVELDRLSEESVNNDISSWTKGRSGEALSLLKKRFSHRPVQEKFVCLNCGFETHADEQAALNIARSWLFLRSQEYKKYQTNKTTGNTDKRAFVETWQSFYRKKLKEVWKPAV

SEQ ID NO: 35488 - protein, 978 aa, synthetic construct
  REGION 1..978: note = engineered CasX variant
QEIKRINKIRRRLVKDSNTKKAGKTGPMKTLLVRVMTPDLRERLENLRKKPENIPQPISNTSRANLNKLLTDYTEMKKAILHVYWEEFQKDPVGLMSRVAQPASKKIDQNKLKPEMDEKGNLTTAGFACSQCGQPLFVYKLEQVSEKGKAYTNYFGRCNVAEHEKLILLAQLKPEKDSDEAVTYSLGKFGQRALDFYSIHVTKESTHPVKPLAQIAGNRYASAPVGKALSDACMGTIASFLSKYQDIIIEHQKVVKGNQKRLESLRELAGKENLEYPSVTLPPQPHTKEGVDAYNEVIARVRMWVNLNLWQKLKLSRDDAKPLLRLKGFPSFPLVERQANEVDWWDMVCNVKKLINEKKEDGKVFWQNLAGYKRQEALRPYLSSEEDRKKGKKFARYQLGDLLLHLEKKHGEDWGKVYDEAWERIDKKVEGLSKHIKLEEERRSEDAQSKAALTDWLRAKASFVIEGLKEADKDEFCRCELKLQKWYGDLRGKPFAIEAENSILDISGFSKQYNCAFIWQKDGVKKLNLYLIINYFKGGKLRFKKIKPEAFEANRFYTVINKKSGEIVPMEVNFNFDDPNLIILPLAFGKRQGREFIWNDLLSLETGSLKLANGRVIEKTLYNRRTRQDEPALFVALTFERREVLDSSNIKPMNLIGVDRGENIPAVIALTDPEGCPLSRFKDSLGNPTHILRIGESYKEKQRTIQAKKEVEQRRAGGYSRKYASKAKNLADDMVRNTARDLLYYAVTQDAMLIFENLSRGFGRQGKRTFMAERQYTRMEDWLTAKLAYEGLASKTYLSKTLAQYTSKTCSNCGFTITSADYDRVLEKLKKTATGWMTTINGKELKVEGQITYYNRYKRQNVVKDLSVELDRLSEESVNNDISSWTKGRSGEALSLLKKRFSHRPVQEKFVCLNCGFETHADEQAALNIARSWLFLRSQEYKKYQTNKTTGNTDKRAFVETWQSFYRKKLKEVWKPAV

SEQ ID NO: 35489 - protein, 978 aa, synthetic construct
  REGION 1..978: note = engineered CasX variant
QEIKRINKIRRRLVKDSNTKKAGKTGPMKTLLVRVMTPDLRERLENLRKKPENIPQPISNTSRANLNKLLTDYTEMKKAILHVYWEEFQKDPVGLMSRVAQPASKKIDQNKLKPEMDEKGNLTTAGFACSQCGQPLFVYKLEQVSEKGKAYTNYFGRCNVAEHEKLILLAQLKPEKDSDEAVTYSLGKFGQRALDFYSIHVTKESTHPVKPLAQIAGNRYASVPVGKALSDACMGTIASFLSKYQDIIIEHQKVVKGNQKRLESLRELAGKENLEYPSVTLPPQPHTKEGVDAYNEVIARVRMWVNLNLWQKLKLSRDDAKPLLRLKGFPSFPLVERQANEVDWWDMVCNVKKLINEKKEDGKVFWQNLAGYKRQEALRPYLSSEEDRKKGKKFARYQLGDLLLHLEKKHGEDWGKVYDEAWERIDKKVEGLSKHIKLEEERRSEDAQSKAALTDWLRAKASFVIEGLKEADKDEFCRCELKLQKWYGDLRGKPFAIEAENSILDISGFSKQYNCAFIWQKDGVKKLNLYLIINYFKGGKLRFKKIKPEAFEANRFYTVINKKSGEIVPMEVNFNFDDPNLIILPLAFGKRQGREFIWNDLLSLETGSLKLANGRVIEKTLYNRRTRQDEPALFVALTFERREVLDSSNIKPMNLIGVDRGENIPAVIALTDPEGCPLSRFKDSLGNPTHILRIGESYKEKQRTIQAKKEVEQRRAGGYSRKYASKAKNLADDMVRNTARDLLYYAVTQDAMLIFENLSRGFGRQGKRTFMAERQYTRMEDWLTAKLAYEGLASKTYLSKTLAQYTSKTCSNCGFTITSADYDRVLEKLKKTATGWMTTINGKELKVEGQITYYNRYKRQNVVKDLSVELDRLSEESVNNDISSWTKGRSGEALSLLKKRFSHRPVQEKFVCLNCGFETHADEQAALNIARSWLFLRSQEYKKYQTNKTTGNTDKRAFVETWQSFYRKKLKEVWKPAV

SEQ ID NO: 35490 - protein, 978 aa, synthetic construct
  REGION 1..978: note = engineered CasX variant
QEIKRINKIRRRLVKDSNTKKAGKTGPMKTLLVRVMTPDLRERLENLRKKPENIPQPISNTSRANLNKLLTDYTEMKKAILHVYWEEFQKDPVGLMSRVAQPASKKIDQNKLKPEMDEKGNLTTAGFACSQCGQPLFVYKLEQVSEKGKAYTNYFGRCNVAEHEKLILLAQLKPEKDSDEAVTYSLGKFGQRALDFYSIHVTKESTHPVKPLAQIAGNRYASYPVGKALSDACMGTIASFLSKYQDIIIEHQKVVKGNQKRLESLRELAGKENLEYPSVTLPPQPHTKEGVDAYNEVIARVRMWVNLNLWQKLKLSRDDAKPLLRLKGFPSFPLVERQANEVDWWDMVCNVKKLINEKKEDGKVFWQNLAGYKRQEALRPYLSSEEDRKKGKKFARYQLGDLLLHLEKKHGEDWGKVYDEAWERIDKKVEGLSKHIKLEEERRSEDAQSKAALTDWLRAKASFVIEGLKEADKDEFCRCELKLQKWYGDLRGKPFAIEAENSILDISGFSKQYNCAFIWQKDGVKKLNLYLIINYFKGGKLRFKKIKPEAFEANRFYTVINKKSGEIVPMEVNFNFDDPNLIILPLAFGKRQGREFIWNDLLSLETGSLKLANGRVIEKTLYNRRTRQDEPALFVALTFERREVLDSSNIKPMNLIGVDRGENIPAVIALTDPEGCPLSRFKDSLGNPTHILRIGESYKEKQRTIQAKKEVEQRRAGGYSRKYASKAKNLADDMVRNTARDLLYYAVTQDAMLIFENLSRGFGRQGKRTFMAERQYTRMEDWLTAKLAYEGLPSKVYLSKTLAQYTSKTCSNCGFTITSADYDRVLEKLKKTATGWMTTINGKELKVEGQITYYNRYKRQNVVKDLSVELDRLSEESVNNDISSWTKGRSGEALSLLKKRFSHRPVQEKFVCLNCGFETHADEQAALNIARSWLFLRSQEYKKYQTNKTTGNTDKRAFVETWQSFYRKKLKEVWKPAV

SEQ ID NO: 35491 - protein, 978 aa, synthetic construct
  REGION 1..978: note = engineered CasX variant
QEIKRINKIRRRLVKDSNTKKAGKTGPMKTLLVRVMTPDLRERLENLRKKPENIPQPISNTSRANLNKLLTDYTEMKKAILHVYWEEFQKDPVGLMSRVAQPASKKIDQNKLKPEMDEKGNLTTAGFACSQCGQPLFVYKLEQVSEKGKAYTNYFGRCNVAEHEKLILLAQLKPEKDSDEAVTYSLGKFGQRALDFYSIHVTKESTHPVKPLAQIAGNRYASHPVGKALSDACMGTIASFLSKYQDIIIEHQKVVKGNQKRLESLRELAGKENLEYPSVTLPPQPHTKEGVDAYNEVIARVRMWVNLNLWQKLKLSRDDAKPLLRLKGFPSFPLVERQANEVDWWDMVCNVKKLINEKKEDGKVFWQNLAGYKRQEALRPYLSSEEDRKKGKKFARYQLGDLLLHLEKKHGEDWGKVYDEAWERIDKKVEGLSKHIKLEEERRSEDAQSKAALTDWLRAKASFVIEGLKEADKDEFCRCELKLQKWYGDLRGKPFAIEAENSILDISGFSKQYNCAFIWQKDGVKKLNLYLIINYFKGGKLRFKKIKPEAFEANRFYTVINKKSGEIVPMEVNFNFDDPNLIILPLAFGKRQGREFIWNDLLSLETGSLKLANGRVIEKTLYNRRTRQDEPALFVALTFERREVLDSSNIKPMNLIGVDRGENIPAVIALTDPEGCPLSRFKDSLGNPTHILRIGESYKEKQRTIQAKKEVEQRRAGGYSRKYASKAKNLADDMVRNTARDLLYYAVTQDAMLIFENLSRGFGRQGKRTFMAERQYTRMEDWLTAKLAYEGLPSKVYLSKTLAQYTSKTCSNCGFTITSADYDRVLEKLKKTATGWMTTINGKELKVEGQITYYNRYKRQNVVKDLSVELDRLSEESVNNDISSWTKGRSGEALSLLKKRFSHRPVQEKFVCLNCGFETHADEQAALNIARSWLFLRSQEYKKYQTNKTTGNTDKRAFVETWQSFYRKKLKEVWKPAV

SEQ ID NO: 35492 - protein, 978 aa, synthetic construct
  REGION 1..978: note = engineered CasX variant
QEIKRINKIRRRLVKDSNTKKAGKTGPMKTLLVRVMTPDLRERLENLRKKPENIPQPISNTSRANLNKLLTDYTEMKKAILHVYWEEFQKDPVGLMSRVAQPASKKIDQNKLKPEMDEKGNLTTAGFACSQCGQPLFVYKLEQVSEKGKAYTNYFGRCNVAEHEKLILLAQLKPEKDSDEAVTYSLGKFGQRALDFYSIHVTKESTHPVKPLAQIAGNRYASTPVGKALSDACMGTIASFLSKYQDIIIEHQKVVKGNQKRLESLRELAGKENLEYPSVTLPPQPHTKEGVDAYNEVIARVRMWVNLNLWQKLKLSRDDAKPLLRLKGFPSFPLVERQANEVDWWDMVCNVKKLINEKKEDGKVFWQNLAGYKRQEALRPYLSSEEDRKKGKKFARYQLGDLLLHLEKKHGEDWGKVYDEAWERIDKKVEGLSKHIKLEEERRSEDAQSKAALTDWLRAKASFVIEGLKEADKDEFCRCELKLQKWYGDLRGKPFAIEAENSILDISGFSKQYNCAFIWQKDGVKKLNLYLIINYFKGGKLRFKKIKPEAFEANRFYTVINKKSGEIVPMEVNFNFDDPNLIILPLAFGKRQGREFIWNDLLSLETGSLKLANGRVIEKTLYNRRTRQDEPALFVALTFERREVLDSSNIKPMNLIGVDRGENIPAVIALTDPEGCPLSRFKDSLGNPTHILRIGESYKEKQRTIQAKKEVEQRRAGGYSRKYASKAKNLADDMVRNTARDLLYYAVTQDAMLIFENLSRGFGRQGKRTFMAERQYTRMEDWLTAKLAYEGLPSKVYLSKTLAQYTSKTCSNCGFTITSADYDRVLEKLKKTATGWMTTINGKELKVEGQITYYNRYKRQNVVKDLSVELDRLSEESVNNDISSWTKGRSGEALSLLKKRFSHRPVQEKFVCLNCGFETHADEQAALNIARSWLFLRSQEYKKYQTNKTTGNTDKRAFVETWQSFYRKKLKEVWKPAV

SEQ ID NO: 35493 - protein, 978 aa, synthetic construct
  REGION 1..978: note = engineered CasX variant
QEIKRINKIRRRLVKDSNTKKAGKTGPMKTLLVRVMTPDLRERLENLRKKPENIPQPISNTSRANLNKLLTDYTEMKKAILHVYWEEFQKDPVGLMSRVAQPASKKIDQNKLKPEMDEKGNLTTAGFACSQCGQPLFVYKLEQVSEKGKAYTNYFGRCNVAEHEKLILLAQLKPEKDSDEAVTYSLGKFGQRALDFYSIHVTKESTHPVKPLAQIAGNRYASAPVGKALSDACMGTIASFLSKYQDIIIEHQKVVKGNQKRLESLRELAGKENLEYPSVTLPPQPHTKEGVDAYNEVIARVRMWVNLNLWQKLKLSRDDAKPLLRLKGFPSFPLVERQANEVDWWDMVCNVKKLINEKKEDGKVFWQNLAGYKRQEALRPYLSSEEDRKKGKKFARYQLGDLLLHLEKKHGEDWGKVYDEAWERIDKKVEGLSKHIKLEEERRSEDAQSKAALTDWLRAKASFVIEGLKEADKDEFCRCELKLQKWYGDLRGKPFAIEAENSILDISGFSKQYNCAFIWQKDGVKKLNLYLIINYFKGGKLRFKKIKPEAFEANRFYTVINKKSGEIVPMEVNFNFDDPNLIILPLAFGKRQGREFIWNDLLSLETGSLKLANGRVIEKTLYNRRTRQDEPALFVALTFERREVLDSSNIKPMNLIGVDRGENIPAVIALTDPEGCPLSRFKDSLGNPTHILRIGESYKEKQRTIQAKKEVEQRRAGGYSRKYASKAKNLADDMVRNTARDLLYYAVTQDAMLIFENLSRGFGRQGKRTFMAERQYTRMEDWLTAKLAYEGLPSKVYLSKTLAQYTSKTCSNCGFTITSADYDRVLEKLKKTATGWMTTINGKELKVEGQITYYNRYKRQNVVKDLSVELDRLSEESVNNDISSWTKGRSGEALSLLKKRFSHRPVQEKFVCLNCGFETHADEQAALNIARSWLFLRSQEYKKYQTNKTTGNTDKRAFVETWQSFYRKKLKEVWKPAV

SEQ ID NO: 35494 - protein, 978 aa, synthetic construct
  REGION 1..978: note = engineered CasX variant
QEIKRINKIRRRLVKDSNTKKAGKTGPMKTLLVRVMTPDLRERLENLRKKPENIPQPISNTSRANLNKLLTDYTEMKKAILHVYWEEFQKDPVGLMSRVAQPASKKIDQNKLKPEMDEKGNLTTAGFACSQCGQPLFVYKLEQVSEKGKAYTNYFGRCNVAEHEKLILLAQLKPEKDSDEAVTYSLGKFGQRALDFYSIHVTKESTHPVKPLAQIAGNRYASVPVGKALSDACMGTIASFLSKYQDIIIEHQKVVKGNQKRLESLRELAGKENLEYPSVTLPPQPHTKEGVDAYNEVIARVRMWVNLNLWQKLKLSRDDAKPLLRLKGFPSFPLVERQANEVDWWDMVCNVKKLINEKKEDGKVFWQNLAGYKRQEALRPYLSSEEDRKKGKKFARYQLGDLLLHLEKKHGEDWGKVYDEAWERIDKKVEGLSKHIKLEEERRSEDAQSKAALTDWLRAKASFVIEGLKEADKDEFCRCELKLQKWYGDLRGKPFAIEAENSILDISGFSKQYNCAFIWQKDGVKKLNLYLIINYFKGGKLRFKKIKPEAFEANRFYTVINKKSGEIVPMEVNFNFDDPNLIILPLAFGKRQGREFIWNDLLSLETGSLKLANGRVIEKTLYNRRTRQDEPALFVALTFERREVLDSSNIKPMNLIGVDRGENIPAVIALTDPEGCPLSRFKDSLGNPTHILRIGESYKEKQRTIQAKKEVEQRRAGGYSRKYASKAKNLADDMVRNTARDLLYYAVTQDAMLIFENLSRGFGRQGKRTFMAERQYTRMEDWLTAKLAYEGLPSKVYLSKTLAQYTSKTCSNCGFTITSADYDRVLEKLKKTATGWMTTINGKELKVEGQITYYNRYKRQNVVKDLSVELDRLSEESVNNDISSWTKGRSGEALSLLKKRFSHRPVQEKFVCLNCGFETHADEQAALNIARSWLFLRSQEYKKYQTNKTTGNTDKRAFVETWQSFYRKKLKEVWKPAV

SEQ ID NO: 35495 - protein, 979 aa, synthetic construct
  REGION 1..979: note = engineered CasX variant
QEIKRINKIRRRLVKDSNTKKAGKTGPMKTLLVRVMTPDLRERLENLRKKPENIPQPISNTSRANLNKLLTDYTEMKKAILHVYWEEFQKDPVGLMSRVAQPASKKIDQNKLKPEMDEKGNLTTAGFACSQCGQPLFVYKLEQVSEKGKAYTNYFGRCNVAEHEKLILLAQLKPEKDSDEAVTYSLGKFGQRALDFYSIHVTKESTHPVKPLAQIAGNRYASYPVGKALSDACMGTIASFLSKYQDIIIEHQKVVKGNQKRLESLRELAGKENLEYPSVTLPPQPHTKEGVDAYNEVIARVRMWVNLNLWQKLKLSRDDAKPLLRLKGFPSFPLVERQANEVDWWDMVCNVKKLINEKKEDGKVFWQNLAGYKRQEALRPYLSSEEDRKKGKKFARYQLGDLLLHLEKKHGEDWGKVYDEAWERIDKKVEGLSKHIKLEEERRSEDAQSKAALTDWLRAKASFVIEGLKEADKDEFCRCELKLQKWYGDLRGKPFAIEAENSILDISGFSKQYNCAFIWQKDGVKKLNLYLIINYFKGGKLRFKKIKPEAFEANRFYTVINKKSGEIVPMEVNFNFDDPNLIILPLAFGKRQGREFIWNDLLSLETGSLKLANGRVIEKTLYNRRTRQDEPALFVALTFERREVLDSSNIKPMNLIGVDRGENIPAVIALTDPEGCPLSRFKDSLGNPTHILRIGESYKEKQRTIQAKKEVEQRRAGGYSRKYASKAKNLADDMVRNTARDLLYYAVTQDAMLIFENLSRGFGRQGKRTFMAERQYTRMEDWLTAKLAYEGPLPSKTYLSKTLAQYTSKTCSNCGFTITSADYDRVLEKLKKTATGWMTTINGKELKVEGQITYYNRYKRQNVVKDLSVELDRLSEESVNNDISSWTKGRSGEALSLLKKRFSHRPVQEKFVCLNCGFETHADEQAALNIARSWLFLRSQEYKKYQTNKTTGNTDKRAFVETWQSFYRKKLKEVWKPAV

SEQ ID NO: 35496 - protein, 979 aa, synthetic construct
  REGION 1..979: note = engineered CasX variant
QEIKRINKIRRRLVKDSNTKKAGKTGPMKTLLVRVMTPDLRERLENLRKKPENIPQPISNTSRANLNKLLTDYTEMKKAILHVYWEEFQKDPVGLMSRVAQPASKKIDQNKLKPEMDEKGNLTTAGFACSQCGQPLFVYKLEQVSEKGKAYTNYFGRCNVAEHEKLILLAQLKPEKDSDEAVTYSLGKFGQRALDFYSIHVTKESTHPVKPLAQIAGNRYASHPVGKALSDACMGTIASFLSKYQDIIIEHQKVVKGNQKRLESLRELAGKENLEYPSVTLPPQPHTKEGVDAYNEVIARVRMWVNLNLWQKLKLSRDDAKPLLRLKGFPSFPLVERQANEVDWWDMVCNVKKLINEKKEDGKVFWQNLAGYKRQEALRPYLSSEEDRKKGKKFARYQLGDLLLHLEKKHGEDWGKVYDEAWERIDKKVEGLSKHIKLEEERRSEDAQSKAALTDWLRAKASFVIEGLKEADKDEFCRCELKLQKWYGDLRGKPFAIEAENSILDISGFSKQYNCAFIWQKDGVKKLNLYLIINYFKGGKLRFKKIKPEAFEANRFYTVINKKSGEIVPMEVNFNFDDPNLIILPLAFGKRQGREFIWNDLLSLETGSLKLANGRVIEKTLYNRRTRQDEPALFVALTFERREVLDSSNIKPMNLIGVDRGENIPAVIALTDPEGCPLSRFKDSLGNPTHILRIGESYKEKQRTIQAKKEVEQRRAGGYSRKYASKAKNLADDMVRNTARDLLYYAVTQDAMLIFENLSRGFGRQGKRTFMAERQYTRMEDWLTAKLAYEGPLPSKTYLSKTLAQYTSKTCSNCGFTITSADYDRVLEKLKKTATGWMTTINGKELKVEGQITYYNRYKRQNVVKDLSVELDRLSEESVNNDISSWTKGRSGEALSLLKKRFSHRPVQEKFVCLNCGFETHADEQAALNIARSWLFLRSQEYKKYQTNKTTGNTDKRAFVETWQSFYRKKLKEVWKPAV

SEQ ID NO: 35497 - protein, 979 aa, synthetic construct
  REGION 1..979: note = engineered CasX variant
QEIKRINKIRRRLVKDSNTKKAGKTGPMKTLLVRVMTPDLRERLENLRKKPENIPQPISNTSRANLNKLLTDYTEMKKAILHVYWEEFQKDPVGLMSRVAQPASKKIDQNKLKPEMDEKGNLTTAGFACSQCGQPLFVYKLEQVSEKGKAYTNYFGRCNVAEHEKLILLAQLKPEKDSDEAVTYSLGKFGQRALDFYSIHVTKESTHPVKPLAQIAGNRYASTPVGKALSDACMGTIASFLSKYQDIIIEHQKVVKGNQKRLESLRELAGKENLEYPSVTLPPQPHTKEGVDAYNEVIARVRMWVNLNLWQKLKLSRDDAKPLLRLKGFPSFPLVERQANEVDWWDMVCNVKKLINEKKEDGKVFWQNLAGYKRQEALRPYLSSEEDRKKGKKFARYQLGDLLLHLEKKHGEDWGKVYDEAWERIDKKVEGLSKHIKLEEERRSEDAQSKAALTDWLRAKASFVIEGLKEADKDEFCRCELKLQKWYGDLRGKPFAIEAENSILDISGFSKQYNCAFIWQKDGVKKLNLYLIINYFKGGKLRFKKIKPEAFEANRFYTVINKKSGEIVPMEVNFNFDDPNLIILPLAFGKRQGREFIWNDLLSLETGSLKLANGRVIEKTLYNRRTRQDEPALFVALTFERREVLDSSNIKPMNLIGVDRGENIPAVIALTDPEGCPLSRFKDSLGNPTHILRIGESYKEKQRTIQAKKEVEQRRAGGYSRKYASKAKNLADDMVRNTARDLLYYAVTQDAMLIFENLSRGFGRQGKRTFMAERQYTRMEDWLTAKLAYEGPLPSKTYLSKTLAQYTSKTCSNCGFTITSADYDRVLEKLKKTATGWMTTINGKELKVEGQITYYNRYKRQNVVKDLSVELDRLSEESVNNDISSWTKGRSGEALSLLKKRFSHRPVQEKFVCLNCGFETHADEQAALNIARSWLFLRSQEYKKYQTNKTTGNTDKRAFVETWQSFYRKKLKEVWKPAV

SEQ ID NO: 35498 - protein, 979 aa, synthetic construct
  REGION 1..979: note = engineered CasX variant
QEIKRINKIRRRLVKDSNTKKAGKTGPMKTLLVRVMTPDLRERLENLRKKPENIPQPISNTSRANLNKLLTDYTEMKKAILHVYWEEFQKDPVGLMSRVAQPASKKIDQNKLKPEMDEKGNLTTAGFACSQCGQPLFVYKLEQVSEKGKAYTNYFGRCNVAEHEKLILLAQLKPEKDSDEAVTYSLGKFGQRALDFYSIHVTKESTHPVKPLAQIAGNRYASAPVGKALSDACMGTIASFLSKYQDIIIEHQKVVKGNQKRLESLRELAGKENLEYPSVTLPPQPHTKEGVDAYNEVIARVRMWVNLNLWQKLKLSRDDAKPLLRLKGFPSFPLVERQANEVDWWDMVCNVKKLINEKKEDGKVFWQNLAGYKRQEALRPYLSSEEDRKKGKKFARYQLGDLLLHLEKKHGEDWGKVYDEAWERIDKKVEGLSKHIKLEEERRSEDAQSKAALTDWLRAKASFVIEGLKEADKDEFCRCELKLQKWYGDLRGKPFAIEAENSILDISGFSKQYNCAFIWQKDGVKKLNLYLIINYFKGGKLRFKKIKPEAFEANRFYTVINKKSGEIVPMEVNFNFDDPNLIILPLAFGKRQGREFIWNDLLSLETGSLKLANGRVIEKTLYNRRTRQDEPALFVALTFERREVLDSSNIKPMNLIGVDRGENIPAVIALTDPEGCPLSRFKDSLGNPTHILRIGESYKEKQRTIQAKKEVEQRRAGGYSRKYASKAKNLADDMVRNTARDLLYYAVTQDAMLIFENLSRGFGRQGKRTFMAERQYTRMEDWLTAKLAYEGPLPSKTYLSKTLAQYTSKTCSNCGFTITSADYDRVLEKLKKTATGWMTTINGKELKVEGQITYYNRYKRQNVVKDLSVELDRLSEESVNNDISSWTKGRSGEALSLLKKRFSHRPVQEKFVCLNCGFETHADEQAALNIARSWLFLRSQEYKKYQTNKTTGNTDKRAFVETWQSFYRKKLKEVWKPAV

SEQ ID NO: 35499 - protein, 979 aa, synthetic construct
  REGION 1..979: note = engineered CasX variant
QEIKRINKIRRRLVKDSNTKKAGKTGPMKTLLVRVMTPDLRERLENLRKKPENIPQPISNTSRANLNKLLTDYTEMKKAILHVYWEEFQKDPVGLMSRVAQPASKKIDQNKLKPEMDEKGNLTTAGFACSQCGQPLFVYKLEQVSEKGKAYTNYFGRCNVAEHEKLILLAQLKPEKDSDEAVTYSLGKFGQRALDFYSIHVTKESTHPVKPLAQIAGNRYASVPVGKALSDACMGTIASFLSKYQDIIIEHQKVVKGNQKRLESLRELAGKENLEYPSVTLPPQPHTKEGVDAYNEVIARVRMWVNLNLWQKLKLSRDDAKPLLRLKGFPSFPLVERQANEVDWWDMVCNVKKLINEKKEDGKVFWQNLAGYKRQEALRPYLSSEEDRKKGKKFARYQLGDLLLHLEKKHGEDWGKVYDEAWERIDKKVEGLSKHIKLEEERRSEDAQSKAALTDWLRAKASFVIEGLKEADKDEFCRCELKLQKWYGDLRGKPFAIEAENSILDISGFSKQYNCAFIWQKDGVKKLNLYLIINYFKGGKLRFKKIKPEAFEANRFYTVINKKSGEIVPMEVNFNFDDPNLIILPLAFGKRQGREFIWNDLLSLETGSLKLANGRVIEKTLYNRRTRQDEPALFVALTFERREVLDSSNIKPMNLIGVDRGENIPAVIALTDPEGCPLSRFKDSLGNPTHILRIGESYKEKQRTIQAKKEVEQRRAGGYSRKYASKAKNLADDMVRNTARDLLYYAVTQDAMLIFENLSRGFGRQGKRTFMAERQYTRMEDWLTAKLAYEGPLPSKTYLSKTLAQYTSKTCSNCGFTITSADYDRVLEKLKKTATGWMTTINGKELKVEGQITYYNRYKRQNVVKDLSVELDRLSEESVNNDISSWTKGRSGEALSLLKKRFSHRPVQEKFVCLNCGFETHADEQAALNIARSWLFLRSQEYKKYQTNKTTGNTDKRAFVETWQSFYRKKLKEVWKPAV

SEQ ID NO: 35500 - protein, 979 aa, synthetic construct
  REGION 1..979: note = engineered CasX variant
QEIKRINKIRRRLVKDSNTKKAGKTGPMKTLLVRVMTPDLRERLENLRKKPENIPQPISNTSRANLNKLLTDYTEMKKAILHVYWEEFQKDPVGLMSRVAQPASKKIDQNKLKPEMDEKGNLTTAGFACSQCGQPLFVYKLEQVSEKGKAYTNYFGRCNVAEHEKLILLAQLKPEKDSDEAVTYSLGKFGQRALDFYSIHVTKESTHPVKPLAQIAGNRYASYPVGKALSDACMGTIASFLSKYQDIIIEHQKVVKGNQKRLESLRELAGKENLEYPSVTLPPQPHTKEGVDAYNEVIARVRMWVNLNLWQKLKLSRDDAKPLLRLKGFPSFPLVERQANEVDWWDMVCNVKKLINEKKEDGKVFWQNLAGYKRQEALRPYLSSEEDVRKKGKKFARYQLGDLLLHLEKKHGEDWGKVYDEAWERIDKKVEGLSKHIKLEEERRSEDAQSKAALTDWLRAKASFVIEGLKEADKDEFCRCELKLQKWYGDLRGKPFAIEAENSILDISGFSKQYNCAFIWQKDGVKKLNLYLIINYFKGGKLRFKKIKPEAFEANRFYTVINKKSGEIVPMEVNFNFDDPNLIILPLAFGKRQGREFIWNDLLSLETGSLKLANGRVIEKTLYNRRTRQDEPALFVALTFERREVLDSSNIKPMNLIGVDRGENIPAVIALTDPEGCPLSRFKDSLGNPTHILRIGESYKEKQRTIQAKKEVEQRRAGGYSRKYASKAKNLADDMVRNTARDLLYYAVTQDAMLIFENLSRGFGRQGKRTFMAERQYTRMEDWLTAKLAYEGLPSKTYLSKTLAQYTSKTCSNCGFTITSADYDRVLEKLKKTATGWMTTINGKELKVEGQITYYNRYKRQNVVKDLSVELDRLSEESVNNDISSWTKGRSGEALSLLKKRFSHRPVQEKFVCLNCGFETHADEQAALNIARSWLFLRSQEYKKYQTNKTTGNTDKRAFVETWQSFYRKKLKEVWKPAV

SEQ ID NO: 35501 - protein, 979 aa, synthetic construct
  REGION 1..979: note = engineered CasX variant
QEIKRINKIRRRLVKDSNTKKAGKTGPMKTLLVRVMTPDLRERLENLRKKPENIPQPISNTSRANLNKLLTDYTEMKKAILHVYWEEFQKDPVGLMSRVAQPASKKIDQNKLKPEMDEKGNLTTAGFACSQCGQPLFVYKLEQVSEKGKAYTNYFGRCNVAEHEKLILLAQLKPEKDSDEAVTYSLGKFGQRALDFYSIHVTKESTHPVKPLAQIAGNRYASHPVGKALSDACMGTIASFLSKYQDIIIEHQKVVKGNQKRLESLRELAGKENLEYPSVTLPPQPHTKEGVDAYNEVIARVRMWVNLNLWQKLKLSRDDAKPLLRLKGFPSFPLVERQANEVDWWDMVCNVKKLINEKKEDGKVFWQNLAGYKRQEALRPYLSSEEDVRKKGKKFARYQLGDLLLHLEKKHGEDWGKVYDEAWERIDKKVEGLSKHIKLEEERRSEDAQSKAALTDWLRAKASFVIEGLKEADKDEFCRCELKLQKWYGDLRGKPFAIEAENSILDISGFSKQYNCAFIWQKDGVKKLNLYLIINYFKGGKLRFKKIKPEAFEANRFYTVINKKSGEIVPMEVNFNFDDPNLIILPLAFGKRQGREFIWNDLLSLETGSLKLANGRVIEKTLYNRRTRQDEPALFVALTFERREVLDSSNIKPMNLIGVDRGENIPAVIALTDPEGCPLSRFKDSLGNPTHILRIGESYKEKQRTIQAKKEVEQRRAGGYSRKYASKAKNLADDMVRNTARDLLYYAVTQDAMLIFENLSRGFGRQGKRTFMAERQYTRMEDWLTAKLAYEGLPSKTYLSKTLAQYTSKTCSNCGFTITSADYDRVLEKLKKTATGWMTTINGKELKVEGQITYYNRYKRQNVVKDLSVELDRLSEESVNNDISSWTKGRSGEALSLLKKRFSHRPVQEKFVCLNCGFETHADEQAALNIARSWLFLRSQEYKKYQTNKTTGNTDKRAFVETWQSFYRKKLKEVWKPAV

SEQ ID NO: 35502 - protein, 979 aa, synthetic construct
  REGION 1..979: note = engineered CasX variant
QEIKRINKIRRRLVKDSNTKKAGKTGPMKTLLVRVMTPDLRERLENLRKKPENIPQPISNTSRANLNKLLTDYTEMKKAILHVYWEEFQKDPVGLMSRVAQPASKKIDQNKLKPEMDEKGNLTTAGFACSQCGQPLFVYKLEQVSEKGKAYTNYFGRCNVAEHEKLILLAQLKPEKDSDEAVTYSLGKFGQRALDFYSIHVTKESTHPVKPLAQIAGNRYASTPVGKALSDACMGTIASFLSKYQDIIIEHQKVVKGNQKRLESLRELAGKENLEYPSVTLPPQPHTKEGVDAYNEVIARVRMWVNLNLWQKLKLSRDDAKPLLRLKGFPSFPLVERQANEVDWWDMVCNVKKLINEKKEDGKVFWQNLAGYKRQEALRPYLSSEEDVRKKGKKFARYQLGDLLLHLEKKHGEDWGKVYDEAWERIDKKVEGLSKHIKLEEERRSEDAQSKAALTDWLRAKASFVIEGLKEADKDEFCRCELKLQKWYGDLRGKPFAIEAENSILDISGFSKQYNCAFIWQKDGVKKLNLYLIINYFKGGKLRFKKIKPEAFEANRFYTVINKKSGEIVPMEVNFNFDDPNLIILPLAFGKRQGREFIWNDLLSLETGSLKLANGRVIEKTLYNRRTRQDEPALFVALTFERREVLDSSNIKPMNLIGVDRGENIPAVIALTDPEGCPLSRFKDSLGNPTHILRIGESYKEKQRTIQAKKEVEQRRAGGYSRKYASKAKNLADDMVRNTARDLLYYAVTQDAMLIFENLSRGFGRQGKRTFMAERQYTRMEDWLTAKLAYEGLPSKTYLSKTLAQYTSKTCSNCGFTITSADYDRVLEKLKKTATGWMTTINGKELKVEGQITYYNRYKRQNVVKDLSVELDRLSEESVNNDISSWTKGRSGEALSLLKKRFSHRPVQEKFVCLNCGFETHADEQAALNIARSWLFLRSQEYKKYQTNKTTGNTDKRAFVETWQSFYRKKLKEVWKPAV

SEQ ID NO: 35503 - protein, 979 aa, synthetic construct
  REGION 1..979: note = engineered CasX variant
QEIKRINKIRRRLVKDSNTKKAGKTGPMKTLLVRVMTPDLRERLENLRKKPENIPQPISNTSRANLNKLLTDYTEMKKAILHVYWEEFQKDPVGLMSRVAQPASKKIDQNKLKPEMDEKGNLTTAGFACSQCGQPLFVYKLEQVSEKGKAYTNYFGRCNVAEHEKLILLAQLKPEKDSDEAVTYSLGKFGQRALDFYSIHVTKESTHPVKPLAQIAGNRYASAPVGKALSDACMGTIASFLSKYQDIIIEHQKVVKGNQKRLESLRELAGKENLEYPSVTLPPQPHTKEGVDAYNEVIARVRMWVNLNLWQKLKLSRDDAKPLLRLKGFPSFPLVERQANEVDWWDMVCNVKKLINEKKEDGKVFWQNLAGYKRQEALRPYLSSEEDVRKKGKKFARYQLGDLLLHLEKKHGEDWGKVYDEAWERIDKKVEGLSKHIKLEEERRSEDAQSKAALTDWLRAKASFVIEGLKEADKDEFCRCELKLQKWYGDLRGKPFAIEAENSILDISGFSKQYNCAFIWQKDGVKKLNLYLIINYFKGGKLRFKKIKPEAFEANRFYTVINKKSGEIVPMEVNFNFDDPNLIILPLAFGKRQGREFIWNDLLSLETGSLKLANGRVIEKTLYNRRTRQDEPALFVALTFERREVLDSSNIKPMNLIGVDRGENIPAVIALTDPEGCPLSRFKDSLGNPTHILRIGESYKEKQRTIQAKKEVEQRRAGGYSRKYASKAKNLADDMVRNTARDLLYYAVTQDAMLIFENLSRGFGRQGKRTFMAERQYTRMEDWLTAKLAYEGLPSKTYLSKTLAQYTSKTCSNCGFTITSADYDRVLEKLKKTATGWMTTINGKELKVEGQITYYNRYKRQNVVKDLSVELDRLSEESVNNDISSWTKGRSGEALSLLKKRFSHRPVQEKFVCLNCGFETHADEQAALNIARSWLFLRSQEYKKYQTNKTTGNTDKRAFVETWQSFYRKKLKEVWKPAV

SEQ ID NO: 35504 - protein, 979 aa, synthetic construct
  REGION 1..979: note = engineered CasX variant
QEIKRINKIRRRLVKDSNTKKAGKTGPMKTLLVRVMTPDLRERLENLRKKPENIPQPISNTSRANLNKLLTDYTEMKKAILHVYWEEFQKDPVGLMSRVAQPASKKIDQNKLKPEMDEKGNLTTAGFACSQCGQPLFVYKLEQVSEKGKAYTNYFGRCNVAEHEKLILLAQLKPEKDSDEAVTYSLGKFGQRALDFYSIHVTKESTHPVKPLAQIAGNRYASVPVGKALSDACMGTIASFLSKYQDIIIEHQKVVKGNQKRLESLRELAGKENLEYPSVTLPPQPHTKEGVDAYNEVIARVRMWVNLNLWQKLKLSRDDAKPLLRLKGFPSFPLVERQANEVDWWDMVCNVKKLINEKKEDGKVFWQNLAGYKRQEALRPYLSSEEDVRKKGKKFARYQLGDLLLHLEKKHGEDWGKVYDEAWERIDKKVEGLSKHIKLEEERRSEDAQSKAALTDWLRAKASFVIEGLKEADKDEFCRCELKLQKWYGDLRGKPFAIEAENSILDISGFSKQYNCAFIWQKDGVKKLNLYLIINYFKGGKLRFKKIKPEAFEANRFYTVINKKSGEIVPMEVNFNFDDPNLIILPLAFGKRQGREFIWNDLLSLETGSLKLANGRVIEKTLYNRRTRQDEPALFVALTFERREVLDSSNIKPMNLIGVDRGENIPAVIALTDPEGCPLSRFKDSLGNPTHILRIGESYKEKQRTIQAKKEVEQRRAGGYSRKYASKAKNLADDMVRNTARDLLYYAVTQDAMLIFENLSRGFGRQGKRTFMAERQYTRMEDWLTAKLAYEGLPSKTYLSKTLAQYTSKTCSNCGFTITSADYDRVLEKLKKTATGWMTTINGKELKVEGQITYYNRYKRQNVVKDLSVELDRLSEESVNNDISSWTKGRSGEALSLLKKRFSHRPVQEKFVCLNCGFETHADEQAALNIARSWLFLRSQEYKKYQTNKTTGNTDKRAFVETWQSFYRKKLKEVWKPAV

SEQ ID NO: 35505 - protein, 978 aa, synthetic construct
  REGION 1..978: note = engineered CasX variant
QEIKRINKIRRRLVKDSNTKKAGKTGPMKTLLVRVMTPDLRERLENLRKKPENIPQPISNTSRANLNKLLTDYTEMKKAILHVYWEEFQKDPVGLMSRVAQPASKKIDQNKLKPEMDEKGNLTTAGFACSQCGQPLFVYKLEQVSEKGKAYTNYFGRCNVAEHEKLILLAQLKPEKDSDEAVTYSLGKFGQRALDFYSIHVTKESTHPVKPLAQIAGNRYASYPVGKALSDACMGTIASFLSKYQDIIIEHQKVVKGNQKRLESLRELAGKENLEYPSVTLPPQPHTKEGVDAYNEVIARVRMWVNLNLWQKLKLSRDDAKPLLRLKGFPSFPLVERQANEVDWWDMVCNVKKLINEKKEDGKVFWQNLAGYKRQEALRPYLSSEEDRKKGKKFARYQLGDLLLHLEKKHGEDWGKVYDEAWERIDKKVEGLSKHIKLEEERRSEDAQSKAALTDWLRAKASFVIEGLKEADKDEFCRCELKLQKWYGDLRGKPFAIEAENSILDISGFSKQYNCAFIWQKDGVKKLNLYLIINYFKGGKLRFKKIKPEAFEANRFYTVINKKSGEIVPMEVNFNFDDPNLIILPLAFGKRQGREFIWNDLLSLETGSLKLANGRVIEKTLYNRRTRQDEPALFVALTFERREVLDSSNIKPMNLIGVDRGENIPAVIALTDPEGCPLSRFKDSLGNPTHILRIGESYKEKQRTIQAKKEVEQRRAGGYSRKYASKAKNLADDMVRNTARDLLYYAVTQDAMLIFENLSRGFGRQGKRTFMAERQYTRMEDWLTAKLAYEGLPSKTYLSKTLAQYTSKTCSNCGFTITSADYDRMLEKLKKTATGWMTTINGKELKVEGQITYYNRYKRQNVVKDLSVELDRLSEESVNNDISSWTKGRSGEALSLLKKRFSHRPVQEKFVCLNCGFETHADEQAALNIARSWLFLRSQEYKKYQTNKTTGNTDKRAFVETWQSFYRKKLKEVWKPAV

SEQ ID NO: 35506 - protein, 978 aa, synthetic construct
  REGION 1..978: note = engineered CasX variant
QEIKRINKIRRRLVKDSNTKKAGKTGPMKTLLVRVMTPDLRERLENLRKKPENIPQPISNTSRANLNKLLTDYTEMKKAILHVYWEEFQKDPVGLMSRVAQPASKKIDQNKLKPEMDEKGNLTTAGFACSQCGQPLFVYKLEQVSEKGKAYTNYFGRCNVAEHEKLILLAQLKPEKDSDEAVTYSLGKFGQRALDFYSIHVTKESTHPVKPLAQIAGNRYASHPVGKALSDACMGTIASFLSKYQDIIIEHQKVVKGNQKRLESLRELAGKENLEYPSVTLPPQPHTKEGVDAYNEVIARVRMWVNLNLWQKLKLSRDDAKPLLRLKGFPSFPLVERQANEVDWWDMVCNVKKLINEKKEDGKVFWQNLAGYKRQEALRPYLSSEEDRKKGKKFARYQLGDLLLHLEKKHGEDWGKVYDEAWERIDKKVEGLSKHIKLEEERRSEDAQSKAALTDWLRAKASFVIEGLKEADKDEFCRCELKLQKWYGDLRGKPFAIEAENSILDISGFSKQYNCAFIWQKDGVKKLNLYLIINYFKGGKLRFKKIKPEAFEANRFYTVINKKSGEIVPMEVNFNFDDPNLIILPLAFGKRQGREFIWNDLLSLETGSLKLANGRVIEKTLYNRRTRQDEPALFVALTFERREVLDSSNIKPMNLIGVDRGENIPAVIALTDPEGCPLSRFKDSLGNPTHILRIGESYKEKQRTIQAKKEVEQRRAGGYSRKYASKAKNLADDMVRNTARDLLYYAVTQDAMLIFENLSRGFGRQGKRTFMAERQYTRMEDWLTAKLAYEGLPSKTYLSKTLAQYTSKTCSNCGFTITSADYDRMLEKLKKTATGWMTTINGKELKVEGQITYYNRYKRQNVVKDLSVELDRLSEESVNNDISSWTKGRSGEALSLLKKRFSHRPVQEKFVCLNCGFETHADEQAALNIARSWLFLRSQEYKKYQTNKTTGNTDKRAFVETWQSFYRKKLKEVWKPAV

SEQ ID NO: 35507 - protein, 978 aa, synthetic construct
  REGION 1..978: note = engineered CasX variant
QEIKRINKIRRRLVKDSNTKKAGKTGPMKTLLVRVMTPDLRERLENLRKKPENIPQPISNTSRANLNKLLTDYTEMKKAILHVYWEEFQKDPVGLMSRVAQPASKKIDQNKLKPEMDEKGNLTTAGFACSQCGQPLFVYKLEQVSEKGKAYTNYFGRCNVAEHEKLILLAQLKPEKDSDEAVTYSLGKFGQRALDFYSIHVTKESTHPVKPLAQIAGNRYASTPVGKALSDACMGTIASFLSKYQDIIIEHQKVVKGNQKRLESLRELAGKENLEYPSVTLPPQPHTKEGVDAYNEVIARVRMWVNLNLWQKLKLSRDDAKPLLRLKGFPSFPLVERQANEVDWWDMVCNVKKLINEKKEDGKVFWQNLAGYKRQEALRPYLSSEEDRKKGKKFARYQLGDLLLHLEKKHGEDWGKVYDEAWERIDKKVEGLSKHIKLEEERRSEDAQSKAALTDWLRAKASFVIEGLKEADKDEFCRCELKLQKWYGDLRGKPFAIEAENSILDISGFSKQYNCAFIWQKDGVKKLNLYLIINYFKGGKLRFKKIKPEAFEANRFYTVINKKSGEIVPMEVNFNFDDPNLIILPLAFGKRQGREFIWNDLLSLETGSLKLANGRVIEKTLYNRRTRQDEPALFVALTFERREVLDSSNIKPMNLIGVDRGENIPAVIALTDPEGCPLSRFKDSLGNPTHILRIGESYKEKQRTIQAKKEVEQRRAGGYSRKYASKAKNLADDMVRNTARDLLYYAVTQDAMLIFENLSRGFGRQGKRTFMAERQYTRMEDWLTAKLAYEGLPSKTYLSKTLAQYTSKTCSNCGFTITSADYDRMLEKLKKTATGWMTTINGKELKVEGQITYYNRYKRQNVVKDLSVELDRLSEESVNNDISSWTKGRSGEALSLLKKRFSHRPVQEKFVCLNCGFETHADEQAALNIARSWLFLRSQEYKKYQTNKTTGNTDKRAFVETWQSFYRKKLKEVWKPAV

SEQ ID NO: 35508 - protein, 978 aa, synthetic construct
  REGION 1..978: note = engineered CasX variant
QEIKRINKIRRRLVKDSNTKKAGKTGPMKTLLVRVMTPDLRERLENLRKKPENIPQPISNTSRANLNKLLTDYTEMKKAILHVYWEEFQKDPVGLMSRVAQPASKKIDQNKLKPEMDEKGNLTTAGFACSQCGQPLFVYKLEQVSEKGKAYTNYFGRCNVAEHEKLILLAQLKPEKDSDEAVTYSLGKFGQRALDFYSIHVTKESTHPVKPLAQIAGNRYASAPVGKALSDACMGTIASFLSKYQDIIIEHQKVVKGNQKRLESLRELAGKENLEYPSVTLPPQPHTKEGVDAYNEVIARVRMWVNLNLWQKLKLSRDDAKPLLRLKGFPSFPLVERQANEVDWWDMVCNVKKLINEKKEDGKVFWQNLAGYKRQEALRPYLSSEEDRKKGKKFARYQLGDLLLHLEKKHGEDWGKVYDEAWERIDKKVEGLSKHIKLEEERRSEDAQSKAALTDWLRAKASFVIEGLKEADKDEFCRCELKLQKWYGDLRGKPFAIEAENSILDISGFSKQYNCAFIWQKDGVKKLNLYLIINYFKGGKLRFKKIKPEAFEANRFYTVINKKSGEIVPMEVNFNFDDPNLIILPLAFGKRQGREFIWNDLLSLETGSLKLANGRVIEKTLYNRRTRQDEPALFVALTFERREVLDSSNIKPMNLIGVDRGENIPAVIALTDPEGCPLSRFKDSLGNPTHILRIGESYKEKQRTIQAKKEVEQRRAGGYSRKYASKAKNLADDMVRNTARDLLYYAVTQDAMLIFENLSRGFGRQGKRTFMAERQYTRMEDWLTAKLAYEGLPSKTYLSKTLAQYTSKTCSNCGFTITSADYDRMLEKLKKTATGWMTTINGKELKVEGQITYYNRYKRQNVVKDLSVELDRLSEESVNNDISSWTKGRSGEALSLLKKRFSHRPVQEKFVCLNCGFETHADEQAALNIARSWLFLRSQEYKKYQTNKTTGNTDKRAFVETWQSFYRKKLKEVWKPAV

SEQ ID NO: 35509 - protein, 978 aa, synthetic construct
  REGION 1..978: note = engineered CasX variant
QEIKRINKIRRRLVKDSNTKKAGKTGPMKTLLVRVMTPDLRERLENLRKKPENIPQPISNTSRANLNKLLTDYTEMKKAILHVYWEEFQKDPVGLMSRVAQPASKKIDQNKLKPEMDEKGNLTTAGFACSQCGQPLFVYKLEQVSEKGKAYTNYFGRCNVAEHEKLILLAQLKPEKDSDEAVTYSLGKFGQRALDFYSIHVTKESTHPVKPLAQIAGNRYASVPVGKALSDACMGTIASFLSKYQDIIIEHQKVVKGNQKRLESLRELAGKENLEYPSVTLPPQPHTKEGVDAYNEVIARVRMWVNLNLWQKLKLSRDDAKPLLRLKGFPSFPLVERQANEVDWWDMVCNVKKLINEKKEDGKVFWQNLAGYKRQEALRPYLSSEEDRKKGKKFARYQLGDLLLHLEKKHGEDWGKVYDEAWERIDKKVEGLSKHIKLEEERRSEDAQSKAALTDWLRAKASFVIEGLKEADKDEFCRCELKLQKWYGDLRGKPFAIEAENSILDISGFSKQYNCAFIWQKDGVKKLNLYLIINYFKGGKLRFKKIKPEAFEANRFYTVINKKSGEIVPMEVNFNFDDPNLIILPLAFGKRQGREFIWNDLLSLETGSLKLANGRVIEKTLYNRRTRQDEPALFVALTFERREVLDSSNIKPMNLIGVDRGENIPAVIALTDPEGCPLSRFKDSLGNPTHILRIGESYKEKQRTIQAKKEVEQRRAGGYSRKYASKAKNLADDMVRNTARDLLYYAVTQDAMLIFENLSRGFGRQGKRTFMAERQYTRMEDWLTAKLAYEGLPSKTYLSKTLAQYTSKTCSNCGFTITSADYDRMLEKLKKTATGWMTTINGKELKVEGQITYYNRYKRQNVVKDLSVELDRLSEESVNNDISSWTKGRSGEALSLLKKRFSHRPVQEKFVCLNCGFETHADEQAALNIARSWLFLRSQEYKKYQTNKTTGNTDKRAFVETWQSFYRKKLKEVWKPAV

SEQ ID NO: 35510 - protein, 978 aa, synthetic construct
  REGION 1..978: note = engineered CasX variant
QEIKRINKIRRRLVKDSNTKKAGKTGPMKTLLVRVMTPDLRERLENLRKKPENIPQPISNTSRANLNKLLTDYTEMKKAILHVYWEEFQKDPVGLMSRVAQPASKKIDQNKLKPEMDEKGNLTTAGFACSQCGQPLFVYKLEQVSEKGKAYTNYFGRCNVAEHEKLILLAQLKPEKDSDEAVTYSLGKFGQRALDFYSIHVTKESTHPVKPLAQIAGNRYASYPVGKALSDACMGTIASFLSKYQDIIIEHQKVVKGNQKRLESLRELAGKENLEYPSVTLPPQPHTKEGVDAYNEVIARVRMWVNLNLWQKLKLSRDDAKPLLRLKGFPSFPLVERQANEVDWWDMVCNVKKLINEKKEDGKVFWQNLAGYKRQEALRPYLSSEEDRKKGKKFARYQLGDLLLHLEKKHGEDWGKVYDEAWERIDKKVEGLSKHIKLEEERRSEDAQSKAALTDWLRAKASFVIEGLKEADKDEFCRCELKLQKWYGDLRGKPFAIEAENSILDISGFSKQYNCAFIWQKDGVKKLNLYLIINYFKGGKLRFKKIKPEAFEANRFYTVINKKSGEIVPMEVNFNFDDPNLIILPLAFGKRQGREFIWNDLLSLETGSLKLANGRVIEKTLYNRRTRQDEPALFVALTFERREVLDSSNIKPMNLIGVDRGENIPAVIALTDPEGCPLSRFKDSLGNPTHILRIGESYKEKQRTIQAKKEVEQRRAGGYSRKYASKAKNLADDMVRNTARDLLYYAVTQDAMLIFENLSRGFGRQGKRTFMAERQYTRMEDWLTAKLAYEGLPSKTYLSKTLAQYTSKTCSNCGFTITSADYDRVLEKLKKTATGWMTTINGKELKVEGQITYYNRYKRQNVVKDLSVELDRLSEESVNNDISSWTKGRQGEALSLLKKRFSHRPVQEKFVCLNCGFETHADEQAALNIARSWLFLRSQEYKKYQTNKTTGNTDKRAFVETWQSFYRKKLKEVWKPAV

SEQ ID NO: 35511 - protein, 978 aa, synthetic construct
  REGION 1..978: note = engineered CasX variant
QEIKRINKIRRRLVKDSNTKKAGKTGPMKTLLVRVMTPDLRERLENLRKKPENIPQPISNTSRANLNKLLTDYTEMKKAILHVYWEEFQKDPVGLMSRVAQPASKKIDQNKLKPEMDEKGNLTTAGFACSQCGQPLFVYKLEQVSEKGKAYTNYFGRCNVAEHEKLILLAQLKPEKDSDEAVTYSLGKFGQRALDFYSIHVTKESTHPVKPLAQIAGNRYASHPVGKALSDACMGTIASFLSKYQDIIIEHQKVVKGNQKRLESLRELAGKENLEYPSVTLPPQPHTKEGVDAYNEVIARVRMWVNLNLWQKLKLSRDDAKPLLRLKGFPSFPLVERQANEVDWWDMVCNVKKLINEKKEDGKVFWQNLAGYKRQEALRPYLSSEEDRKKGKKFARYQLGDLLLHLEKKHGEDWGKVYDEAWERIDKKVEGLSKHIKLEEERRSEDAQSKAALTDWLRAKASFVIEGLKEADKDEFCRCELKLQKWYGDLRGKPFAIEAENSILDISGFSKQYNCAFIWQKDGVKKLNLYLIINYFKGGKLRFKKIKPEAFEANRFYTVINKKSGEIVPMEVNFNFDDPNLIILPLAFGKRQGREFIWNDLLSLETGSLKLANGRVIEKTLYNRRTRQDEPALFVALTFERREVLDSSNIKPMNLIGVDRGENIPAVIALTDPEGCPLSRFKDSLGNPTHILRIGESYKEKQRTIQAKKEVEQRRAGGYSRKYASKAKNLADDMVRNTARDLLYYAVTQDAMLIFENLSRGFGRQGKRTFMAERQYTRMEDWLTAKLAYEGLPSKTYLSKTLAQYTSKTCSNCGFTITSADYDRVLEKLKKTATGWMTTINGKELKVEGQITYYNRYKRQNVVKDLSVELDRLSEESVNNDISSWTKGRQGEALSLLKKRFSHRPVQEKFVCLNCGFETHADEQAALNIARSWLFLRSQEYKKYQTNKTTGNTDKRAFVETWQSFYRKKLKEVWKPAV

SEQ ID NO: 35512 - protein, 978 aa, synthetic construct
  REGION 1..978: note = engineered CasX variant
QEIKRINKIRRRLVKDSNTKKAGKTGPMKTLLVRVMTPDLRERLENLRKKPENIPQPISNTSRANLNKLLTDYTEMKKAILHVYWEEFQKDPVGLMSRVAQPASKKIDQNKLKPEMDEKGNLTTAGFACSQCGQPLFVYKLEQVSEKGKAYTNYFGRCNVAEHEKLILLAQLKPEKDSDEAVTYSLGKFGQRALDFYSIHVTKESTHPVKPLAQIAGNRYASTPVGKALSDACMGTIASFLSKYQDIIIEHQKVVKGNQKRLESLRELAGKENLEYPSVTLPPQPHTKEGVDAYNEVIARVRMWVNLNLWQKLKLSRDDAKPLLRLKGFPSFPLVERQANEVDWWDMVCNVKKLINEKKEDGKVFWQNLAGYKRQEALRPYLSSEEDRKKGKKFARYQLGDLLLHLEKKHGEDWGKVYDEAWERIDKKVEGLSKHIKLEEERRSEDAQSKAALTDWLRAKASFVIEGLKEADKDEFCRCELKLQKWYGDLRGKPFAIEAENSILDISGFSKQYNCAFIWQKDGVKKLNLYLIINYFKGGKLRFKKIKPEAFEANRFYTVINKKSGEIVPMEVNFNFDDPNLIILPLAFGKRQGREFIWNDLLSLETGSLKLANGRVIEKTLYNRRTRQDEPALFVALTFERREVLDSSNIKPMNLIGVDRGENIPAVIALTDPEGCPLSRFKDSLGNPTHILRIGESYKEKQRTIQAKKEVEQRRAGGYSRKYASKAKNLADDMVRNTARDLLYYAVTQDAMLIFENLSRGFGRQGKRTFMAERQYTRMEDWLTAKLAYEGLPSKTYLSKTLAQYTSKTCSNCGFTITSADYDRVLEKLKKTATGWMTTINGKELKVEGQITYYNRYKRQNVVKDLSVELDRLSEESVNNDISSWTKGRQGEALSLLKKRFSHRPVQEKFVCLNCGFETHADEQAALNIARSWLFLRSQEYKKYQTNKTTGNTDKRAFVETWQSFYRKKLKEVWKPAV

SEQ ID NO: 35513 - protein, 978 aa, synthetic construct
  REGION 1..978: note = engineered CasX variant
QEIKRINKIRRRLVKDSNTKKAGKTGPMKTLLVRVMTPDLRERLENLRKKPENIPQPISNTSRANLNKLLTDYTEMKKAILHVYWEEFQKDPVGLMSRVAQPASKKIDQNKLKPEMDEKGNLTTAGFACSQCGQPLFVYKLEQVSEKGKAYTNYFGRCNVAEHEKLILLAQLKPEKDSDEAVTYSLGKFGQRALDFYSIHVTKESTHPVKPLAQIAGNRYASAPVGKALSDACMGTIASFLSKYQDIIIEHQKVVKGNQKRLESLRELAGKENLEYPSVTLPPQPHTKEGVDAYNEVIARVRMWVNLNLWQKLKLSRDDAKPLLRLKGFPSFPLVERQANEVDWWDMVCNVKKLINEKKEDGKVFWQNLAGYKRQEALRPYLSSEEDRKKGKKFARYQLGDLLLHLEKKHGEDWGKVYDEAWERIDKKVEGLSKHIKLEEERRSEDAQSKAALTDWLRAKASFVIEGLKEADKDEFCRCELKLQKWYGDLRGKPFAIEAENSILDISGFSKQYNCAFIWQKDGVKKLNLYLIINYFKGGKLRFKKIKPEAFEANRFYTVINKKSGEIVPMEVNFNFDDPNLIILPLAFGKRQGREFIWNDLLSLETGSLKLANGRVIEKTLYNRRTRQDEPALFVALTFERREVLDSSNIKPMNLIGVDRGENIPAVIALTDPEGCPLSRFKDSLGNPTHILRIGESYKEKQRTIQAKKEVEQRRAGGYSRKYASKAKNLADDMVRNTARDLLYYAVTQDAMLIFENLSRGFGRQGKRTFMAERQYTRMEDWLTAKLAYEGLPSKTYLSKTLAQYTSKTCSNCGFTITSADYDRVLEKLKKTATGWMTTINGKELKVEGQITYYNRYKRQNVVKDLSVELDRLSEESVNNDISSWTKGRQGEALSLLKKRFSHRPVQEKFVCLNCGFETHADEQAALNIARSWLFLRSQEYKKYQTNKTTGNTDKRAFVETWQSFYRKKLKEVWKPAV

SEQ ID NO: 35514 - protein, 978 aa, synthetic construct
  REGION 1..978: note = engineered CasX variant
QEIKRINKIRRRLVKDSNTKKAGKTGPMKTLLVRVMTPDLRERLENLRKKPENIPQPISNTSRANLNKLLTDYTEMKKAILHVYWEEFQKDPVGLMSRVAQPASKKIDQNKLKPEMDEKGNLTTAGFACSQCGQPLFVYKLEQVSEKGKAYTNYFGRCNVAEHEKLILLAQLKPEKDSDEAVTYSLGKFGQRALDFYSIHVTKESTHPVKPLAQIAGNRYASVPVGKALSDACMGTIASFLSKYQDIIIEHQKVVKGNQKRLESLRELAGKENLEYPSVTLPPQPHTKEGVDAYNEVIARVRMWVNLNLWQKLKLSRDDAKPLLRLKGFPSFPLVERQANEVDWWDMVCNVKKLINEKKEDGKVFWQNLAGYKRQEALRPYLSSEEDRKKGKKFARYQLGDLLLHLEKKHGEDWGKVYDEAWERIDKKVEGLSKHIKLEEERRSEDAQSKAALTDWLRAKASFVIEGLKEADKDEFCRCELKLQKWYGDLRGKPFAIEAENSILDISGFSKQYNCAFIWQKDGVKKLNLYLIINYFKGGKLRFKKIKPEAFEANRFYTVINKKSGEIVPMEVNFNFDDPNLIILPLAFGKRQGREFIWNDLLSLETGSLKLANGRVIEKTLYNRRTRQDEPALFVALTFERREVLDSSNIKPMNLIGVDRGENIPAVIALTDPEGCPLSRFKDSLGNPTHILRIGESYKEKQRTIQAKKEVEQRRAGGYSRKYASKAKNLADDMVRNTARDLLYYAVTQDAMLIFENLSRGFGRQGKRTFMAERQYTRMEDWLTAKLAYEGLPSKTYLSKTLAQYTSKTCSNCGFTITSADYDRVLEKLKKTATGWMTTINGKELKVEGQITYYNRYKRQNVVKDLSVELDRLSEESVNNDISSWTKGRQGEALSLLKKRFSHRPVQEKFVCLNCGFETHADEQAALNIARSWLFLRSQEYKKYQTNKTTGNTDKRAFVETWQSFYRKKLKEVWKPAV

SEQ ID NO: 35515 - protein, 978 aa, synthetic construct
  REGION 1..978: note = engineered CasX variant
QEIKRINKIRRRLVKDSNTKKAGKTGPMKTLLVRVMTPDLRERLENLRKKPENIPQPISNTSRANLNKLLTDYTEMKKAILHVYWEEFQKDPVGLMSRVAQPASKKIDQNKLKPEMDEKGNLTTAGFACSQCGQPLFVYKLEQVSEKGKAYTNYFGRCNVAEHEKLILLAQLKPEKDSDEAVTYSLGKFGQRALDFYSIHVTKESTHPVKPLAQIAGNRYASYPVGKALSDACMGTIASFLSKYQDIIIEHQKVVKGNQKRLESLRELAGKENLEYPSVTLPPQPHTKEGVDAYNEVIARVRMWVNLNLWQKLKLSRDDAKPLLRLKGFPSFPLVERQANEVDWWDMVCNVKKLINEKKEDGKVFWQNLAGYKRQEALRPYLSSEEDRKKGKKFARYQLGDLLLHLEKKHGEDWGKVYDEAWERIDKKVEGLSKHIKLEEERRSEDAQSKAALTDWLRAKASFVIEGLKEADKDEFCRCELKLQKWYGDLRGKPFAIEAENSILDISGFSKQYNCAFIWQKDGVKKLNLYLIINYFKGGKLRFKKIKPEAFEANRFYTVINKKSGEIVPMEVNFNFDDPNLIILPLAFGKRQGREFIWNDLLSLETGSLKLANGRVIEKTLYNRRTRQDEPALFVALTFERREVLDSSNIKPMNLIGVDRGENIPAVIALTDPEGCPLSRFKDSLGNPTHILRIGESYKEKQRTIQAKKEVEQRRAGGYSRKYASKAKNLADDMVRNTARDLLYYAVTQDAMLIFENLSRGFGRQGKRTFMAERQYTRMEDWLTAKLAYEGLPSKTYLSKTLAQYTSKTCSNCGFTITSADYDRVLEKLKKTATGWMTTINGKELKVEGQITYYNRYKRQNVVKDLSVELDRLSEESVNNDISSWTKGRSGEALSLLKKRFSHRPVQEKFVCLNCEFETHADEQAALNIARSWLFLRSQEYKKYQTNKTTGNTDKRAFVETWQSFYRKKLKEVWKPAV

SEQ ID NO: 35516 - protein, 978 aa, synthetic construct
  REGION 1..978: note = engineered CasX variant
QEIKRINKIRRRLVKDSNTKKAGKTGPMKTLLVRVMTPDLRERLENLRKKPENIPQPISNTSRANLNKLLTDYTEMKKAILHVYWEEFQKDPVGLMSRVAQPASKKIDQNKLKPEMDEKGNLTTAGFACSQCGQPLFVYKLEQVSEKGKAYTNYFGRCNVAEHEKLILLAQLKPEKDSDEAVTYSLGKFGQRALDFYSIHVTKESTHPVKPLAQIAGNRYASHPVGKALSDACMGTIASFLSKYQDIIIEHQKVVKGNQKRLESLRELAGKENLEYPSVTLPPQPHTKEGVDAYNEVIARVRMWVNLNLWQKLKLSRDDAKPLLRLKGFPSFPLVERQANEVDWWDMVCNVKKLINEKKEDGKVFWQNLAGYKRQEALRPYLSSEEDRKKGKKFARYQLGDLLLHLEKKHGEDWGKVYDEAWERIDKKVEGLSKHIKLEEERRSEDAQSKAALTDWLRAKASFVIEGLKEADKDEFCRCELKLQKWYGDLRGKPFAIEAENSILDISGFSKQYNCAFIWQKDGVKKLNLYLIINYFKGGKLRFKKIKPEAFEANRFYTVINKKSGEIVPMEVNFNFDDPNLIILPLAFGKRQGREFIWNDLLSLETGSLKLANGRVIEKTLYNRRTRQDEPALFVALTFERREVLDSSNIKPMNLIGVDRGENIPAVIALTDPEGCPLSRFKDSLGNPTHILRIGESYKEKQRTIQAKKEVEQRRAGGYSRKYASKAKNLADDMVRNTARDLLYYAVTQDAMLIFENLSRGFGRQGKRTFMAERQYTRMEDWLTAKLAYEGLPSKTYLSKTLAQYTSKTCSNCGFTITSADYDRVLEKLKKTATGWMTTINGKELKVEGQITYYNRYKRQNVVKDLSVELDRLSEESVNNDISSWTKGRSGEALSLLKKRFSHRPVQEKFVCLNCEFETHADEQAALNIARSWLFLRSQEYKKYQTNKTTGNTDKRAFVETWQSFYRKKLKEVWKPAV

SEQ ID NO: 35517 - protein, 978 aa, synthetic construct
  REGION 1..978: note = engineered CasX variant
QEIKRINKIRRRLVKDSNTKKAGKTGPMKTLLVRVMTPDLRERLENLRKKPENIPQPISNTSRANLNKLLTDYTEMKKAILHVYWEEFQKDPVGLMSRVAQPASKKIDQNKLKPEMDEKGNLTTAGFACSQCGQPLFVYKLEQVSEKGKAYTNYFGRCNVAEHEKLILLAQLKPEKDSDEAVTYSLGKFGQRALDFYSIHVTKESTHPVKPLAQIAGNRYASTPVGKALSDACMGTIASFLSKYQDIIIEHQKVVKGNQKRLESLRELAGKENLEYPSVTLPPQPHTKEGVDAYNEVIARVRMWVNLNLWQKLKLSRDDAKPLLRLKGFPSFPLVERQANEVDWWDMVCNVKKLINEKKEDGKVFWQNLAGYKRQEALRPYLSSEEDRKKGKKFARYQLGDLLLHLEKKHGEDWGKVYDEAWERIDKKVEGLSKHIKLEEERRSEDAQSKAALTDWLRAKASFVIEGLKEADKDEFCRCELKLQKWYGDLRGKPFAIEAENSILDISGFSKQYNCAFIWQKDGVKKLNLYLIINYFKGGKLRFKKIKPEAFEANRFYTVINKKSGEIVPMEVNFNFDDPNLIILPLAFGKRQGREFIWNDLLSLETGSLKLANGRVIEKTLYNRRTRQDEPALFVALTFERREVLDSSNIKPMNLIGVDRGENIPAVIALTDPEGCPLSRFKDSLGNPTHILRIGESYKEKQRTIQAKKEVEQRRAGGYSRKYASKAKNLADDMVRNTARDLLYYAVTQDAMLIFENLSRGFGRQGKRTFMAERQYTRMEDWLTAKLAYEGLPSKTYLSKTLAQYTSKTCSNCGFTITSADYDRVLEKLKKTATGWMTTINGKELKVEGQITYYNRYKRQNVVKDLSVELDRLSEESVNNDISSWTKGRSGEALSLLKKRFSHRPVQEKFVCLNCEFETHADEQAALNIARSWLFLRSQEYKKYQTNKTTGNTDKRAFVETWQSFYRKKLKEVWKPAV

SEQ ID NO: 35518 - protein, 978 aa, synthetic construct
  REGION 1..978: note = engineered CasX variant
QEIKRINKIRRRLVKDSNTKKAGKTGPMKTLLVRVMTPDLRERLENLRKKPENIPQPISNTSRANLNKLLTDYTEMKKAILHVYWEEFQKDPVGLMSRVAQPASKKIDQNKLKPEMDEKGNLTTAGFACSQCGQPLFVYKLEQVSEKGKAYTNYFGRCNVAEHEKLILLAQLKPEKDSDEAVTYSLGKFGQRALDFYSIHVTKESTHPVKPLAQIAGNRYASAPVGKALSDACMGTIASFLSKYQDIIIEHQKVVKGNQKRLESLRELAGKENLEYPSVTLPPQPHTKEGVDAYNEVIARVRMWVNLNLWQKLKLSRDDAKPLLRLKGFPSFPLVERQANEVDWWDMVCNVKKLINEKKEDGKVFWQNLAGYKRQEALRPYLSSEEDRKKGKKFARYQLGDLLLHLEKKHGEDWGKVYDEAWERIDKKVEGLSKHIKLEEERRSEDAQSKAALTDWLRAKASFVIEGLKEADKDEFCRCELKLQKWYGDLRGKPFAIEAENSILDISGFSKQYNCAFIWQKDGVKKLNLYLIINYFKGGKLRFKKIKPEAFEANRFYTVINKKSGEIVPMEVNFNFDDPNLIILPLAFGKRQGREFIWNDLLSLETGSLKLANGRVIEKTLYNRRTRQDEPALFVALTFERREVLDSSNIKPMNLIGVDRGENIPAVIALTDPEGCPLSRFKDSLGNPTHILRIGESYKEKQRTIQAKKEVEQRRAGGYSRKYASKAKNLADDMVRNTARDLLYYAVTQDAMLIFENLSRGFGRQGKRTFMAERQYTRMEDWLTAKLAYEGLPSKTYLSKTLAQYTSKTCSNCGFTITSADYDRVLEKLKKTATGWMTTINGKELKVEGQITYYNRYKRQNVVKDLSVELDRLSEESVNNDISSWTKGRSGEALSLLKKRFSHRPVQEKFVCLNCEFETHADEQAALNIARSWLFLRSQEYKKYQTNKTTGNTDKRAFVETWQSFYRKKLKEVWKPAV

SEQ ID NO: 35519 - protein, 978 aa, synthetic construct
  REGION 1..978: note = engineered CasX variant
QEIKRINKIRRRLVKDSNTKKAGKTGPMKTLLVRVMTPDLRERLENLRKKPENIPQPISNTSRANLNKLLTDYTEMKKAILHVYWEEFQKDPVGLMSRVAQPASKKIDQNKLKPEMDEKGNLTTAGFACSQCGQPLFVYKLEQVSEKGKAYTNYFGRCNVAEHEKLILLAQLKPEKDSDEAVTYSLGKFGQRALDFYSIHVTKESTHPVKPLAQIAGNRYASVPVGKALSDACMGTIASFLSKYQDIIIEHQKVVKGNQKRLESLRELAGKENLEYPSVTLPPQPHTKEGVDAYNEVIARVRMWVNLNLWQKLKLSRDDAKPLLRLKGFPSFPLVERQANEVDWWDMVCNVKKLINEKKEDGKVFWQNLAGYKRQEALRPYLSSEEDRKKGKKFARYQLGDLLLHLEKKHGEDWGKVYDEAWERIDKKVEGLSKHIKLEEERRSEDAQSKAALTDWLRAKASFVIEGLKEADKDEFCRCELKLQKWYGDLRGKPFAIEAENSILDISGFSKQYNCAFIWQKDGVKKLNLYLIINYFKGGKLRFKKIKPEAFEANRFYTVINKKSGEIVPMEVNFNFDDPNLIILPLAFGKRQGREFIWNDLLSLETGSLKLANGRVIEKTLYNRRTRQDEPALFVALTFERREVLDSSNIKPMNLIGVDRGENIPAVIALTDPEGCPLSRFKDSLGNPTHILRIGESYKEKQRTIQAKKEVEQRRAGGYSRKYASKAKNLADDMVRNTARDLLYYAVTQDAMLIFENLSRGFGRQGKRTFMAERQYTRMEDWLTAKLAYEGLPSKTYLSKTLAQYTSKTCSNCGFTITSADYDRVLEKLKKTATGWMTTINGKELKVEGQITYYNRYKRQNVVKDLSVELDRLSEESVNNDISSWTKGRSGEALSLLKKRFSHRPVQEKFVCLNCEFETHADEQAALNIARSWLFLRSQEYKKYQTNKTTGNTDKRAFVETWQSFYRKKLKEVWKPAV

SEQ ID NO: 35520 - protein, 979 aa, synthetic construct
  REGION 1..979: note = engineered CasX variant
QEIKRINKIRRRLVKDSNTKKAGKTGPMKTLLVRVMTPDLRERLENLRKKPENIPQPISNTSRANLNKLLTDYTEMKKAILHVYWEEFQKDPVGLMSRVAQPASKKIDQNKLKPEMDEKGNLTTAGFACSQCGQPLFVYKLEQVSEKGKAYTNYFGRCNVAEHEKLILLAQLKPEKDSDEAVTYSLGKFGQRALDFYSIHVTKESTHPVKPLAQIAGNRYASYPVGKALSDACMGTIASFLSKYQDIIIEHQKVVKGNQKRLESLRELAGKENLEYPSVTLPPQPHTKEGVDAYNEVIARVRMWVNLNLWQKLKLSRDDAKPLLRLKGFPSFPLVERQANEVDWWDMVCNVKKLINEKKEDGKVFWQNLAGYKRQEALRPYLSSEEDRKKGKKFARYQLGDLLLHLEKKHGEDWGKVYDEAWERIDKKVEGLSKHIKLEEERRSEDAQSKAALTDWLRAKASFVIEGLKEADKDEFCRCELKLQKWYGDLRGKPFAIEAENSILDISGFSKQYNCAFIWQKDGVKKLNLYLIINYFKGGKLRFKKIKPEAFEANRFYTVINKKSGEIVPMEVNFNFDDPNLIILPLAFGKRQGREFIWNDLLSLETGSLKLANGRVIEKTLYNRRTRQDEPALFVALTFERREVLDSSNIKPMNLIGVDRGENIPAVIALTDPEGCPLSRFKDSLGNPTHILRIGESYKEKQRTIQAKKEVEQRRAGGYSRKYASKAKNLADDMVRNTARDLLYYAVTQDAMLIFENLSRGFGRQGKRTFMAERQYTRMEDWLTAKLAYEGLPSKTYLSKTLAQYTSKTCSNCGFTITSADYDRVLEKLKKTATGWMTTINGKELKVEGQITYYNRYKRQNVVKDLSVELDRLSEESVNNDISSWTKGRSGEALSLLKKRFSHRPVQEKFVCLNCGFETHADEQAALNIARSWLFLRSQEYKKYQTNKTSTGNTDKRAFVETWQSFYRKKLKEVWKPAV

SEQ ID NO: 35521 - protein, 979 aa, synthetic construct
  REGION 1..979: note = engineered CasX variant
QEIKRINKIRRRLVKDSNTKKAGKTGPMKTLLVRVMTPDLRERLENLRKKPENIPQPISNTSRANLNKLLTDYTEMKKAILHVYWEEFQKDPVGLMSRVAQPASKKIDQNKLKPEMDEKGNLTTAGFACSQCGQPLFVYKLEQVSEKGKAYTNYFGRCNVAEHEKLILLAQLKPEKDSDEAVTYSLGKFGQRALDFYSIHVTKESTHPVKPLAQIAGNRYASHPVGKALSDACMGTIASFLSKYQDIIIEHQKVVKGNQKRLESLRELAGKENLEYPSVTLPPQPHTKEGVDAYNEVIARVRMWVNLNLWQKLKLSRDDAKPLLRLKGFPSFPLVERQANEVDWWDMVCNVKKLINEKKEDGKVFWQNLAGYKRQEALRPYLSSEEDRKKGKKFARYQLGDLLLHLEKKHGEDWGKVYDEAWERIDKKVEGLSKHIKLEEERRSEDAQSKAALTDWLRAKASFVIEGLKEADKDEFCRCELKLQKWYGDLRGKPFAIEAENSILDISGFSKQYNCAFIWQKDGVKKLNLYLIINYFKGGKLRFKKIKPEAFEANRFYTVINKKSGEIVPMEVNFNFDDPNLIILPLAFGKRQGREFIWNDLLSLETGSLKLANGRVIEKTLYNRRTRQDEPALFVALTFERREVLDSSNIKPMNLIGVDRGENIPAVIALTDPEGCPLSRFKDSLGNPTHILRIGESYKEKQRTIQAKKEVEQRRAGGYSRKYASKAKNLADDMVRNTARDLLYYAVTQDAMLIFENLSRGFGRQGKRTFMAERQYTRMEDWLTAKLAYEGLPSKTYLSKTLAQYTSKTCSNCGFTITSADYDRVLEKLKKTATGWMTTINGKELKVEGQITYYNRYKRQNVVKDLSVELDRLSEESVNNDISSWTKGRSGEALSLLKKRFSHRPVQEKFVCLNCGFETHADEQAALNIARSWLFLRSQEYKKYQTNKTSTGNTDKRAFVETWQSFYRKKLKEVWKPAV

SEQ ID NO: 35522 - protein, 979 aa, synthetic construct
  REGION 1..979: note = engineered CasX variant
QEIKRINKIRRRLVKDSNTKKAGKTGPMKTLLVRVMTPDLRERLENLRKKPENIPQPISNTSRANLNKLLTDYTEMKKAILHVYWEEFQKDPVGLMSRVAQPASKKIDQNKLKPEMDEKGNLTTAGFACSQCGQPLFVYKLEQVSEKGKAYTNYFGRCNVAEHEKLILLAQLKPEKDSDEAVTYSLGKFGQRALDFYSIHVTKESTHPVKPLAQIAGNRYASTPVGKALSDACMGTIASFLSKYQDIIIEHQKVVKGNQKRLESLRELAGKENLEYPSVTLPPQPHTKEGVDAYNEVIARVRMWVNLNLWQKLKLSRDDAKPLLRLKGFPSFPLVERQANEVDWWDMVCNVKKLINEKKEDGKVFWQNLAGYKRQEALRPYLSSEEDRKKGKKFARYQLGDLLLHLEKKHGEDWGKVYDEAWERIDKKVEGLSKHIKLEEERRSEDAQSKAALTDWLRAKASFVIEGLKEADKDEFCRCELKLQKWYGDLRGKPFAIEAENSILDISGFSKQYNCAFIWQKDGVKKLNLYLIINYFKGGKLRFKKIKPEAFEANRFYTVINKKSGEIVPMEVNFNFDDPNLIILPLAFGKRQGREFIWNDLLSLETGSLKLANGRVIEKTLYNRRTRQDEPALFVALTFERREVLDSSNIKPMNLIGVDRGENIPAVIALTDPEGCPLSRFKDSLGNPTHILRIGESYKEKQRTIQAKKEVEQRRAGGYSRKYASKAKNLADDMVRNTARDLLYYAVTQDAMLIFENLSRGFGRQGKRTFMAERQYTRMEDWLTAKLAYEGLPSKTYLSKTLAQYTSKTCSNCGFTITSADYDRVLEKLKKTATGWMTTINGKELKVEGQITYYNRYKRQNVVKDLSVELDRLSEESVNNDISSWTKGRSGEALSLLKKRFSHRPVQEKFVCLNCGFETHADEQAALNIARSWLFLRSQEYKKYQTNKTSTGNTDKRAFVETWQSFYRKKLKEVWKPAV

SEQ ID NO: 35523 - protein, 979 aa, synthetic construct
  REGION 1..979: note = engineered CasX variant
QEIKRINKIRRRLVKDSNTKKAGKTGPMKTLLVRVMTPDLRERLENLRKKPENIPQPISNTSRANLNKLLTDYTEMKKAILHVYWEEFQKDPVGLMSRVAQPASKKIDQNKLKPEMDEKGNLTTAGFACSQCGQPLFVYKLEQVSEKGKAYTNYFGRCNVAEHEKLILLAQLKPEKDSDEAVTYSLGKFGQRALDFYSIHVTKESTHPVKPLAQIAGNRYASAPVGKALSDACMGTIASFLSKYQDIIIEHQKVVKGNQKRLESLRELAGKENLEYPSVTLPPQPHTKEGVDAYNEVIARVRMWVNLNLWQKLKLSRDDAKPLLRLKGFPSFPLVERQANEVDWWDMVCNVKKLINEKKEDGKVFWQNLAGYKRQEALRPYLSSEEDRKKGKKFARYQLGDLLLHLEKKHGEDWGKVYDEAWERIDKKVEGLSKHIKLEEERRSEDAQSKAALTDWLRAKASFVIEGLKEADKDEFCRCELKLQKWYGDLRGKPFAIEAENSILDISGFSKQYNCAFIWQKDGVKKLNLYLIINYFKGGKLRFKKIKPEAFEANRFYTVINKKSGEIVPMEVNFNFDDPNLIILPLAFGKRQGREFIWNDLLSLETGSLKLANGRVIEKTLYNRRTRQDEPALFVALTFERREVLDSSNIKPMNLIGVDRGENIPAVIALTDPEGCPLSRFKDSLGNPTHILRIGESYKEKQRTIQAKKEVEQRRAGGYSRKYASKAKNLADDMVRNTARDLLYYAVTQDAMLIFENLSRGFGRQGKRTFMAERQYTRMEDWLTAKLAYEGLPSKTYLSKTLAQYTSKTCSNCGFTITSADYDRVLEKLKKTATGWMTTINGKELKVEGQITYYNRYKRQNVVKDLSVELDRLSEESVNNDISSWTKGRSGEALSLLKKRFSHRPVQEKFVCLNCGFETHADEQAALNIARSWLFLRSQEYKKYQTNKTSTGNTDKRAFVETWQSFYRKKLKEVWKPAV

SEQ ID NO: 35524 - protein, 979 aa, synthetic construct
  REGION 1..979: note = engineered CasX variant
QEIKRINKIRRRLVKDSNTKKAGKTGPMKTLLVRVMTPDLRERLENLRKKPENIPQPISNTSRANLNKLLTDYTEMKKAILHVYWEEFQKDPVGLMSRVAQPASKKIDQNKLKPEMDEKGNLTTAGFACSQCGQPLFVYKLEQVSEKGKAYTNYFGRCNVAEHEKLILLAQLKPEKDSDEAVTYSLGKFGQRALDFYSIHVTKESTHPVKPLAQIAGNRYASVPVGKALSDACMGTIASFLSKYQDIIIEHQKVVKGNQKRLESLRELAGKENLEYPSVTLPPQPHTKEGVDAYNEVIARVRMWVNLNLWQKLKLSRDDAKPLLRLKGFPSFPLVERQANEVDWWDMVCNVKKLINEKKEDGKVFWQNLAGYKRQEALRPYLSSEEDRKKGKKFARYQLGDLLLHLEKKHGEDWGKVYDEAWERIDKKVEGLSKHIKLEEERRSEDAQSKAALTDWLRAKASFVIEGLKEADKDEFCRCELKLQKWYGDLRGKPFAIEAENSILDISGFSKQYNCAFIWQKDGVKKLNLYLIINYFKGGKLRFKKIKPEAFEANRFYTVINKKSGEIVPMEVNFNFDDPNLIILPLAFGKRQGREFIWNDLLSLETGSLKLANGRVIEKTLYNRRTRQDEPALFVALTFERREVLDSSNIKPMNLIGVDRGENIPAVIALTDPEGCPLSRFKDSLGNPTHILRIGESYKEKQRTIQAKKEVEQRRAGGYSRKYASKAKNLADDMVRNTARDLLYYAVTQDAMLIFENLSRGFGRQGKRTFMAERQYTRMEDWLTAKLAYEGLPSKTYLSKTLAQYTSKTCSNCGFTITSADYDRVLEKLKKTATGWMTTINGKELKVEGQITYYNRYKRQNVVKDLSVELDRLSEESVNNDISSWTKGRSGEALSLLKKRFSHRPVQEKFVCLNCGFETHADEQAALNIARSWLFLRSQEYKKYQTNKTSTGNTDKRAFVETWQSFYRKKLKEVWKPAV

SEQ ID NO: 35525 - protein, 979 aa, synthetic construct
  REGION 1..979: note = engineered CasX variant
QEIKRINKIRRRLVKDSNTKKAGKTGPMKTLLVRVMTPDLRERLENLRKKPENIPQPISNTSRANLNKLLTDYTEMKKAILHVYWEEFQKDPVGLMSRVAQPASKKIDQNKLKPEMDEKGNLTTAGFACSQCGQPLFVYKLEQVSEKGKAYTNYFGRCNVAEHEKLILLAQLKPEKDSDEAVTYSLGKFGQRALDFYSIHVTKESTHPVKPLAQIAGNRYASYPVGKALSDACMGTIASFLSKYQDIIIEHQKVVKGNQKRLESLRELAGKENLEYPSVTLPPQPHTKEGVDAYNEVIARVRMWVNLNLWQKLKLSRDDAKPLLRLKGFPSFPLVERQANEVDWWDMVCNVKKLINEKKEDGKVFWQNLAGYKRQEALRPYLSSEEDRKKGKKFARYQLGDLLLHLEKKHGEDWGKVYDEAWERIDKKVEGLSKHIKLEEERRSEDAQSKAALTDWLRAKASFVIEGLKEADKDEFCRCELKLQKWYGDLRGKPFAIEAENSILDISGFSKQYNCAFIWQKDGVKKLNLYLIINYFKGGKLRFKKIKPEAFEANRFYTVINKKSGEIVPMEVNFNFDDPNLIILPLAFGKRQGREFIWNDLLSLETGSLKLANGRVIEKTLYNRRTRQDEPALFVALTFERREVLDSSNIKPMNLIGVDRGENIPAVIALTDPEGCPLSRFKDSLGNPTHILRIGESYKEKQRTIQAKKEVEQRRAGGYSRKYASKAKNLADDMVRNTARDLLYYAVTQDAMLIFENLSRGFGRQGKRTFMAERQYTRMEDWLTAKLAYEGLPSKTYLSKTLAQYTSKTCSNCGFTITSADYDRVLEKLKKTATGWMTTINGKELKVEGQITYYNRYKRQNVVKDLSVELDRLSEESVNNDISSWTKGRSGEALSLLKKRFSHRPVQEKFVCLNCGFETHADEQAALNIARSWLFLRSQEYKKYQTNKTTGKNTDKRAFVETWQSFYRKKLKEVWKPAV

SEQ ID NO: 35526 - protein, 979 aa, synthetic construct
  REGION 1..979: note = engineered CasX variant
QEIKRINKIRRRLVKDSNTKKAGKTGPMKTLLVRVMTPDLRERLENLRKKPENIPQPISNTSRANLNKLLTDYTEMKKAILHVYWEEFQKDPVGLMSRVAQPASKKIDQNKLKPEMDEKGNLTTAGFACSQCGQPLFVYKLEQVSEKGKAYTNYFGRCNVAEHEKLILLAQLKPEKDSDEAVTYSLGKFGQRALDFYSIHVTKESTHPVKPLAQIAGNRYASHPVGKALSDACMGTIASFLSKYQDIIIEHQKVVKGNQKRLESLRELAGKENLEYPSVTLPPQPHTKEGVDAYNEVIARVRMWVNLNLWQKLKLSRDDAKPLLRLKGFPSFPLVERQANEVDWWDMVCNVKKLINEKKEDGKVFWQNLAGYKRQEALRPYLSSEEDRKKGKKFARYQLGDLLLHLEKKHGEDWGKVYDEAWERIDKKVEGLSKHIKLEEERRSEDAQSKAALTDWLRAKASFVIEGLKEADKDEFCRCELKLQKWYGDLRGKPFAIEAENSILDISGFSKQYNCAFIWQKDGVKKLNLYLIINYFKGGKLRFKKIKPEAFEANRFYTVINKKSGEIVPMEVNFNFDDPNLIILPLAFGKRQGREFIWNDLLSLETGSLKLANGRVIEKTLYNRRTRQDEPALFVALTFERREVLDSSNIKPMNLIGVDRGENIPAVIALTDPEGCPLSRFKDSLGNPTHILRIGESYKEKQRTIQAKKEVEQRRAGGYSRKYASKAKNLADDMVRNTARDLLYYAVTQDAMLIFENLSRGFGRQGKRTFMAERQYTRMEDWLTAKLAYEGLPSKTYLSKTLAQYTSKTCSNCGFTITSADYDRVLEKLKKTATGWMTTINGKELKVEGQITYYNRYKRQNVVKDLSVELDRLSEESVNNDISSWTKGRSGEALSLLKKRFSHRPVQEKFVCLNCGFETHADEQAALNIARSWLFLRSQEYKKYQTNKTTGKNTDKRAFVETWQSFYRKKLKEVWKPAV

SEQ ID NO: 35527 - protein, 979 aa, synthetic construct
  REGION 1..979: note = engineered CasX variant
QEIKRINKIRRRLVKDSNTKKAGKTGPMKTLLVRVMTPDLRERLENLRKKPENIPQPISNTSRANLNKLLTDYTEMKKAILHVYWEEFQKDPVGLMSRVAQPASKKIDQNKLKPEMDEKGNLTTAGFACSQCGQPLFVYKLEQVSEKGKAYTNYFGRCNVAEHEKLILLAQLKPEKDSDEAVTYSLGKFGQRALDFYSIHVTKESTHPVKPLAQIAGNRYASTPVGKALSDACMGTIASFLSKYQDIIIEHQKVVKGNQKRLESLRELAGKENLEYPSVTLPPQPHTKEGVDAYNEVIARVRMWVNLNLWQKLKLSRDDAKPLLRLKGFPSFPLVERQANEVDWWDMVCNVKKLINEKKEDGKVFWQNLAGYKRQEALRPYLSSEEDRKKGKKFARYQLGDLLLHLEKKHGEDWGKVYDEAWERIDKKVEGLSKHIKLEEERRSEDAQSKAALTDWLRAKASFVIEGLKEADKDEFCRCELKLQKWYGDLRGKPFAIEAENSILDISGFSKQYNCAFIWQKDGVKKLNLYLIINYFKGGKLRFKKIKPEAFEANRFYTVINKKSGEIVPMEVNFNFDDPNLIILPLAFGKRQGREFIWNDLLSLETGSLKLANGRVIEKTLYNRRTRQDEPALFVALTFERREVLDSSNIKPMNLIGVDRGENIPAVIALTDPEGCPLSRFKDSLGNPTHILRIGESYKEKQRTIQAKKEVEQRRAGGYSRKYASKAKNLADDMVRNTARDLLYYAVTQDAMLIFENLSRGFGRQGKRTFMAERQYTRMEDWLTAKLAYEGLPSKTYLSKTLAQYTSKTCSNCGFTITSADYDRVLEKLKKTATGWMTTINGKELKVEGQITYYNRYKRQNVVKDLSVELDRLSEESVNNDISSWTKGRSGEALSLLKKRFSHRPVQEKFVCLNCGFETHADEQAALNIARSWLFLRSQEYKKYQTNKTTGKNTDKRAFVETWQSFYRKKLKEVWKPAV

SEQ ID NO: 35528 - protein, 979 aa, synthetic construct
  REGION 1..979: note = engineered CasX variant
QEIKRINKIRRRLVKDSNTKKAGKTGPMKTLLVRVMTPDLRERLENLRKKPENIPQPISNTSRANLNKLLTDYTEMKKAILHVYWEEFQKDPVGLMSRVAQPASKKIDQNKLKPEMDEKGNLTTAGFACSQCGQPLFVYKLEQVSEKGKAYTNYFGRCNVAEHEKLILLAQLKPEKDSDEAVTYSLGKFGQRALDFYSIHVTKESTHPVKPLAQIAGNRYASAPVGKALSDACMGTIASFLSKYQDIIIEHQKVVKGNQKRLESLRELAGKENLEYPSVTLPPQPHTKEGVDAYNEVIARVRMWVNLNLWQKLKLSRDDAKPLLRLKGFPSFPLVERQANEVDWWDMVCNVKKLINEKKEDGKVFWQNLAGYKRQEALRPYLSSEEDRKKGKKFARYQLGDLLLHLEKKHGEDWGKVYDEAWERIDKKVEGLSKHIKLEEERRSEDAQSKAALTDWLRAKASFVIEGLKEADKDEFCRCELKLQKWYGDLRGKPFAIEAENSILDISGFSKQYNCAFIWQKDGVKKLNLYLIINYFKGGKLRFKKIKPEAFEANRFYTVINKKSGEIVPMEVNFNFDDPNLIILPLAFGKRQGREFIWNDLLSLETGSLKLANGRVIEKTLYNRRTRQDEPALFVALTFERREVLDSSNIKPMNLIGVDRGENIPAVIALTDPEGCPLSRFKDSLGNPTHILRIGESYKEKQRTIQAKKEVEQRRAGGYSRKYASKAKNLADDMVRNTARDLLYYAVTQDAMLIFENLSRGFGRQGKRTFMAERQYTRMEDWLTAKLAYEGLPSKTYLSKTLAQYTSKTCSNCGFTITSADYDRVLEKLKKTATGWMTTINGKELKVEGQITYYNRYKRQNVVKDLSVELDRLSEESVNNDISSWTKGRSGEALSLLKKRFSHRPVQEKFVCLNCGFETHADEQAALNIARSWLFLRSQEYKKYQTNKTTGKNTDKRAFVETWQSFYRKKLKEVWKPAV

SEQ ID NO: 35529 - protein, 979 aa, synthetic construct
  REGION 1..979: note = engineered CasX variant
QEIKRINKIRRRLVKDSNTKKAGKTGPMKTLLVRVMTPDLRERLENLRKKPENIPQPISNTSRANLNKLLTDYTEMKKAILHVYWEEFQKDPVGLMSRVAQPASKKIDQNKLKPEMDEKGNLTTAGFACSQCGQPLFVYKLEQVSEKGKAYTNYFGRCNVAEHEKLILLAQLKPEKDSDEAVTYSLGKFGQRALDFYSIHVTKESTHPVKPLAQIAGNRYASVPVGKALSDACMGTIASFLSKYQDIIIEHQKVVKGNQKRLESLRELAGKENLEYPSVTLPPQPHTKEGVDAYNEVIARVRMWVNLNLWQKLKLSRDDAKPLLRLKGFPSFPLVERQANEVDWWDMVCNVKKLINEKKEDGKVFWQNLAGYKRQEALRPYLSSEEDRKKGKKFARYQLGDLLLHLEKKHGEDWGKVYDEAWERIDKKVEGLSKHIKLEEERRSEDAQSKAALTDWLRAKASFVIEGLKEADKDEFCRCELKLQKWYGDLRGKPFAIEAENSILDISGFSKQYNCAFIWQKDGVKKLNLYLIINYFKGGKLRFKKIKPEAFEANRFYTVINKKSGEIVPMEVNFNFDDPNLIILPLAFGKRQGREFIWNDLLSLETGSLKLANGRVIEKTLYNRRTRQDEPALFVALTFERREVLDSSNIKPMNLIGVDRGENIPAVIALTDPEGCPLSRFKDSLGNPTHILRIGESYKEKQRTIQAKKEVEQRRAGGYSRKYASKAKNLADDMVRNTARDLLYYAVTQDAMLIFENLSRGFGRQGKRTFMAERQYTRMEDWLTAKLAYEGLPSKTYLSKTLAQYTSKTCSNCGFTITSADYDRVLEKLKKTATGWMTTINGKELKVEGQITYYNRYKRQNVVKDLSVELDRLSEESVNNDISSWTKGRSGEALSLLKKRFSHRPVQEKFVCLNCGFETHADEQAALNIARSWLFLRSQEYKKYQTNKTTGKNTDKRAFVETWQSFYRKKLKEVWKPAV

SEQ ID NO: 35530 - protein, 978 aa, synthetic construct
  REGION 1..978: note = engineered CasX variant
QEIKRINKIRRRLVKDSNTKKAGKTGPMKTLLVRVMTPDLRERLENLRKKPENIPQPISNTSRANLNKLLTDYTEMKKAILHVYWEEFQKDPVGLMSRVAQPASKKIDQNKLKPEMDEKGNLTTAGFACSQCGQPLFVYKLEQVSEKGKAYTNYFGRCNVAEHEKLILLAQLKPEKDSDEAVTYSLGKFGQRALDFYSIHVTKESTHPVKPLAQIAGNRYASYPVGKALSDACMGTIASFLSKYQDIIIEHQKVVKGNQKRLESLRELAGKENLEYPSVTLPPQPHTKEGVDAYNEVIARVRMWVNLNLWQKLKLSRDDAKPLLRLKKFPSFPLVERQANEVDWWDMVCNVKKLINEKKEDGKVFWQNLAGYKRQEALRPYLSSEEDRKKGKKFARYQLGDLLLHLEKKHGEDWGKVYDEAWERIDKKVEGLSKHIKLEEERRSEDAQSKAALTDWLRAKASFVIEGLKEADKDEFCRCELKLQKWYGDLRGKPFAIEAENSILDISGFSKQYNCAFIWQKDGVKKLNLYLIINYFKGGKLRFKKIKPEAFEANRFYTVINKKSGEIVPMEVNFNFDDPNLIILPLAFGKRQGREFIWNDLLSLETGSLKLANGRVIEKTLYNRRTRQDEPALFVALTFERREVLDSSNIKPMNLIGVDRGENIPAVIALTDPEGCPLSRFKDSLGNPTHILRIGESYKEKQRTIQAKKEVEQRRAGGYSRKYASKAKNLADDMVRNTARDLLYYAVTQDAMLIFENLSRGFGRQGKRTFMAERQYTRMEDWLTAKLAYEGLPSKTYLSKTLAQYTSKTCSNCGFTITSADYDRVLEKLKKTATGWMTTINGKELKVEGQITYYNRYKRQNVVKDLSVELDRLSEESVNNDISSWTKGRSGEALSLLKKRFSHRPVQEKFVCLNCGFETHADEQAALNIARSWLFLRSQEYKKYQTNKTTGNTDKRAFVETWQSFYRKKLKEVWKPAV

SEQ ID NO: 35531 - protein, 978 aa, synthetic construct
  REGION 1..978: note = engineered CasX variant
QEIKRINKIRRRLVKDSNTKKAGKTGPMKTLLVRVMTPDLRERLENLRKKPENIPQPISNTSRANLNKLLTDYTEMKKAILHVYWEEFQKDPVGLMSRVAQPASKKIDQNKLKPEMDEKGNLTTAGFACSQCGQPLFVYKLEQVSEKGKAYTNYFGRCNVAEHEKLILLAQLKPEKDSDEAVTYSLGKFGQRALDFYSIHVTKESTHPVKPLAQIAGNRYASHPVGKALSDACMGTIASFLSKYQDIIIEHQKVVKGNQKRLESLRELAGKENLEYPSVTLPPQPHTKEGVDAYNEVIARVRMWVNLNLWQKLKLSRDDAKPLLRLKKFPSFPLVERQANEVDWWDMVCNVKKLINEKKEDGKVFWQNLAGYKRQEALRPYLSSEEDRKKGKKFARYQLGDLLLHLEKKHGEDWGKVYDEAWERIDKKVEGLSKHIKLEEERRSEDAQSKAALTDWLRAKASFVIEGLKEADKDEFCRCELKLQKWYGDLRGKPFAIEAENSILDISGFSKQYNCAFIWQKDGVKKLNLYLIINYFKGGKLRFKKIKPEAFEANRFYTVINKKSGEIVPMEVNFNFDDPNLIILPLAFGKRQGREFIWNDLLSLETGSLKLANGRVIEKTLYNRRTRQDEPALFVALTFERREVLDSSNIKPMNLIGVDRGENIPAVIALTDPEGCPLSRFKDSLGNPTHILRIGESYKEKQRTIQAKKEVEQRRAGGYSRKYASKAKNLADDMVRNTARDLLYYAVTQDAMLIFENLSRGFGRQGKRTFMAERQYTRMEDWLTAKLAYEGLPSKTYLSKTLAQYTSKTCSNCGFTITSADYDRVLEKLKKTATGWMTTINGKELKVEGQITYYNRYKRQNVVKDLSVELDRLSEESVNNDISSWTKGRSGEALSLLKKRFSHRPVQEKFVCLNCGFETHADEQAALNIARSWLFLRSQEYKKYQTNKTTGNTDKRAFVETWQSFYRKKLKEVWKPAV

SEQ ID NO: 35532 - protein, 978 aa, synthetic construct
  REGION 1..978: note = engineered CasX variant
QEIKRINKIRRRLVKDSNTKKAGKTGPMKTLLVRVMTPDLRERLENLRKKPENIPQPISNTSRANLNKLLTDYTEMKKAILHVYWEEFQKDPVGLMSRVAQPASKKIDQNKLKPEMDEKGNLTTAGFACSQCGQPLFVYKLEQVSEKGKAYTNYFGRCNVAEHEKLILLAQLKPEKDSDEAVTYSLGKFGQRALDFYSIHVTKESTHPVKPLAQIAGNRYASTPVGKALSDACMGTIASFLSKYQDIIIEHQKVVKGNQKRLESLRELAGKENLEYPSVTLPPQPHTKEGVDAYNEVIARVRMWVNLNLWQKLKLSRDDAKPLLRLKKFPSFPLVERQANEVDWWDMVCNVKKLINEKKEDGKVFWQNLAGYKRQEALRPYLSSEEDRKKGKKFARYQLGDLLLHLEKKHGEDWGKVYDEAWERIDKKVEGLSKHIKLEEERRSEDAQSKAALTDWLRAKASFVIEGLKEADKDEFCRCELKLQKWYGDLRGKPFAIEAENSILDISGFSKQYNCAFIWQKDGVKKLNLYLIINYFKGGKLRFKKIKPEAFEANRFYTVINKKSGEIVPMEVNFNFDDPNLIILPLAFGKRQGREFIWNDLLSLETGSLKLANGRVIEKTLYNRRTRQDEPALFVALTFERREVLDSSNIKPMNLIGVDRGENIPAVIALTDPEGCPLSRFKDSLGNPTHILRIGESYKEKQRTIQAKKEVEQRRAGGYSRKYASKAKNLADDMVRNTARDLLYYAVTQDAMLIFENLSRGFGRQGKRTFMAERQYTRMEDWLTAKLAYEGLPSKTYLSKTLAQYTSKTCSNCGFTITSADYDRVLEKLKKTATGWMTTINGKELKVEGQITYYNRYKRQNVVKDLSVELDRLSEESVNNDISSWTKGRSGEALSLLKKRFSHRPVQEKFVCLNCGFETHADEQAALNIARSWLFLRSQEYKKYQTNKTTGNTDKRAFVETWQSFYRKKLKEVWKPAV

SEQ ID NO: 35533 - protein, 978 aa, synthetic construct
  REGION 1..978: note = engineered CasX variant
QEIKRINKIRRRLVKDSNTKKAGKTGPMKTLLVRVMTPDLRERLENLRKKPENIPQPISNTSRANLNKLLTDYTEMKKAILHVYWEEFQKDPVGLMSRVAQPASKKIDQNKLKPEMDEKGNLTTAGFACSQCGQPLFVYKLEQVSEKGKAYTNYFGRCNVAEHEKLILLAQLKPEKDSDEAVTYSLGKFGQRALDFYSIHVTKESTHPVKPLAQIAGNRYASAPVGKALSDACMGTIASFLSKYQDIIIEHQKVVKGNQKRLESLRELAGKENLEYPSVTLPPQPHTKEGVDAYNEVIARVRMWVNLNLWQKLKLSRDDAKPLLRLKKFPSFPLVERQANEVDWWDMVCNVKKLINEKKEDGKVFWQNLAGYKRQEALRPYLSSEEDRKKGKKFARYQLGDLLLHLEKKHGEDWGKVYDEAWERIDKKVEGLSKHIKLEEERRSEDAQSKAALTDWLRAKASFVIEGLKEADKDEFCRCELKLQKWYGDLRGKPFAIEAENSILDISGFSKQYNCAFIWQKDGVKKLNLYLIINYFKGGKLRFKKIKPEAFEANRFYTVINKKSGEIVPMEVNFNFDDPNLIILPLAFGKRQGREFIWNDLLSLETGSLKLANGRVIEKTLYNRRTRQDEPALFVALTFERREVLDSSNIKPMNLIGVDRGENIPAVIALTDPEGCPLSRFKDSLGNPTHILRIGESYKEKQRTIQAKKEVEQRRAGGYSRKYASKAKNLADDMVRNTARDLLYYAVTQDAMLIFENLSRGFGRQGKRTFMAERQYTRMEDWLTAKLAYEGLPSKTYLSKTLAQYTSKTCSNCGFTITSADYDRVLEKLKKTATGWMTTINGKELKVEGQITYYNRYKRQNVVKDLSVELDRLSEESVNNDISSWTKGRSGEALSLLKKRFSHRPVQEKFVCLNCGFETHADEQAALNIARSWLFLRSQEYKKYQTNKTTGNTDKRAFVETWQSFYRKKLKEVWKPAV

SEQ ID NO: 35534 - protein, 978 aa, synthetic construct
  REGION 1..978: note = engineered CasX variant
QEIKRINKIRRRLVKDSNTKKAGKTGPMKTLLVRVMTPDLRERLENLRKKPENIPQPISNTSRANLNKLLTDYTEMKKAILHVYWEEFQKDPVGLMSRVAQPASKKIDQNKLKPEMDEKGNLTTAGFACSQCGQPLFVYKLEQVSEKGKAYTNYFGRCNVAEHEKLILLAQLKPEKDSDEAVTYSLGKFGQRALDFYSIHVTKESTHPVKPLAQIAGNRYASVPVGKALSDACMGTIASFLSKYQDIIIEHQKVVKGNQKRLESLRELAGKENLEYPSVTLPPQPHTKEGVDAYNEVIARVRMWVNLNLWQKLKLSRDDAKPLLRLKKFPSFPLVERQANEVDWWDMVCNVKKLINEKKEDGKVFWQNLAGYKRQEALRPYLSSEEDRKKGKKFARYQLGDLLLHLEKKHGEDWGKVYDEAWERIDKKVEGLSKHIKLEEERRSEDAQSKAALTDWLRAKASFVIEGLKEADKDEFCRCELKLQKWYGDLRGKPFAIEAENSILDISGFSKQYNCAFIWQKDGVKKLNLYLIINYFKGGKLRFKKIKPEAFEANRFYTVINKKSGEIVPMEVNFNFDDPNLIILPLAFGKRQGREFIWNDLLSLETGSLKLANGRVIEKTLYNRRTRQDEPALFVALTFERREVLDSSNIKPMNLIGVDRGENIPAVIALTDPEGCPLSRFKDSLGNPTHILRIGESYKEKQRTIQAKKEVEQRRAGGYSRKYASKAKNLADDMVRNTARDLLYYAVTQDAMLIFENLSRGFGRQGKRTFMAERQYTRMEDWLTAKLAYEGLPSKTYLSKTLAQYTSKTCSNCGFTITSADYDRVLEKLKKTATGWMTTINGKELKVEGQITYYNRYKRQNVVKDLSVELDRLSEESVNNDISSWTKGRSGEALSLLKKRFSHRPVQEKFVCLNCGFETHADEQAALNIARSWLFLRSQEYKKYQTNKTTGNTDKRAFVETWQSFYRKKLKEVWKPAV

SEQ ID NO: 35535 - protein, 978 aa, synthetic construct
  REGION 1..978: note = engineered CasX variant
QEIKRINKIRRRLVKDSNTKKAGKTGPMKTLLVRVMTPDLRERLENLRKKPENIPQPISNTSRANLNKLLTDYTEMKKAILHVYWEEFQKDPVGLMSRVAQPASKKIDQNKLKPEMDEKGNLTTAGFACSQCGQPLFVYKLEQVSEKGKAYTNYFGRCNVAEHEKLILLAQLKPEKDSDEAVTYSLGKFGQRALDFYSIHVTKESTHPVKPLAQIAGNRYASYPVGKALSDACMGTIASFLSKYQDIIIEHQKVVKGNQKRLESLRELAGKENLEYPSVTLPPQPHTKEGVDAYNEVIARVRMWVNLNLWQKLKLSRDDAKPLLRLKGFPSFPLVERQANEVDWWDMVCNVKKLINEKKEDGKVFWQNLAGYKRQEALRPYLSSEEDRKKGKKFARYQLGDLLLHLEKKHGEDWGKVYDEAWERIDKKVEGLSKHIKLEEERRSEDAQSKAALTDWLRAKASFVIEGLKEADKDEFCRCELKLQKWYGDLRGKPFAIEAENSILDISGFSKQYNCAFIWQKDGVKKLNLYLIINYFKGGKLRFKKIKPEAFEANRFYTVINKKSGEIVPMEVNFNFDDPNLIILPLAFGKRQGREFIWNDLLSLETGSLKLANGRVIEKTLYNRRTRQDEPALFVALTFERREVLDSSNIKPMNLIGVDRGENIPAVIALTDPEGCPLSRFKDSLGNPTHILRIGERYKEKQRTIQAKKEVEQRRAGGYSRKYASKAKNLADDMVRNTARDLLYYAVTQDAMLIFENLSRGFGRQGKRTFMAERQYTRMEDWLTAKLAYEGLPSKTYLSKTLAQYTSKTCSNCGFTITSADYDRVLEKLKKTATGWMTTINGKELKVEGQITYYNRYKRQNVVKDLSVELDRLSEESVNNDISSWTKGRSGEALSLLKKRFSHRPVQEKFVCLNCGFETHADEQAALNIARSWLFLRSQEYKKYQTNKTTGNTDKRAFVETWQSFYRKKLKEVWKPAV

SEQ ID NO: 35536 - protein, 978 aa, synthetic construct
  REGION 1..978: note = engineered CasX variant
QEIKRINKIRRRLVKDSNTKKAGKTGPMKTLLVRVMTPDLRERLENLRKKPENIPQPISNTSRANLNKLLTDYTEMKKAILHVYWEEFQKDPVGLMSRVAQPASKKIDQNKLKPEMDEKGNLTTAGFACSQCGQPLFVYKLEQVSEKGKAYTNYFGRCNVAEHEKLILLAQLKPEKDSDEAVTYSLGKFGQRALDFYSIHVTKESTHPVKPLAQIAGNRYASHPVGKALSDACMGTIASFLSKYQDIIIEHQKVVKGNQKRLESLRELAGKENLEYPSVTLPPQPHTKEGVDAYNEVIARVRMWVNLNLWQKLKLSRDDAKPLLRLKGFPSFPLVERQANEVDWWDMVCNVKKLINEKKEDGKVFWQNLAGYKRQEALRPYLSSEEDRKKGKKFARYQLGDLLLHLEKKHGEDWGKVYDEAWERIDKKVEGLSKHIKLEEERRSEDAQSKAALTDWLRAKASFVIEGLKEADKDEFCRCELKLQKWYGDLRGKPFAIEAENSILDISGFSKQYNCAFIWQKDGVKKLNLYLIINYFKGGKLRFKKIKPEAFEANRFYTVINKKSGEIVPMEVNFNFDDPNLIILPLAFGKRQGREFIWNDLLSLETGSLKLANGRVIEKTLYNRRTRQDEPALFVALTFERREVLDSSNIKPMNLIGVDRGENIPAVIALTDPEGCPLSRFKDSLGNPTHILRIGERYKEKQRTIQAKKEVEQRRAGGYSRKYASKAKNLADDMVRNTARDLLYYAVTQDAMLIFENLSRGFGRQGKRTFMAERQYTRMEDWLTAKLAYEGLPSKTYLSKTLAQYTSKTCSNCGFTITSADYDRVLEKLKKTATGWMTTINGKELKVEGQITYYNRYKRQNVVKDLSVELDRLSEESVNNDISSWTKGRSGEALSLLKKRFSHRPVQEKFVCLNCGFETHADEQAALNIARSWLFLRSQEYKKYQTNKTTGNTDKRAFVETWQSFYRKKLKEVWKPAV

SEQ ID NO: 35537 - protein, 978 aa, synthetic construct
  REGION 1..978: note = engineered CasX variant
QEIKRINKIRRRLVKDSNTKKAGKTGPMKTLLVRVMTPDLRERLENLRKKPENIPQPISNTSRANLNKLLTDYTEMKKAILHVYWEEFQKDPVGLMSRVAQPASKKIDQNKLKPEMDEKGNLTTAGFACSQCGQPLFVYKLEQVSEKGKAYTNYFGRCNVAEHEKLILLAQLKPEKDSDEAVTYSLGKFGQRALDFYSIHVTKESTHPVKPLAQIAGNRYASTPVGKALSDACMGTIASFLSKYQDIIIEHQKVVKGNQKRLESLRELAGKENLEYPSVTLPPQPHTKEGVDAYNEVIARVRMWVNLNLWQKLKLSRDDAKPLLRLKGFPSFPLVERQANEVDWWDMVCNVKKLINEKKEDGKVFWQNLAGYKRQEALRPYLSSEEDRKKGKKFARYQLGDLLLHLEKKHGEDWGKVYDEAWERIDKKVEGLSKHIKLEEERRSEDAQSKAALTDWLRAKASFVIEGLKEADKDEFCRCELKLQKWYGDLRGKPFAIEAENSILDISGFSKQYNCAFIWQKDGVKKLNLYLIINYFKGGKLRFKKIKPEAFEANRFYTVINKKSGEIVPMEVNFNFDDPNLIILPLAFGKRQGREFIWNDLLSLETGSLKLANGRVIEKTLYNRRTRQDEPALFVALTFERREVLDSSNIKPMNLIGVDRGENIPAVIALTDPEGCPLSRFKDSLGNPTHILRIGERYKEKQRTIQAKKEVEQRRAGGYSRKYASKAKNLADDMVRNTARDLLYYAVTQDAMLIFENLSRGFGRQGKRTFMAERQYTRMEDWLTAKLAYEGLPSKTYLSKTLAQYTSKTCSNCGFTITSADYDRVLEKLKKTATGWMTTINGKELKVEGQITYYNRYKRQNVVKDLSVELDRLSEESVNNDISSWTKGRSGEALSLLKKRFSHRPVQEKFVCLNCGFETHADEQAALNIARSWLFLRSQEYKKYQTNKTTGNTDKRAFVETWQSFYRKKLKEVWKPAV

SEQ ID NO: 35538 - protein, 978 aa, synthetic construct
  REGION 1..978: note = engineered CasX variant
QEIKRINKIRRRLVKDSNTKKAGKTGPMKTLLVRVMTPDLRERLENLRKKPENIPQPISNTSRANLNKLLTDYTEMKKAILHVYWEEFQKDPVGLMSRVAQPASKKIDQNKLKPEMDEKGNLTTAGFACSQCGQPLFVYKLEQVSEKGKAYTNYFGRCNVAEHEKLILLAQLKPEKDSDEAVTYSLGKFGQRALDFYSIHVTKESTHPVKPLAQIAGNRYASAPVGKALSDACMGTIASFLSKYQDIIIEHQKVVKGNQKRLESLRELAGKENLEYPSVTLPPQPHTKEGVDAYNEVIARVRMWVNLNLWQKLKLSRDDAKPLLRLKGFPSFPLVERQANEVDWWDMVCNVKKLINEKKEDGKVFWQNLAGYKRQEALRPYLSSEEDRKKGKKFARYQLGDLLLHLEKKHGEDWGKVYDEAWERIDKKVEGLSKHIKLEEERRSEDAQSKAALTDWLRAKASFVIEGLKEADKDEFCRCELKLQKWYGDLRGKPFAIEAENSILDISGFSKQYNCAFIWQKDGVKKLNLYLIINYFKGGKLRFKKIKPEAFEANRFYTVINKKSGEIVPMEVNFNFDDPNLIILPLAFGKRQGREFIWNDLLSLETGSLKLANGRVIEKTLYNRRTRQDEPALFVALTFERREVLDSSNIKPMNLIGVDRGENIPAVIALTDPEGCPLSRFKDSLGNPTHILRIGERYKEKQRTIQAKKEVEQRRAGGYSRKYASKAKNLADDMVRNTARDLLYYAVTQDAMLIFENLSRGFGRQGKRTFMAERQYTRMEDWLTAKLAYEGLPSKTYLSKTLAQYTSKTCSNCGFTITSADYDRVLEKLKKTATGWMTTINGKELKVEGQITYYNRYKRQNVVKDLSVELDRLSEESVNNDISSWTKGRSGEALSLLKKRFSHRPVQEKFVCLNCGFETHADEQAALNIARSWLFLRSQEYKKYQTNKTTGNTDKRAFVETWQSFYRKKLKEVWKPAV

SEQ ID NO: 35539 - protein, 978 aa, synthetic construct
  REGION 1..978: note = engineered CasX variant
QEIKRINKIRRRLVKDSNTKKAGKTGPMKTLLVRVMTPDLRERLENLRKKPENIPQPISNTSRANLNKLLTDYTEMKKAILHVYWEEFQKDPVGLMSRVAQPASKKIDQNKLKPEMDEKGNLTTAGFACSQCGQPLFVYKLEQVSEKGKAYTNYFGRCNVAEHEKLILLAQLKPEKDSDEAVTYSLGKFGQRALDFYSIHVTKESTHPVKPLAQIAGNRYASVPVGKALSDACMGTIASFLSKYQDIIIEHQKVVKGNQKRLESLRELAGKENLEYPSVTLPPQPHTKEGVDAYNEVIARVRMWVNLNLWQKLKLSRDDAKPLLRLKGFPSFPLVERQANEVDWWDMVCNVKKLINEKKEDGKVFWQNLAGYKRQEALRPYLSSEEDRKKGKKFARYQLGDLLLHLEKKHGEDWGKVYDEAWERIDKKVEGLSKHIKLEEERRSEDAQSKAALTDWLRAKASFVIEGLKEADKDEFCRCELKLQKWYGDLRGKPFAIEAENSILDISGFSKQYNCAFIWQKDGVKKLNLYLIINYFKGGKLRFKKIKPEAFEANRFYTVINKKSGEIVPMEVNFNFDDPNLIILPLAFGKRQGREFIWNDLLSLETGSLKLANGRVIEKTLYNRRTRQDEPALFVALTFERREVLDSSNIKPMNLIGVDRGENIPAVIALTDPEGCPLSRFKDSLGNPTHILRIGERYKEKQRTIQAKKEVEQRRAGGYSRKYASKAKNLADDMVRNTARDLLYYAVTQDAMLIFENLSRGFGRQGKRTFMAERQYTRMEDWLTAKLAYEGLPSKTYLSKTLAQYTSKTCSNCGFTITSADYDRVLEKLKKTATGWMTTINGKELKVEGQITYYNRYKRQNVVKDLSVELDRLSEESVNNDISSWTKGRSGEALSLLKKRFSHRPVQEKFVCLNCGFETHADEQAALNIARSWLFLRSQEYKKYQTNKTTGNTDKRAFVETWQSFYRKKLKEVWKPAV

SEQ ID NO: 35540 - protein, 978 aa, synthetic construct
  REGION 1..978: note = engineered CasX variant
QEIKRINKIRRRLVKDSNTKKAGKTGPMKTLLVRVMTPDLRERLENLRKKPENIPQPISNTSRANLNKLLTDYTEMKKAILHVYWEEFQKDPVGLMSRVAQPASKKIDQNKLKPEMDEKGNLTTAGFACSQCGQPLFVYKLEQVSEKGKAYTNYFGRCNVAEHEKLILLAQLKPEKDSDEAVTYSLGKFGQRALDFYSIHVTKESTHPVKPLAQIAGNRYASYPVGKALSDACMGTIASFLSKYQDIIIEHQKVVKGNQKRLESLRELAGKENLEYPSVTLPPQPHTKEGVDAYNEVIARVRMWVNLNLWQKLKLSRDDAKPLLRLKGFPSFPLVERQANEVDWWDMVCNVKKLINEKKEDGKVFWQNLAGYKRQEALRPYLSSEEDRKKGKKFARYQLGDLLLHLEKKHGEDWGKVYDEAWERIDKKVEGLSKHIKLEEERRSEDAQSKAALTDWLRAKASFVIEGLKEADKDEFCRCELKLQKWYGDLRGKPFAIEAENSILDISGFSKQYNCAFIWQKDGVKKLNLYLIINYFKGGKLRFKKIKPEAFEANRFYTVINKKSGEIVPMEVNFNFDDPNLIILPLAFGKRQGREFIWNDLLSLETGSLQLANGRVIEKTLYNRRTRQDEPALFVALTFERREVLDSSNIKPMNLIGVDRGENIPAVIALTDPEGCPLSRFKDSLGNPTHILRIGESYKEKQRTIQAKKEVEQRRAGGYSRKYASKAKNLADDMVRNTARDLLYYAVTQDAMLIFENLSRGFGRQGKRTFMAERQYTRMEDWLTAKLAYEGLPSKTYLSKTLAQYTSKTCSNCGFTITSADYDRVLEKLKKTATGWMTTINGKELKVEGQITYYNRYKRQNVVKDLSVELDRLSEESVNNDISSWTKGRSGEALSLLKKRFSHRPVQEKFVCLNCGFETHADEQAALNIARSWLFLRSQEYKKYQTNKTTGNTDKRAFVETWQSFYRKKLKEVWKPAV

SEQ ID NO: 35541 - protein, 978 aa, synthetic construct
  REGION 1..978: note = engineered CasX variant
QEIKRINKIRRRLVKDSNTKKAGKTGPMKTLLVRVMTPDLRERLENLRKKPENIPQPISNTSRANLNKLLTDYTEMKKAILHVYWEEFQKDPVGLMSRVAQPASKKIDQNKLKPEMDEKGNLTTAGFACSQCGQPLFVYKLEQVSEKGKAYTNYFGRCNVAEHEKLILLAQLKPEKDSDEAVTYSLGKFGQRALDFYSIHVTKESTHPVKPLAQIAGNRYASHPVGKALSDACMGTIASFLSKYQDIIIEHQKVVKGNQKRLESLRELAGKENLEYPSVTLPPQPHTKEGVDAYNEVIARVRMWVNLNLWQKLKLSRDDAKPLLRLKGFPSFPLVERQANEVDWWDMVCNVKKLINEKKEDGKVFWQNLAGYKRQEALRPYLSSEEDRKKGKKFARYQLGDLLLHLEKKHGEDWGKVYDEAWERIDKKVEGLSKHIKLEEERRSEDAQSKAALTDWLRAKASFVIEGLKEADKDEFCRCELKLQKWYGDLRGKPFAIEAENSILDISGFSKQYNCAFIWQKDGVKKLNLYLIINYFKGGKLRFKKIKPEAFEANRFYTVINKKSGEIVPMEVNFNFDDPNLIILPLAFGKRQGREFIWNDLLSLETGSLQLANGRVIEKTLYNRRTRQDEPALFVALTFERREVLDSSNIKPMNLIGVDRGENIPAVIALTDPEGCPLSRFKDSLGNPTHILRIGESYKEKQRTIQAKKEVEQRRAGGYSRKYASKAKNLADDMVRNTARDLLYYAVTQDAMLIFENLSRGFGRQGKRTFMAERQYTRMEDWLTAKLAYEGLPSKTYLSKTLAQYTSKTCSNCGFTITSADYDRVLEKLKKTATGWMTTINGKELKVEGQITYYNRYKRQNVVKDLSVELDRLSEESVNNDISSWTKGRSGEALSLLKKRFSHRPVQEKFVCLNCGFETHADEQAALNIARSWLFLRSQEYKKYQTNKTTGNTDKRAFVETWQSFYRKKLKEVWKPAV

SEQ ID NO: 35542 - protein, 978 aa, synthetic construct
  REGION 1..978: note = engineered CasX variant
QEIKRINKIRRRLVKDSNTKKAGKTGPMKTLLVRVMTPDLRERLENLRKKPENIPQPISNTSRANLNKLLTDYTEMKKAILHVYWEEFQKDPVGLMSRVAQPASKKIDQNKLKPEMDEKGNLTTAGFACSQCGQPLFVYKLEQVSEKGKAYTNYFGRCNVAEHEKLILLAQLKPEKDSDEAVTYSLGKFGQRALDFYSIHVTKESTHPVKPLAQIAGNRYASTPVGKALSDACMGTIASFLSKYQDIIIEHQKVVKGNQKRLESLRELAGKENLEYPSVTLPPQPHTKEGVDAYNEVIARVRMWVNLNLWQKLKLSRDDAKPLLRLKGFPSFPLVERQANEVDWWDMVCNVKKLINEKKEDGKVFWQNLAGYKRQEALRPYLSSEEDRKKGKKFARYQLGDLLLHLEKKHGEDWGKVYDEAWERIDKKVEGLSKHIKLEEERRSEDAQSKAALTDWLRAKASFVIEGLKEADKDEFCRCELKLQKWYGDLRGKPFAIEAENSILDISGFSKQYNCAFIWQKDGVKKLNLYLIINYFKGGKLRFKKIKPEAFEANRFYTVINKKSGEIVPMEVNFNFDDPNLIILPLAFGKRQGREFIWNDLLSLETGSLQLANGRVIEKTLYNRRTRQDEPALFVALTFERREVLDSSNIKPMNLIGVDRGENIPAVIALTDPEGCPLSRFKDSLGNPTHILRIGESYKEKQRTIQAKKEVEQRRAGGYSRKYASKAKNLADDMVRNTARDLLYYAVTQDAMLIFENLSRGFGRQGKRTFMAERQYTRMEDWLTAKLAYEGLPSKTYLSKTLAQYTSKTCSNCGFTITSADYDRVLEKLKKTATGWMTTINGKELKVEGQITYYNRYKRQNVVKDLSVELDRLSEESVNNDISSWTKGRSGEALSLLKKRFSHRPVQEKFVCLNCGFETHADEQAALNIARSWLFLRSQEYKKYQTNKTTGNTDKRAFVETWQSFYRKKLKEVWKPAV

SEQ ID NO: 35543 - protein, 978 aa, synthetic construct
  REGION 1..978: note = engineered CasX variant
QEIKRINKIRRRLVKDSNTKKAGKTGPMKTLLVRVMTPDLRERLENLRKKPENIPQPISNTSRANLNKLLTDYTEMKKAILHVYWEEFQKDPVGLMSRVAQPASKKIDQNKLKPEMDEKGNLTTAGFACSQCGQPLFVYKLEQVSEKGKAYTNYFGRCNVAEHEKLILLAQLKPEKDSDEAVTYSLGKFGQRALDFYSIHVTKESTHPVKPLAQIAGNRYASAPVGKALSDACMGTIASFLSKYQDIIIEHQKVVKGNQKRLESLRELAGKENLEYPSVTLPPQPHTKEGVDAYNEVIARVRMWVNLNLWQKLKLSRDDAKPLLRLKGFPSFPLVERQANEVDWWDMVCNVKKLINEKKEDGKVFWQNLAGYKRQEALRPYLSSEEDRKKGKKFARYQLGDLLLHLEKKHGEDWGKVYDEAWERIDKKVEGLSKHIKLEEERRSEDAQSKAALTDWLRAKASFVIEGLKEADKDEFCRCELKLQKWYGDLRGKPFAIEAENSILDISGFSKQYNCAFIWQKDGVKKLNLYLIINYFKGGKLRFKKIKPEAFEANRFYTVINKKSGEIVPMEVNFNFDDPNLIILPLAFGKRQGREFIWNDLLSLETGSLQLANGRVIEKTLYNRRTRQDEPALFVALTFERREVLDSSNIKPMNLIGVDRGENIPAVIALTDPEGCPLSRFKDSLGNPTHILRIGESYKEKQRTIQAKKEVEQRRAGGYSRKYASKAKNLADDMVRNTARDLLYYAVTQDAMLIFENLSRGFGRQGKRTFMAERQYTRMEDWLTAKLAYEGLPSKTYLSKTLAQYTSKTCSNCGFTITSADYDRVLEKLKKTATGWMTTINGKELKVEGQITYYNRYKRQNVVKDLSVELDRLSEESVNNDISSWTKGRSGEALSLLKKRFSHRPVQEKFVCLNCGFETHADEQAALNIARSWLFLRSQEYKKYQTNKTTGNTDKRAFVETWQSFYRKKLKEVWKPAV

SEQ ID NO: 35544 - protein, 978 aa, synthetic construct
  REGION 1..978: note = engineered CasX variant
QEIKRINKIRRRLVKDSNTKKAGKTGPMKTLLVRVMTPDLRERLENLRKKPENIPQPISNTSRANLNKLLTDYTEMKKAILHVYWEEFQKDPVGLMSRVAQPASKKIDQNKLKPEMDEKGNLTTAGFACSQCGQPLFVYKLEQVSEKGKAYTNYFGRCNVAEHEKLILLAQLKPEKDSDEAVTYSLGKFGQRALDFYSIHVTKESTHPVKPLAQIAGNRYASVPVGKALSDACMGTIASFLSKYQDIIIEHQKVVKGNQKRLESLRELAGKENLEYPSVTLPPQPHTKEGVDAYNEVIARVRMWVNLNLWQKLKLSRDDAKPLLRLKGFPSFPLVERQANEVDWWDMVCNVKKLINEKKEDGKVFWQNLAGYKRQEALRPYLSSEEDRKKGKKFARYQLGDLLLHLEKKHGEDWGKVYDEAWERIDKKVEGLSKHIKLEEERRSEDAQSKAALTDWLRAKASFVIEGLKEADKDEFCRCELKLQKWYGDLRGKPFAIEAENSILDISGFSKQYNCAFIWQKDGVKKLNLYLIINYFKGGKLRFKKIKPEAFEANRFYTVINKKSGEIVPMEVNFNFDDPNLIILPLAFGKRQGREFIWNDLLSLETGSLQLANGRVIEKTLYNRRTRQDEPALFVALTFERREVLDSSNIKPMNLIGVDRGENIPAVIALTDPEGCPLSRFKDSLGNPTHILRIGESYKEKQRTIQAKKEVEQRRAGGYSRKYASKAKNLADDMVRNTARDLLYYAVTQDAMLIFENLSRGFGRQGKRTFMAERQYTRMEDWLTAKLAYEGLPSKTYLSKTLAQYTSKTCSNCGFTITSADYDRVLEKLKKTATGWMTTINGKELKVEGQITYYNRYKRQNVVKDLSVELDRLSEESVNNDISSWTKGRSGEALSLLKKRFSHRPVQEKFVCLNCGFETHADEQAALNIARSWLFLRSQEYKKYQTNKTTGNTDKRAFVETWQSFYRKKLKEVWKPAV

SEQ ID NO: 35545 - protein, 978 aa, synthetic construct
  REGION 1..978: note = engineered CasX variant
QEIKRINKIRRRLVKDSNTKKAGKTGPMKTLLVRVMTPDLRERLENLRKKPENIPQPISNTSRANLNKLLTDYTEMKKAILHVYWEEFQKDPVGLMSRVAQPASKKIDQNKLKPEMDEKGNLTTAGFACSQCGQPLFVYKLEQVSEKGKAYTNYFGRCNVAEHEKLILLAQLKPEKDSDEAVTYSLGKFGQRALDFYSIHVTKESTHPVKPLAQIAGNRYASYPVGKALSDACMGTIASFLSKYQDIIIEHQKVVKGNQKRLESLRELAGKENLEYPSVTLPPQPHTSEGLDAYNEVIARVRMWVNLNLWQKLKLSRDDAKPLLRLKGFPSFPLVERQANEVDWWDMVCNVKKLINEKKEDGKVFWQNLAGYKRQEALRPYLSSEEDRKKGKKFARYQLGDLLLHLEKKHGEDWGKVYDEAWERIDKKVEGLSKHIKLEEERRSEDAQSKAALTDWLRAKASFVIEGLKEADKDEFCRCELKLQKWYGDLRGKPFAIEAENSILDISGFSKQYNCAFIWQKDGVKKLNLYLIINYFKGGKLRFKKIKPEAFEANRFYTVINKKSGEIVPMEVNFNFDDPNLIILPLAFGKRQGREFIWNDLLSLETGSLKLANGRVIEKTLYNRRTRQDEPALFVALTFERREVLDSSNIKPMNLIGVDRGENIPAVIALTDPEGCPLSRFKDSLGNPTHILRIGESYKEKQRTIQAKKEVEQRRAGGYSRKYASKAKNLADDMVRNTARDLLYYAVTQDAMLIFENLSRGFGRQGKRTFMAERQYTRMEDWLTAKLAYEGLPSKTYLSKTLAQYTSKTCSNCGFTITSADYDRVLEKLKKTATGWMTTINGKELKVEGQITYYNRYKRQNVVKDLSVELDRLSEESVNNDISSWTKGRSGEALSLLKKRFSHRPVQEKFVCLNCGFETHADEQAALNIARSWLFLRSQEYKKYQTNKTTGNTDKRAFVETWQSFYRKKLKEVWKPAV

SEQ ID NO: 35546 - protein, 978 aa, synthetic construct
  REGION 1..978: note = engineered CasX variant
QEIKRINKIRRRLVKDSNTKKAGKTGPMKTLLVRVMTPDLRERLENLRKKPENIPQPISNTSRANLNKLLTDYTEMKKAILHVYWEEFQKDPVGLMSRVAQPASKKIDQNKLKPEMDEKGNLTTAGFACSQCGQPLFVYKLEQVSEKGKAYTNYFGRCNVAEHEKLILLAQLKPEKDSDEAVTYSLGKFGQRALDFYSIHVTKESTHPVKPLAQIAGNRYASHPVGKALSDACMGTIASFLSKYQDIIIEHQKVVKGNQKRLESLRELAGKENLEYPSVTLPPQPHTSEGLDAYNEVIARVRMWVNLNLWQKLKLSRDDAKPLLRLKGFPSFPLVERQANEVDWWDMVCNVKKLINEKKEDGKVFWQNLAGYKRQEALRPYLSSEEDRKKGKKFARYQLGDLLLHLEKKHGEDWGKVYDEAWERIDKKVEGLSKHIKLEEERRSEDAQSKAALTDWLRAKASFVIEGLKEADKDEFCRCELKLQKWYGDLRGKPFAIEAENSILDISGFSKQYNCAFIWQKDGVKKLNLYLIINYFKGGKLRFKKIKPEAFEANRFYTVINKKSGEIVPMEVNFNFDDPNLIILPLAFGKRQGREFIWNDLLSLETGSLKLANGRVIEKTLYNRRTRQDEPALFVALTFERREVLDSSNIKPMNLIGVDRGENIPAVIALTDPEGCPLSRFKDSLGNPTHILRIGESYKEKQRTIQAKKEVEQRRAGGYSRKYASKAKNLADDMVRNTARDLLYYAVTQDAMLIFENLSRGFGRQGKRTFMAERQYTRMEDWLTAKLAYEGLPSKTYLSKTLAQYTSKTCSNCGFTITSADYDRVLEKLKKTATGWMTTINGKELKVEGQITYYNRYKRQNVVKDLSVELDRLSEESVNNDISSWTKGRSGEALSLLKKRFSHRPVQEKFVCLNCGFETHADEQAALNIARSWLFLRSQEYKKYQTNKTTGNTDKRAFVETWQSFYRKKLKEVWKPAV

SEQ ID NO: 35547 - protein, 978 aa, synthetic construct
  REGION 1..978: note = engineered CasX variant
QEIKRINKIRRRLVKDSNTKKAGKTGPMKTLLVRVMTPDLRERLENLRKKPENIPQPISNTSRANLNKLLTDYTEMKKAILHVYWEEFQKDPVGLMSRVAQPASKKIDQNKLKPEMDEKGNLTTAGFACSQCGQPLFVYKLEQVSEKGKAYTNYFGRCNVAEHEKLILLAQLKPEKDSDEAVTYSLGKFGQRALDFYSIHVTKESTHPVKPLAQIAGNRYASSPVGKALSDACMGTIASFLSKYQDIIIEHQKVVKGNQKRLESLRELAGKENLEYPSVTLPPQPHTSEGLDAYNEVIARVRMWVNLNLWQKLKLSRDDAKPLLRLKGFPSFPLVERQANEVDWWDMVCNVKKLINEKKEDGKVFWQNLAGYKRQEALRPYLSSEEDRKKGKKFARYQLGDLLLHLEKKHGEDWGKVYDEAWERIDKKVEGLSKHIKLEEERRSEDAQSKAALTDWLRAKASFVIEGLKEADKDEFCRCELKLQKWYGDLRGKPFAIEAENSILDISGFSKQYNCAFIWQKDGVKKLNLYLIINYFKGGKLRFKKIKPEAFEANRFYTVINKKSGEIVPMEVNFNFDDPNLIILPLAFGKRQGREFIWNDLLSLETGSLKLANGRVIEKTLYNRRTRQDEPALFVALTFERREVLDSSNIKPMNLIGVDRGENIPAVIALTDPEGCPLSRFKDSLGNPTHILRIGESYKEKQRTIQAKKEVEQRRAGGYSRKYASKAKNLADDMVRNTARDLLYYAVTQDAMLIFENLSRGFGRQGKRTFMAERQYTRMEDWLTAKLAYEGLPSKTYLSKTLAQYTSKTCSNCGFTITSADYDRVLEKLKKTATGWMTTINGKELKVEGQITYYNRYKRQNVVKDLSVELDRLSEESVNNDISSWTKGRSGEALSLLKKRFSHRPVQEKFVCLNCGFETHADEQAALNIARSWLFLRSQEYKKYQTNKTTGNTDKRAFVETWQSFYRKKLKEVWKPAV

SEQ ID NO: 35548 - protein, 978 aa, synthetic construct
  REGION 1..978: note = engineered CasX variant
QEIKRINKIRRRLVKDSNTKKAGKTGPMKTLLVRVMTPDLRERLENLRKKPENIPQPISNTSRANLNKLLTDYTEMKKAILHVYWEEFQKDPVGLMSRVAQPASKKIDQNKLKPEMDEKGNLTTAGFACSQCGQPLFVYKLEQVSEKGKAYTNYFGRCNVAEHEKLILLAQLKPEKDSDEAVTYSLGKFGQRALDFYSIHVTKESTHPVKPLAQIAGNRYASTPVGKALSDACMGTIASFLSKYQDIIIEHQKVVKGNQKRLESLRELAGKENLEYPSVTLPPQPHTSEGLDAYNEVIARVRMWVNLNLWQKLKLSRDDAKPLLRLKGFPSFPLVERQANEVDWWDMVCNVKKLINEKKEDGKVFWQNLAGYKRQEALRPYLSSEEDRKKGKKFARYQLGDLLLHLEKKHGEDWGKVYDEAWERIDKKVEGLSKHIKLEEERRSEDAQSKAALTDWLRAKASFVIEGLKEADKDEFCRCELKLQKWYGDLRGKPFAIEAENSILDISGFSKQYNCAFIWQKDGVKKLNLYLIINYFKGGKLRFKKIKPEAFEANRFYTVINKKSGEIVPMEVNFNFDDPNLIILPLAFGKRQGREFIWNDLLSLETGSLKLANGRVIEKTLYNRRTRQDEPALFVALTFERREVLDSSNIKPMNLIGVDRGENIPAVIALTDPEGCPLSRFKDSLGNPTHILRIGESYKEKQRTIQAKKEVEQRRAGGYSRKYASKAKNLADDMVRNTARDLLYYAVTQDAMLIFENLSRGFGRQGKRTFMAERQYTRMEDWLTAKLAYEGLPSKTYLSKTLAQYTSKTCSNCGFTITSADYDRVLEKLKKTATGWMTTINGKELKVEGQITYYNRYKRQNVVKDLSVELDRLSEESVNNDISSWTKGRSGEALSLLKKRFSHRPVQEKFVCLNCGFETHADEQAALNIARSWLFLRSQEYKKYQTNKTTGNTDKRAFVETWQSFYRKKLKEVWKPAV

SEQ ID NO: 35549 - protein, 978 aa, synthetic construct
  REGION 1..978: note = engineered CasX variant
QEIKRINKIRRRLVKDSNTKKAGKTGPMKTLLVRVMTPDLRERLENLRKKPENIPQPISNTSRANLNKLLTDYTEMKKAILHVYWEEFQKDPVGLMSRVAQPASKKIDQNKLKPEMDEKGNLTTAGFACSQCGQPLFVYKLEQVSEKGKAYTNYFGRCNVAEHEKLILLAQLKPEKDSDEAVTYSLGKFGQRALDFYSIHVTKESTHPVKPLAQIAGNRYASAPVGKALSDACMGTIASFLSKYQDIIIEHQKVVKGNQKRLESLRELAGKENLEYPSVTLPPQPHTSEGLDAYNEVIARVRMWVNLNLWQKLKLSRDDAKPLLRLKGFPSFPLVERQANEVDWWDMVCNVKKLINEKKEDGKVFWQNLAGYKRQEALRPYLSSEEDRKKGKKFARYQLGDLLLHLEKKHGEDWGKVYDEAWERIDKKVEGLSKHIKLEEERRSEDAQSKAALTDWLRAKASFVIEGLKEADKDEFCRCELKLQKWYGDLRGKPFAIEAENSILDISGFSKQYNCAFIWQKDGVKKLNLYLIINYFKGGKLRFKKIKPEAFEANRFYTVINKKSGEIVPMEVNFNFDDPNLIILPLAFGKRQGREFIWNDLLSLETGSLKLANGRVIEKTLYNRRTRQDEPALFVALTFERREVLDSSNIKPMNLIGVDRGENIPAVIALTDPEGCPLSRFKDSLGNPTHILRIGESYKEKQRTIQAKKEVEQRRAGGYSRKYASKAKNLADDMVRNTARDLLYYAVTQDAMLIFENLSRGFGRQGKRTFMAERQYTRMEDWLTAKLAYEGLPSKTYLSKTLAQYTSKTCSNCGFTITSADYDRVLEKLKKTATGWMTTINGKELKVEGQITYYNRYKRQNVVKDLSVELDRLSEESVNNDISSWTKGRSGEALSLLKKRFSHRPVQEKFVCLNCGFETHADEQAALNIARSWLFLRSQEYKKYQTNKTTGNTDKRAFVETWQSFYRKKLKEVWKPAV

SEQ ID NO: 35550 - protein, 978 aa, synthetic construct
  REGION 1..978: note = engineered CasX variant
QEIKRINKIRRRLVKDSNTKKAGKTGPMKTLLVRVMTPDLRERLENLRKKPENIPQPISNTSRANLNKLLTDYTEMKKAILHVYWEEFQKDPVGLMSRVAQPASKKIDQNKLKPEMDEKGNLTTAGFACSQCGQPLFVYKLEQVSEKGKAYTNYFGRCNVAEHEKLILLAQLKPEKDSDEAVTYSLGKFGQRALDFYSIHVTKESTHPVKPLAQIAGNRYASVPVGKALSDACMGTIASFLSKYQDIIIEHQKVVKGNQKRLESLRELAGKENLEYPSVTLPPQPHTSEGLDAYNEVIARVRMWVNLNLWQKLKLSRDDAKPLLRLKGFPSFPLVERQANEVDWWDMVCNVKKLINEKKEDGKVFWQNLAGYKRQEALRPYLSSEEDRKKGKKFARYQLGDLLLHLEKKHGEDWGKVYDEAWERIDKKVEGLSKHIKLEEERRSEDAQSKAALTDWLRAKASFVIEGLKEADKDEFCRCELKLQKWYGDLRGKPFAIEAENSILDISGFSKQYNCAFIWQKDGVKKLNLYLIINYFKGGKLRFKKIKPEAFEANRFYTVINKKSGEIVPMEVNFNFDDPNLIILPLAFGKRQGREFIWNDLLSLETGSLKLANGRVIEKTLYNRRTRQDEPALFVALTFERREVLDSSNIKPMNLIGVDRGENIPAVIALTDPEGCPLSRFKDSLGNPTHILRIGESYKEKQRTIQAKKEVEQRRAGGYSRKYASKAKNLADDMVRNTARDLLYYAVTQDAMLIFENLSRGFGRQGKRTFMAERQYTRMEDWLTAKLAYEGLPSKTYLSKTLAQYTSKTCSNCGFTITSADYDRVLEKLKKTATGWMTTINGKELKVEGQITYYNRYKRQNVVKDLSVELDRLSEESVNNDISSWTKGRSGEALSLLKKRFSHRPVQEKFVCLNCGFETHADEQAALNIARSWLFLRSQEYKKYQTNKTTGNTDKRAFVETWQSFYRKKLKEVWKPAV

SEQ ID NO: 35551 - protein, 978 aa, synthetic construct
  REGION 1..978: note = engineered CasX variant
QEIKRINKIRRRLVKDSNTKKAGKTGPMKTLLVRVMTPDLRERLENLRKKPENIPQPISNTSRANLNKLLTDYTEMKKAILHVYWEEFQKDPVGLMSRVAQPASKKIDQNKLKPEMDEKGNLTTAGFACSQCGQPLFVYKLEQVSEKGKAYTNYFGRCNVAEHEKLIKLAQLKPEKDSDEAVTYSLGKFGQRALDFYSIHVTKESTHPVKPLAQIAGNRYASGPVGKALSDACMGTIASFLSKYQDIIIEHQKVVKGNQKRLESLRELAGKENLEYPSVTLPPQPHTSEGLDAYNEVIARVRMWVNLNLWQKLKLSRDDAKPLLRLKGFPSFPLVERQANEVDWWDMVCNVKKLINEKKEDGKVFWQNLAGYKRQEALRPYLSSEEDRKKGKKFARYQLGDLLLHLEKKHGEDWGKVYDEAWERIDKKVEGLSKHIKLEEERRSEDAQSKAALTDWLRAKASFVIEGLKEADKDEFCRCELKLQKWYGDLRGKPFAIEAENSILDISGFSKQYNCAFIWQKDGVKKLNLYLIINYFKGGKLRFKKIKPEAFEANRFYTVINKKSGEIVPMEVNFNFDDPNLIILPLAFGKRQGREFIWNDLLSLETGSLKLANGRVIEKTLYNRRTRQDEPALFVALTFERREVLDSSNIKPMNLIGVDRGENIPAVIALTDPEGCPLSRFKDSLGNPTHILRIGESYKEKQRTIQAKKEVEQRRAGGYSRKYASKAKNLADDMVRNTARDLLYYAVTQDAMLIFENLSRGFGRQGKRTFMAERQYTRMEDWLTAKLAYEGLPSKTYLSKTLAQYTSKTCSNCGFTITSADYDRVLEKLKKTATGWMTTINGKELKVEGQITYYNRYKRQNVVKDLSVELDRLSEESVNNDISSWTKGRSGEALSLLKKRFSHRPVQEKFVCLNCGFETHADEQAALNIARSWLFLRSQEYKKYQTNKTTGNTDKRAFVETWQSFYRKKLKEVWKPAV

SEQ ID NO: 35552 - protein, 977 aa, synthetic construct
  REGION 1..977: note = engineered CasX variant
QEIKRINKIRRRLVKDSNTKKAGKTGPMKTLLVRVMTPDLRERLENLRKKPENIPQPISNTSRANLNKLLTDYTEMKKAILHVYWEEFQKDPVGLMSRVAQPASKKIDQNKLKPEMDEKGNLTTAGFACSQCGQPLFVYKLEQVSEKGKAYTNYFGRCNVAEHEKLILLAQLKPEKDSDEAVTYSLGKFGQRALDFYSIHVTKESTHPVKPLAQIAGNRYASPVGKALSDACMGTIASFLSKYQDIIIEHQKVVKGNQKRLESLRELAGKENLEYPSVTLPPQPHTSEGLDAYNEVIARVRMWVNLNLWQKLKLSRDDAKPLLRLKGFPSFPLVERQANEVDWWDMVCNVKKLINEKKEDGKVFWQNLAGYKRQEALRPYLSSEEDRKKGKKFARYQLGDLLLHLEKKHGEDWGKVYDEAWERIDKKVEGLSKHIKLEEERRSEDAQSKAALTDWLRAKASFVIEGLKEADKDEFCRCELKLQKWYGDLRGKPFAIEAENSILDISGFSKQYNCAFIWQKDGVKKLNLYLIINYFKGGKLRFKKIKPEAFEANRFYTVINKKSGEIVPMEVNFNFDDPNLIILPLAFGKRQGREFIWNDLLSLETGSLKLANGRVIEKTLYNRRTRQDEPALFVALTFERREVLDSSNIKPMNLIGVDRGENIPAVIALTDPEGCPLSRFKDSLGNPTHILRIGESYKEKQRTIQAKKEVEQRRAGGYSRKYASKAKNLADDMVRNTARDLLYYAVTQDAMLIFENLSRGFGRQGKRTFMAERQYTRMEDWLTAKLAYEGLPSKTYLSKTLAQYTSKTCSNCGFTITSADYDRVLEKLKKTATGWMTTINGKELKVEGQITYYNRYKRQNVVKDLSVELDRLSEESVNNDISSWTKGRSGEALSLLKKRFSHRPVQEKFVCLNCGFETHADEQAALNIARSWLFLRSQEYKKYQTNKTTGNTDKRAFVETWQSFYRKKLKEVWKPAV

SEQ ID NO: 35553 - protein, 978 aa, synthetic construct
  REGION 1..978: note = engineered CasX variant
QEIKRINKIRRRLVKDSNTKKAGKTGPMKTLLVRVMTPDLRERLENLRKKPENIPQPISNTSRANLNKLLTDYTEMKKAILHVYWEEFQKDPVGLMSRVAQPASKKIDQNKLKPEMDEKGNLTTAGFACSQCGQPLFVYKLEQVSEKGKAYTNYFGRCNVAEHEKLILLAQLKPEKDSDEAVTYSLGKFGQRALDFYSIHVTKESTHPVKPLAQIAGNRYASYPVGKALSDACMGTIASFLSKYQDIIIEHQKVVKGNQKRLESLRELAGKENLEYPSVTLPPQPHTSEGVDAYNEVIARVRTWVNLNLWQKLKLSRDDAKPLLRLKGFPSFPLVERQANEVDWWDMVCNVKKLINEKKEDGKVFWQNLAGYKRQEALRPYLSSEEDRKKGKKFARYQLGDLLLHLEKKHGEDWGKVYDEAWERIDKKVEGLSKHIKLEEERRSEDAQSKAALTDWLRAKASFVIEGLKEADKDEFCRCELKLQKWYGDLRGKPFAIEAENSILDISGFSKQYNCAFIWQKDGVKKLNLYLIINYFKGGKLRFKKIKPEAFEANRFYTVINKKSGEIVPMEVNFNFDDPNLIILPLAFGKRQGREFIWNDLLSLETGSLKLANGRVIEKTLYNRRTRQDEPALFVALTFERREVLDSSNIKPMNLIGVDRGENIPAVIALTDPEGCPLSRFKDSLGNPTHILRIGESYKEKQRTIQAKKEVEQRRAGGYSRKYASKAKNLADDMVRNTARDLLYYAVTQDAMLIFENLSRGFGRQGKRTFMAERQYTRMEDWLTAKLAYEGLPSKTYLSKTLAQYTSKTCSNCGFTITSADYDRVLEKLKKTATGWMTTINGKELKVEGQITYYNRYKRQNVVKDLSVELDRLSEESVNNDISSWTKGRSGEALSLLKKRFSHRPVQEKFVCLNCGFETHADEQAALNIARSWLFLRSQEYKKYQTNKTTGNTDKRAFVETWQSFYRKKLKEVWKPAV

SEQ ID NO: 35554 - protein, 978 aa, synthetic construct
  REGION 1..978: note = engineered CasX variant
QEIKRINKIRRRLVKDSNTKKAGKTGPMKTLLVRVMTPDLRERLENLRKKPENIPQPISNTSRANLNKLLTDYTEMKKAILHVYWEEFQKDPVGLMSRVAQPASKKIDQNKLKPEMDEKGNLTTAGFACSQCGQPLFVYKLEQVSEKGKAYTNYFGRCNVAEHEKLILLAQLKPEKDSDEAVTYSLGKFGQRALDFYSIHVTKESTHPVKPLAQIAGNRYASHPVGKALSDACMGTIASFLSKYQDIIIEHQKVVKGNQKRLESLRELAGKENLEYPSVTLPPQPHTSEGVDAYNEVIARVRTWVNLNLWQKLKLSRDDAKPLLRLKGFPSFPLVERQANEVDWWDMVCNVKKLINEKKEDGKVFWQNLAGYKRQEALRPYLSSEEDRKKGKKFARYQLGDLLLHLEKKHGEDWGKVYDEAWERIDKKVEGLSKHIKLEEERRSEDAQSKAALTDWLRAKASFVIEGLKEADKDEFCRCELKLQKWYGDLRGKPFAIEAENSILDISGFSKQYNCAFIWQKDGVKKLNLYLIINYFKGGKLRFKKIKPEAFEANRFYTVINKKSGEIVPMEVNFNFDDPNLIILPLAFGKRQGREFIWNDLLSLETGSLKLANGRVIEKTLYNRRTRQDEPALFVALTFERREVLDSSNIKPMNLIGVDRGENIPAVIALTDPEGCPLSRFKDSLGNPTHILRIGESYKEKQRTIQAKKEVEQRRAGGYSRKYASKAKNLADDMVRNTARDLLYYAVTQDAMLIFENLSRGFGRQGKRTFMAERQYTRMEDWLTAKLAYEGLPSKTYLSKTLAQYTSKTCSNCGFTITSADYDRVLEKLKKTATGWMTTINGKELKVEGQITYYNRYKRQNVVKDLSVELDRLSEESVNNDISSWTKGRSGEALSLLKKRFSHRPVQEKFVCLNCGFETHADEQAALNIARSWLFLRSQEYKKYQTNKTTGNTDKRAFVETWQSFYRKKLKEVWKPAV

SEQ ID NO: 35555 - protein, 978 aa, synthetic construct
  REGION 1..978: note = engineered CasX variant
QEIKRINKIRRRLVKDSNTKKAGKTGPMKTLLVRVMTPDLRERLENLRKKPENIPQPISNTSRANLNKLLTDYTEMKKAILHVYWEEFQKDPVGLMSRVAQPASKKIDQNKLKPEMDEKGNLTTAGFACSQCGQPLFVYKLEQVSEKGKAYTNYFGRCNVAEHEKLILLAQLKPEKDSDEAVTYSLGKFGQRALDFYSIHVTKESTHPVKPLAQIAGNRYASSPVGKALSDACMGTIASFLSKYQDIIIEHQKVVKGNQKRLESLRELAGKENLEYPSVTLPPQPHTSEGVDAYNEVIARVRTWVNLNLWQKLKLSRDDAKPLLRLKGFPSFPLVERQANEVDWWDMVCNVKKLINEKKEDGKVFWQNLAGYKRQEALRPYLSSEEDRKKGKKFARYQLGDLLLHLEKKHGEDWGKVYDEAWERIDKKVEGLSKHIKLEEERRSEDAQSKAALTDWLRAKASFVIEGLKEADKDEFCRCELKLQKWYGDLRGKPFAIEAENSILDISGFSKQYNCAFIWQKDGVKKLNLYLIINYFKGGKLRFKKIKPEAFEANRFYTVINKKSGEIVPMEVNFNFDDPNLIILPLAFGKRQGREFIWNDLLSLETGSLKLANGRVIEKTLYNRRTRQDEPALFVALTFERREVLDSSNIKPMNLIGVDRGENIPAVIALTDPEGCPLSRFKDSLGNPTHILRIGESYKEKQRTIQAKKEVEQRRAGGYSRKYASKAKNLADDMVRNTARDLLYYAVTQDAMLIFENLSRGFGRQGKRTFMAERQYTRMEDWLTAKLAYEGLPSKTYLSKTLAQYTSKTCSNCGFTITSADYDRVLEKLKKTATGWMTTINGKELKVEGQITYYNRYKRQNVVKDLSVELDRLSEESVNNDISSWTKGRSGEALSLLKKRFSHRPVQEKFVCLNCGFETHADEQAALNIARSWLFLRSQEYKKYQTNKTTGNTDKRAFVETWQSFYRKKLKEVWKPAV

SEQ ID NO: 35556 - protein, 978 aa, synthetic construct
  REGION 1..978: note = engineered CasX variant
QEIKRINKIRRRLVKDSNTKKAGKTGPMKTLLVRVMTPDLRERLENLRKKPENIPQPISNTSRANLNKLLTDYTEMKKAILHVYWEEFQKDPVGLMSRVAQPASKKIDQNKLKPEMDEKGNLTTAGFACSQCGQPLFVYKLEQVSEKGKAYTNYFGRCNVAEHEKLILLAQLKPEKDSDEAVTYSLGKFGQRALDFYSIHVTKESTHPVKPLAQIAGNRYASTPVGKALSDACMGTIASFLSKYQDIIIEHQKVVKGNQKRLESLRELAGKENLEYPSVTLPPQPHTSEGVDAYNEVIARVRTWVNLNLWQKLKLSRDDAKPLLRLKGFPSFPLVERQANEVDWWDMVCNVKKLINEKKEDGKVFWQNLAGYKRQEALRPYLSSEEDRKKGKKFARYQLGDLLLHLEKKHGEDWGKVYDEAWERIDKKVEGLSKHIKLEEERRSEDAQSKAALTDWLRAKASFVIEGLKEADKDEFCRCELKLQKWYGDLRGKPFAIEAENSILDISGFSKQYNCAFIWQKDGVKKLNLYLIINYFKGGKLRFKKIKPEAFEANRFYTVINKKSGEIVPMEVNFNFDDPNLIILPLAFGKRQGREFIWNDLLSLETGSLKLANGRVIEKTLYNRRTRQDEPALFVALTFERREVLDSSNIKPMNLIGVDRGENIPAVIALTDPEGCPLSRFKDSLGNPTHILRIGESYKEKQRTIQAKKEVEQRRAGGYSRKYASKAKNLADDMVRNTARDLLYYAVTQDAMLIFENLSRGFGRQGKRTFMAERQYTRMEDWLTAKLAYEGLPSKTYLSKTLAQYTSKTCSNCGFTITSADYDRVLEKLKKTATGWMTTINGKELKVEGQITYYNRYKRQNVVKDLSVELDRLSEESVNNDISSWTKGRSGEALSLLKKRFSHRPVQEKFVCLNCGFETHADEQAALNIARSWLFLRSQEYKKYQTNKTTGNTDKRAFVETWQSFYRKKLKEVWKPAV

SEQ ID NO: 35557 - protein, 978 aa, synthetic construct
  REGION 1..978: note = engineered CasX variant
QEIKRINKIRRRLVKDSNTKKAGKTGPMKTLLVRVMTPDLRERLENLRKKPENIPQPISNTSRANLNKLLTDYTEMKKAILHVYWEEFQKDPVGLMSRVAQPASKKIDQNKLKPEMDEKGNLTTAGFACSQCGQPLFVYKLEQVSEKGKAYTNYFGRCNVAEHEKLILLAQLKPEKDSDEAVTYSLGKFGQRALDFYSIHVTKESTHPVKPLAQIAGNRYASAPVGKALSDACMGTIASFLSKYQDIIIEHQKVVKGNQKRLESLRELAGKENLEYPSVTLPPQPHTSEGVDAYNEVIARVRTWVNLNLWQKLKLSRDDAKPLLRLKGFPSFPLVERQANEVDWWDMVCNVKKLINEKKEDGKVFWQNLAGYKRQEALRPYLSSEEDRKKGKKFARYQLGDLLLHLEKKHGEDWGKVYDEAWERIDKKVEGLSKHIKLEEERRSEDAQSKAALTDWLRAKASFVIEGLKEADKDEFCRCELKLQKWYGDLRGKPFAIEAENSILDISGFSKQYNCAFIWQKDGVKKLNLYLIINYFKGGKLRFKKIKPEAFEANRFYTVINKKSGEIVPMEVNFNFDDPNLIILPLAFGKRQGREFIWNDLLSLETGSLKLANGRVIEKTLYNRRTRQDEPALFVALTFERREVLDSSNIKPMNLIGVDRGENIPAVIALTDPEGCPLSRFKDSLGNPTHILRIGESYKEKQRTIQAKKEVEQRRAGGYSRKYASKAKNLADDMVRNTARDLLYYAVTQDAMLIFENLSRGFGRQGKRTFMAERQYTRMEDWLTAKLAYEGLPSKTYLSKTLAQYTSKTCSNCGFTITSADYDRVLEKLKKTATGWMTTINGKELKVEGQITYYNRYKRQNVVKDLSVELDRLSEESVNNDISSWTKGRSGEALSLLKKRFSHRPVQEKFVCLNCGFETHADEQAALNIARSWLFLRSQEYKKYQTNKTTGNTDKRAFVETWQSFYRKKLKEVWKPAV

SEQ ID NO: 35558 - protein, 978 aa, synthetic construct
  REGION 1..978: note = engineered CasX variant
QEIKRINKIRRRLVKDSNTKKAGKTGPMKTLLVRVMTPDLRERLENLRKKPENIPQPISNTSRANLNKLLTDYTEMKKAILHVYWEEFQKDPVGLMSRVAQPASKKIDQNKLKPEMDEKGNLTTAGFACSQCGQPLFVYKLEQVSEKGKAYTNYFGRCNVAEHEKLILLAQLKPEKDSDEAVTYSLGKFGQRALDFYSIHVTKESTHPVKPLAQIAGNRYASVPVGKALSDACMGTIASFLSKYQDIIIEHQKVVKGNQKRLESLRELAGKENLEYPSVTLPPQPHTSEGVDAYNEVIARVRTWVNLNLWQKLKLSRDDAKPLLRLKGFPSFPLVERQANEVDWWDMVCNVKKLINEKKEDGKVFWQNLAGYKRQEALRPYLSSEEDRKKGKKFARYQLGDLLLHLEKKHGEDWGKVYDEAWERIDKKVEGLSKHIKLEEERRSEDAQSKAALTDWLRAKASFVIEGLKEADKDEFCRCELKLQKWYGDLRGKPFAIEAENSILDISGFSKQYNCAFIWQKDGVKKLNLYLIINYFKGGKLRFKKIKPEAFEANRFYTVINKKSGEIVPMEVNFNFDDPNLIILPLAFGKRQGREFIWNDLLSLETGSLKLANGRVIEKTLYNRRTRQDEPALFVALTFERREVLDSSNIKPMNLIGVDRGENIPAVIALTDPEGCPLSRFKDSLGNPTHILRIGESYKEKQRTIQAKKEVEQRRAGGYSRKYASKAKNLADDMVRNTARDLLYYAVTQDAMLIFENLSRGFGRQGKRTFMAERQYTRMEDWLTAKLAYEGLPSKTYLSKTLAQYTSKTCSNCGFTITSADYDRVLEKLKKTATGWMTTINGKELKVEGQITYYNRYKRQNVVKDLSVELDRLSEESVNNDISSWTKGRSGEALSLLKKRFSHRPVQEKFVCLNCGFETHADEQAALNIARSWLFLRSQEYKKYQTNKTTGNTDKRAFVETWQSFYRKKLKEVWKPAV

SEQ ID NO: 35559 - protein, 978 aa, synthetic construct
  REGION 1..978: note = engineered CasX variant
QEIKRINKIRRRLVKDSNTKKAGKTGPMKTLLVRVMTPDLRERLENLRKKPENIPQPISNTSRANLNKLLTDYTEMKKAILHVYWEEFQKDPVGLMSRVAQPASKKIDQNKLKPEMDEKGNLTTAGFACSQCGQPLFVYKLEQVSEKGKAYTNYFGRCNVAEHEKLIKLAQLKPEKDSDEAVTYSLGKFGQRALDFYSIHVTKESTHPVKPLAQIAGNRYASGPVGKALSDACMGTIASFLSKYQDIIIEHQKVVKGNQKRLESLRELAGKENLEYPSVTLPPQPHTSEGVDAYNEVIARVRTWVNLNLWQKLKLSRDDAKPLLRLKGFPSFPLVERQANEVDWWDMVCNVKKLINEKKEDGKVFWQNLAGYKRQEALRPYLSSEEDRKKGKKFARYQLGDLLLHLEKKHGEDWGKVYDEAWERIDKKVEGLSKHIKLEEERRSEDAQSKAALTDWLRAKASFVIEGLKEADKDEFCRCELKLQKWYGDLRGKPFAIEAENSILDISGFSKQYNCAFIWQKDGVKKLNLYLIINYFKGGKLRFKKIKPEAFEANRFYTVINKKSGEIVPMEVNFNFDDPNLIILPLAFGKRQGREFIWNDLLSLETGSLKLANGRVIEKTLYNRRTRQDEPALFVALTFERREVLDSSNIKPMNLIGVDRGENIPAVIALTDPEGCPLSRFKDSLGNPTHILRIGESYKEKQRTIQAKKEVEQRRAGGYSRKYASKAKNLADDMVRNTARDLLYYAVTQDAMLIFENLSRGFGRQGKRTFMAERQYTRMEDWLTAKLAYEGLPSKTYLSKTLAQYTSKTCSNCGFTITSADYDRVLEKLKKTATGWMTTINGKELKVEGQITYYNRYKRQNVVKDLSVELDRLSEESVNNDISSWTKGRSGEALSLLKKRFSHRPVQEKFVCLNCGFETHADEQAALNIARSWLFLRSQEYKKYQTNKTTGNTDKRAFVETWQSFYRKKLKEVWKPAV

SEQ ID NO: 35560 - protein, 977 aa, synthetic construct
  REGION 1..977: note = engineered CasX variant
QEIKRINKIRRRLVKDSNTKKAGKTGPMKTLLVRVMTPDLRERLENLRKKPENIPQPISNTSRANLNKLLTDYTEMKKAILHVYWEEFQKDPVGLMSRVAQPASKKIDQNKLKPEMDEKGNLTTAGFACSQCGQPLFVYKLEQVSEKGKAYTNYFGRCNVAEHEKLILLAQLKPEKDSDEAVTYSLGKFGQRALDFYSIHVTKESTHPVKPLAQIAGNRYASPVGKALSDACMGTIASFLSKYQDIIIEHQKVVKGNQKRLESLRELAGKENLEYPSVTLPPQPHTSEGVDAYNEVIARVRTWVNLNLWQKLKLSRDDAKPLLRLKGFPSFPLVERQANEVDWWDMVCNVKKLINEKKEDGKVFWQNLAGYKRQEALRPYLSSEEDRKKGKKFARYQLGDLLLHLEKKHGEDWGKVYDEAWERIDKKVEGLSKHIKLEEERRSEDAQSKAALTDWLRAKASFVIEGLKEADKDEFCRCELKLQKWYGDLRGKPFAIEAENSILDISGFSKQYNCAFIWQKDGVKKLNLYLIINYFKGGKLRFKKIKPEAFEANRFYTVINKKSGEIVPMEVNFNFDDPNLIILPLAFGKRQGREFIWNDLLSLETGSLKLANGRVIEKTLYNRRTRQDEPALFVALTFERREVLDSSNIKPMNLIGVDRGENIPAVIALTDPEGCPLSRFKDSLGNPTHILRIGESYKEKQRTIQAKKEVEQRRAGGYSRKYASKAKNLADDMVRNTARDLLYYAVTQDAMLIFENLSRGFGRQGKRTFMAERQYTRMEDWLTAKLAYEGLPSKTYLSKTLAQYTSKTCSNCGFTITSADYDRVLEKLKKTATGWMTTINGKELKVEGQITYYNRYKRQNVVKDLSVELDRLSEESVNNDISSWTKGRSGEALSLLKKRFSHRPVQEKFVCLNCGFETHADEQAALNIARSWLFLRSQEYKKYQTNKTTGNTDKRAFVETWQSFYRKKLKEVWKPAV

SEQ ID NO: 35561 - protein, 978 aa, synthetic construct
  REGION 1..978: note = engineered CasX variant
QEIKRINKIRRRLVKDSNTKKAGKTGPMKTLLVRVMTPDLRERLENLRKKPENIPQPISNTSRANLNKLLTDYTEMKKAILHVYWEEFQKDPVGLMSRVAQPASKKIDQNKLKPEMDEKGNLTTAGFACSQCGQPLFVYKLEQVSEKGKAYTNYFGRCNVAEHEKLILLAQLKPEKDSDEAVTYSLGKFGQRALDFYSIHVTKESTHPVKPLAQIAGNRYASYPVGKALSDACMGTIASFLSKYQDIIIEHQKVVKGNQKRLESLRELAGKENLEYPSVTLPPQPHTSEGVDAYNEVIARVRWWVNLNLWQKLKLSRDDAKPLLRLKGFPSFPLVERQANEVDWWDMVCNVKKLINEKKEDGKVFWQNLAGYKRQEALRPYLSSEEDRKKGKKFARYQLGDLLLHLEKKHGEDWGKVYDEAWERIDKKVEGLSKHIKLEEERRSEDAQSKAALTDWLRAKASFVIEGLKEADKDEFCRCELKLQKWYGDLRGKPFAIEAENSILDISGFSKQYNCAFIWQKDGVKKLNLYLIINYFKGGKLRFKKIKPEAFEANRFYTVINKKSGEIVPMEVNFNFDDPNLIILPLAFGKRQGREFIWNDLLSLETGSLKLANGRVIEKTLYNRRTRQDEPALFVALTFERREVLDSSNIKPMNLIGVDRGENIPAVIALTDPEGCPLSRFKDSLGNPTHILRIGESYKEKQRTIQAKKEVEQRRAGGYSRKYASKAKNLADDMVRNTARDLLYYAVTQDAMLIFENLSRGFGRQGKRTFMAERQYTRMEDWLTAKLAYEGLPSKTYLSKTLAQYTSKTCSNCGFTITSADYDRVLEKLKKTATGWMTTINGKELKVEGQITYYNRYKRQNVVKDLSVELDRLSEESVNNDISSWTKGRSGEALSLLKKRFSHRPVQEKFVCLNCGFETHADEQAALNIARSWLFLRSQEYKKYQTNKTTGNTDKRAFVETWQSFYRKKLKEVWKPAV

SEQ ID NO: 35562 - protein, 978 aa, synthetic construct
  REGION 1..978: note = engineered CasX variant
QEIKRINKIRRRLVKDSNTKKAGKTGPMKTLLVRVMTPDLRERLENLRKKPENIPQPISNTSRANLNKLLTDYTEMKKAILHVYWEEFQKDPVGLMSRVAQPASKKIDQNKLKPEMDEKGNLTTAGFACSQCGQPLFVYKLEQVSEKGKAYTNYFGRCNVAEHEKLILLAQLKPEKDSDEAVTYSLGKFGQRALDFYSIHVTKESTHPVKPLAQIAGNRYASHPVGKALSDACMGTIASFLSKYQDIIIEHQKVVKGNQKRLESLRELAGKENLEYPSVTLPPQPHTSEGVDAYNEVIARVRWWVNLNLWQKLKLSRDDAKPLLRLKGFPSFPLVERQANEVDWWDMVCNVKKLINEKKEDGKVFWQNLAGYKRQEALRPYLSSEEDRKKGKKFARYQLGDLLLHLEKKHGEDWGKVYDEAWERIDKKVEGLSKHIKLEEERRSEDAQSKAALTDWLRAKASFVIEGLKEADKDEFCRCELKLQKWYGDLRGKPFAIEAENSILDISGFSKQYNCAFIWQKDGVKKLNLYLIINYFKGGKLRFKKIKPEAFEANRFYTVINKKSGEIVPMEVNFNFDDPNLIILPLAFGKRQGREFIWNDLLSLETGSLKLANGRVIEKTLYNRRTRQDEPALFVALTFERREVLDSSNIKPMNLIGVDRGENIPAVIALTDPEGCPLSRFKDSLGNPTHILRIGESYKEKQRTIQAKKEVEQRRAGGYSRKYASKAKNLADDMVRNTARDLLYYAVTQDAMLIFENLSRGFGRQGKRTFMAERQYTRMEDWLTAKLAYEGLPSKTYLSKTLAQYTSKTCSNCGFTITSADYDRVLEKLKKTATGWMTTINGKELKVEGQITYYNRYKRQNVVKDLSVELDRLSEESVNNDISSWTKGRSGEALSLLKKRFSHRPVQEKFVCLNCGFETHADEQAALNIARSWLFLRSQEYKKYQTNKTTGNTDKRAFVETWQSFYRKKLKEVWKPAV

SEQ ID NO: 35563 - protein, 978 aa, synthetic construct
  REGION 1..978: note = engineered CasX variant
QEIKRINKIRRRLVKDSNTKKAGKTGPMKTLLVRVMTPDLRERLENLRKKPENIPQPISNTSRANLNKLLTDYTEMKKAILHVYWEEFQKDPVGLMSRVAQPASKKIDQNKLKPEMDEKGNLTTAGFACSQCGQPLFVYKLEQVSEKGKAYTNYFGRCNVAEHEKLILLAQLKPEKDSDEAVTYSLGKFGQRALDFYSIHVTKESTHPVKPLAQIAGNRYASSPVGKALSDACMGTIASFLSKYQDIIIEHQKVVKGNQKRLESLRELAGKENLEYPSVTLPPQPHTSEGVDAYNEVIARVRWWVNLNLWQKLKLSRDDAKPLLRLKGFPSFPLVERQANEVDWWDMVCNVKKLINEKKEDGKVFWQNLAGYKRQEALRPYLSSEEDRKKGKKFARYQLGDLLLHLEKKHGEDWGKVYDEAWERIDKKVEGLSKHIKLEEERRSEDAQSKAALTDWLRAKASFVIEGLKEADKDEFCRCELKLQKWYGDLRGKPFAIEAENSILDISGFSKQYNCAFIWQKDGVKKLNLYLIINYFKGGKLRFKKIKPEAFEANRFYTVINKKSGEIVPMEVNFNFDDPNLIILPLAFGKRQGREFIWNDLLSLETGSLKLANGRVIEKTLYNRRTRQDEPALFVALTFERREVLDSSNIKPMNLIGVDRGENIPAVIALTDPEGCPLSRFKDSLGNPTHILRIGESYKEKQRTIQAKKEVEQRRAGGYSRKYASKAKNLADDMVRNTARDLLYYAVTQDAMLIFENLSRGFGRQGKRTFMAERQYTRMEDWLTAKLAYEGLPSKTYLSKTLAQYTSKTCSNCGFTITSADYDRVLEKLKKTATGWMTTINGKELKVEGQITYYNRYKRQNVVKDLSVELDRLSEESVNNDISSWTKGRSGEALSLLKKRFSHRPVQEKFVCLNCGFETHADEQAALNIARSWLFLRSQEYKKYQTNKTTGNTDKRAFVETWQSFYRKKLKEVWKPAV

SEQ ID NO: 35564 - protein, 978 aa, synthetic construct
  REGION 1..978: note = engineered CasX variant
QEIKRINKIRRRLVKDSNTKKAGKTGPMKTLLVRVMTPDLRERLENLRKKPENIPQPISNTSRANLNKLLTDYTEMKKAILHVYWEEFQKDPVGLMSRVAQPASKKIDQNKLKPEMDEKGNLTTAGFACSQCGQPLFVYKLEQVSEKGKAYTNYFGRCNVAEHEKLILLAQLKPEKDSDEAVTYSLGKFGQRALDFYSIHVTKESTHPVKPLAQIAGNRYASTPVGKALSDACMGTIASFLSKYQDIIIEHQKVVKGNQKRLESLRELAGKENLEYPSVTLPPQPHTSEGVDAYNEVIARVRWWVNLNLWQKLKLSRDDAKPLLRLKGFPSFPLVERQANEVDWWDMVCNVKKLINEKKEDGKVFWQNLAGYKRQEALRPYLSSEEDRKKGKKFARYQLGDLLLHLEKKHGEDWGKVYDEAWERIDKKVEGLSKHIKLEEERRSEDAQSKAALTDWLRAKASFVIEGLKEADKDEFCRCELKLQKWYGDLRGKPFAIEAENSILDISGFSKQYNCAFIWQKDGVKKLNLYLIINYFKGGKLRFKKIKPEAFEANRFYTVINKKSGEIVPMEVNFNFDDPNLIILPLAFGKRQGREFIWNDLLSLETGSLKLANGRVIEKTLYNRRTRQDEPALFVALTFERREVLDSSNIKPMNLIGVDRGENIPAVIALTDPEGCPLSRFKDSLGNPTHILRIGESYKEKQRTIQAKKEVEQRRAGGYSRKYASKAKNLADDMVRNTARDLLYYAVTQDAMLIFENLSRGFGRQGKRTFMAERQYTRMEDWLTAKLAYEGLPSKTYLSKTLAQYTSKTCSNCGFTITSADYDRVLEKLKKTATGWMTTINGKELKVEGQITYYNRYKRQNVVKDLSVELDRLSEESVNNDISSWTKGRSGEALSLLKKRFSHRPVQEKFVCLNCGFETHADEQAALNIARSWLFLRSQEYKKYQTNKTTGNTDKRAFVETWQSFYRKKLKEVWKPAV

SEQ ID NO: 35565 - protein, 978 aa, synthetic construct
  REGION 1..978: note = engineered CasX variant
QEIKRINKIRRRLVKDSNTKKAGKTGPMKTLLVRVMTPDLRERLENLRKKPENIPQPISNTSRANLNKLLTDYTEMKKAILHVYWEEFQKDPVGLMSRVAQPASKKIDQNKLKPEMDEKGNLTTAGFACSQCGQPLFVYKLEQVSEKGKAYTNYFGRCNVAEHEKLILLAQLKPEKDSDEAVTYSLGKFGQRALDFYSIHVTKESTHPVKPLAQIAGNRYASAPVGKALSDACMGTIASFLSKYQDIIIEHQKVVKGNQKRLESLRELAGKENLEYPSVTLPPQPHTSEGVDAYNEVIARVRWWVNLNLWQKLKLSRDDAKPLLRLKGFPSFPLVERQANEVDWWDMVCNVKKLINEKKEDGKVFWQNLAGYKRQEALRPYLSSEEDRKKGKKFARYQLGDLLLHLEKKHGEDWGKVYDEAWERIDKKVEGLSKHIKLEEERRSEDAQSKAALTDWLRAKASFVIEGLKEADKDEFCRCELKLQKWYGDLRGKPFAIEAENSILDISGFSKQYNCAFIWQKDGVKKLNLYLIINYFKGGKLRFKKIKPEAFEANRFYTVINKKSGEIVPMEVNFNFDDPNLIILPLAFGKRQGREFIWNDLLSLETGSLKLANGRVIEKTLYNRRTRQDEPALFVALTFERREVLDSSNIKPMNLIGVDRGENIPAVIALTDPEGCPLSRFKDSLGNPTHILRIGESYKEKQRTIQAKKEVEQRRAGGYSRKYASKAKNLADDMVRNTARDLLYYAVTQDAMLIFENLSRGFGRQGKRTFMAERQYTRMEDWLTAKLAYEGLPSKTYLSKTLAQYTSKTCSNCGFTITSADYDRVLEKLKKTATGWMTTINGKELKVEGQITYYNRYKRQNVVKDLSVELDRLSEESVNNDISSWTKGRSGEALSLLKKRFSHRPVQEKFVCLNCGFETHADEQAALNIARSWLFLRSQEYKKYQTNKTTGNTDKRAFVETWQSFYRKKLKEVWKPAV

SEQ ID NO: 35566 - protein, 978 aa, synthetic construct
  REGION 1..978: note = engineered CasX variant
QEIKRINKIRRRLVKDSNTKKAGKTGPMKTLLVRVMTPDLRERLENLRKKPENIPQPISNTSRANLNKLLTDYTEMKKAILHVYWEEFQKDPVGLMSRVAQPASKKIDQNKLKPEMDEKGNLTTAGFACSQCGQPLFVYKLEQVSEKGKAYTNYFGRCNVAEHEKLILLAQLKPEKDSDEAVTYSLGKFGQRALDFYSIHVTKESTHPVKPLAQIAGNRYASVPVGKALSDACMGTIASFLSKYQDIIIEHQKVVKGNQKRLESLRELAGKENLEYPSVTLPPQPHTSEGVDAYNEVIARVRWWVNLNLWQKLKLSRDDAKPLLRLKGFPSFPLVERQANEVDWWDMVCNVKKLINEKKEDGKVFWQNLAGYKRQEALRPYLSSEEDRKKGKKFARYQLGDLLLHLEKKHGEDWGKVYDEAWERIDKKVEGLSKHIKLEEERRSEDAQSKAALTDWLRAKASFVIEGLKEADKDEFCRCELKLQKWYGDLRGKPFAIEAENSILDISGFSKQYNCAFIWQKDGVKKLNLYLIINYFKGGKLRFKKIKPEAFEANRFYTVINKKSGEIVPMEVNFNFDDPNLIILPLAFGKRQGREFIWNDLLSLETGSLKLANGRVIEKTLYNRRTRQDEPALFVALTFERREVLDSSNIKPMNLIGVDRGENIPAVIALTDPEGCPLSRFKDSLGNPTHILRIGESYKEKQRTIQAKKEVEQRRAGGYSRKYASKAKNLADDMVRNTARDLLYYAVTQDAMLIFENLSRGFGRQGKRTFMAERQYTRMEDWLTAKLAYEGLPSKTYLSKTLAQYTSKTCSNCGFTITSADYDRVLEKLKKTATGWMTTINGKELKVEGQITYYNRYKRQNVVKDLSVELDRLSEESVNNDISSWTKGRSGEALSLLKKRFSHRPVQEKFVCLNCGFETHADEQAALNIARSWLFLRSQEYKKYQTNKTTGNTDKRAFVETWQSFYRKKLKEVWKPAV

SEQ ID NO: 35567 - protein, 978 aa, synthetic construct
  REGION 1..978: note = engineered CasX variant
QEIKRINKIRRRLVKDSNTKKAGKTGPMKTLLVRVMTPDLRERLENLRKKPENIPQPISNTSRANLNKLLTDYTEMKKAILHVYWEEFQKDPVGLMSRVAQPASKKIDQNKLKPEMDEKGNLTTAGFACSQCGQPLFVYKLEQVSEKGKAYTNYFGRCNVAEHEKLIKLAQLKPEKDSDEAVTYSLGKFGQRALDFYSIHVTKESTHPVKPLAQIAGNRYASGPVGKALSDACMGTIASFLSKYQDIIIEHQKVVKGNQKRLESLRELAGKENLEYPSVTLPPQPHTSEGVDAYNEVIARVRWWVNLNLWQKLKLSRDDAKPLLRLKGFPSFPLVERQANEVDWWDMVCNVKKLINEKKEDGKVFWQNLAGYKRQEALRPYLSSEEDRKKGKKFARYQLGDLLLHLEKKHGEDWGKVYDEAWERIDKKVEGLSKHIKLEEERRSEDAQSKAALTDWLRAKASFVIEGLKEADKDEFCRCELKLQKWYGDLRGKPFAIEAENSILDISGFSKQYNCAFIWQKDGVKKLNLYLIINYFKGGKLRFKKIKPEAFEANRFYTVINKKSGEIVPMEVNFNFDDPNLIILPLAFGKRQGREFIWNDLLSLETGSLKLANGRVIEKTLYNRRTRQDEPALFVALTFERREVLDSSNIKPMNLIGVDRGENIPAVIALTDPEGCPLSRFKDSLGNPTHILRIGESYKEKQRTIQAKKEVEQRRAGGYSRKYASKAKNLADDMVRNTARDLLYYAVTQDAMLIFENLSRGFGRQGKRTFMAERQYTRMEDWLTAKLAYEGLPSKTYLSKTLAQYTSKTCSNCGFTITSADYDRVLEKLKKTATGWMTTINGKELKVEGQITYYNRYKRQNVVKDLSVELDRLSEESVNNDISSWTKGRSGEALSLLKKRFSHRPVQEKFVCLNCGFETHADEQAALNIARSWLFLRSQEYKKYQTNKTTGNTDKRAFVETWQSFYRKKLKEVWKPAV

SEQ ID NO: 35568 - protein, 977 aa, synthetic construct
  REGION 1..977: note = engineered CasX variant
QEIKRINKIRRRLVKDSNTKKAGKTGPMKTLLVRVMTPDLRERLENLRKKPENIPQPISNTSRANLNKLLTDYTEMKKAILHVYWEEFQKDPVGLMSRVAQPASKKIDQNKLKPEMDEKGNLTTAGFACSQCGQPLFVYKLEQVSEKGKAYTNYFGRCNVAEHEKLILLAQLKPEKDSDEAVTYSLGKFGQRALDFYSIHVTKESTHPVKPLAQIAGNRYASPVGKALSDACMGTIASFLSKYQDIIIEHQKVVKGNQKRLESLRELAGKENLEYPSVTLPPQPHTSEGVDAYNEVIARVRWWVNLNLWQKLKLSRDDAKPLLRLKGFPSFPLVERQANEVDWWDMVCNVKKLINEKKEDGKVFWQNLAGYKRQEALRPYLSSEEDRKKGKKFARYQLGDLLLHLEKKHGEDWGKVYDEAWERIDKKVEGLSKHIKLEEERRSEDAQSKAALTDWLRAKASFVIEGLKEADKDEFCRCELKLQKWYGDLRGKPFAIEAENSILDISGFSKQYNCAFIWQKDGVKKLNLYLIINYFKGGKLRFKKIKPEAFEANRFYTVINKKSGEIVPMEVNFNFDDPNLIILPLAFGKRQGREFIWNDLLSLETGSLKLANGRVIEKTLYNRRTRQDEPALFVALTFERREVLDSSNIKPMNLIGVDRGENIPAVIALTDPEGCPLSRFKDSLGNPTHILRIGESYKEKQRTIQAKKEVEQRRAGGYSRKYASKAKNLADDMVRNTARDLLYYAVTQDAMLIFENLSRGFGRQGKRTFMAERQYTRMEDWLTAKLAYEGLPSKTYLSKTLAQYTSKTCSNCGFTITSADYDRVLEKLKKTATGWMTTINGKELKVEGQITYYNRYKRQNVVKDLSVELDRLSEESVNNDISSWTKGRSGEALSLLKKRFSHRPVQEKFVCLNCGFETHADEQAALNIARSWLFLRSQEYKKYQTNKTTGNTDKRAFVETWQSFYRKKLKEVWKPAV

SEQ ID NO: 35569 - protein, 979 aa, synthetic construct
  REGION 1..979: note = engineered CasX variant
QEIKRINKIRRRLVKDSNTKKAGKTGPMKTLLVRVMTPDLRERLENLRKKPENIPQPISNTSRANLNKLLTDYTEMKKAILHVYWEEFQKDPVGLMSRVAQPASKKIDQNKLKPEMDEKGNLTTAGFACSQCGQPLFVYKLEQVSEKGKAYTNYFGRCNVAEHEKLILLAQLKPEKDSDEAVTYSLGKFGQRALDFYSIHVTKESTHPVKPLAQIAGNRYASYPVGKALSDACMGTIASFLSKYQDIIIEHQKVVKGNQKRLESLRELAGKENLEYPSVTLPPQPHTSEGVDAYNEVIARVRMWVNLNLWQKLKLSRDDAKPLLRLKGFPSFPLVERQQANEVDWWDMVCNVKKLINEKKEDGKVFWQNLAGYKRQEALRPYLSSEEDRKKGKKFARYQLGDLLLHLEKKHGEDWGKVYDEAWERIDKKVEGLSKHIKLEEERRSEDAQSKAALTDWLRAKASFVIEGLKEADKDEFCRCELKLQKWYGDLRGKPFAIEAENSILDISGFSKQYNCAFIWQKDGVKKLNLYLIINYFKGGKLRFKKIKPEAFEANRFYTVINKKSGEIVPMEVNFNFDDPNLIILPLAFGKRQGREFIWNDLLSLETGSLKLANGRVIEKTLYNRRTRQDEPALFVALTFERREVLDSSNIKPMNLIGVDRGENIPAVIALTDPEGCPLSRFKDSLGNPTHILRIGESYKEKQRTIQAKKEVEQRRAGGYSRKYASKAKNLADDMVRNTARDLLYYAVTQDAMLIFENLSRGFGRQGKRTFMAERQYTRMEDWLTAKLAYEGLPSKTYLSKTLAQYTSKTCSNCGFTITSADYDRVLEKLKKTATGWMTTINGKELKVEGQITYYNRYKRQNVVKDLSVELDRLSEESVNNDISSWTKGRSGEALSLLKKRFSHRPVQEKFVCLNCGFETHADEQAALNIARSWLFLRSQEYKKYQTNKTTGNTDKRAFVETWQSFYRKKLKEVWKPAV

SEQ ID NO: 35570 - protein, 979 aa, synthetic construct
  REGION 1..979: note = engineered CasX variant
QEIKRINKIRRRLVKDSNTKKAGKTGPMKTLLVRVMTPDLRERLENLRKKPENIPQPISNTSRANLNKLLTDYTEMKKAILHVYWEEFQKDPVGLMSRVAQPASKKIDQNKLKPEMDEKGNLTTAGFACSQCGQPLFVYKLEQVSEKGKAYTNYFGRCNVAEHEKLILLAQLKPEKDSDEAVTYSLGKFGQRALDFYSIHVTKESTHPVKPLAQIAGNRYASHPVGKALSDACMGTIASFLSKYQDIIIEHQKVVKGNQKRLESLRELAGKENLEYPSVTLPPQPHTSEGVDAYNEVIARVRMWVNLNLWQKLKLSRDDAKPLLRLKGFPSFPLVERQQANEVDWWDMVCNVKKLINEKKEDGKVFWQNLAGYKRQEALRPYLSSEEDRKKGKKFARYQLGDLLLHLEKKHGEDWGKVYDEAWERIDKKVEGLSKHIKLEEERRSEDAQSKAALTDWLRAKASFVIEGLKEADKDEFCRCELKLQKWYGDLRGKPFAIEAENSILDISGFSKQYNCAFIWQKDGVKKLNLYLIINYFKGGKLRFKKIKPEAFEANRFYTVINKKSGEIVPMEVNFNFDDPNLIILPLAFGKRQGREFIWNDLLSLETGSLKLANGRVIEKTLYNRRTRQDEPALFVALTFERREVLDSSNIKPMNLIGVDRGENIPAVIALTDPEGCPLSRFKDSLGNPTHILRIGESYKEKQRTIQAKKEVEQRRAGGYSRKYASKAKNLADDMVRNTARDLLYYAVTQDAMLIFENLSRGFGRQGKRTFMAERQYTRMEDWLTAKLAYEGLPSKTYLSKTLAQYTSKTCSNCGFTITSADYDRVLEKLKKTATGWMTTINGKELKVEGQITYYNRYKRQNVVKDLSVELDRLSEESVNNDISSWTKGRSGEALSLLKKRFSHRPVQEKFVCLNCGFETHADEQAALNIARSWLFLRSQEYKKYQTNKTTGNTDKRAFVETWQSFYRKKLKEVWKPAV

SEQ ID NO: 35571 - protein, 979 aa, synthetic construct
  REGION 1..979: note = engineered CasX variant
QEIKRINKIRRRLVKDSNTKKAGKTGPMKTLLVRVMTPDLRERLENLRKKPENIPQPISNTSRANLNKLLTDYTEMKKAILHVYWEEFQKDPVGLMSRVAQPASKKIDQNKLKPEMDEKGNLTTAGFACSQCGQPLFVYKLEQVSEKGKAYTNYFGRCNVAEHEKLILLAQLKPEKDSDEAVTYSLGKFGQRALDFYSIHVTKESTHPVKPLAQIAGNRYASSPVGKALSDACMGTIASFLSKYQDIIIEHQKVVKGNQKRLESLRELAGKENLEYPSVTLPPQPHTSEGVDAYNEVIARVRMWVNLNLWQKLKLSRDDAKPLLRLKGFPSFPLVERQQANEVDWWDMVCNVKKLINEKKEDGKVFWQNLAGYKRQEALRPYLSSEEDRKKGKKFARYQLGDLLLHLEKKHGEDWGKVYDEAWERIDKKVEGLSKHIKLEEERRSEDAQSKAALTDWLRAKASFVIEGLKEADKDEFCRCELKLQKWYGDLRGKPFAIEAENSILDISGFSKQYNCAFIWQKDGVKKLNLYLIINYFKGGKLRFKKIKPEAFEANRFYTVINKKSGEIVPMEVNFNFDDPNLIILPLAFGKRQGREFIWNDLLSLETGSLKLANGRVIEKTLYNRRTRQDEPALFVALTFERREVLDSSNIKPMNLIGVDRGENIPAVIALTDPEGCPLSRFKDSLGNPTHILRIGESYKEKQRTIQAKKEVEQRRAGGYSRKYASKAKNLADDMVRNTARDLLYYAVTQDAMLIFENLSRGFGRQGKRTFMAERQYTRMEDWLTAKLAYEGLPSKTYLSKTLAQYTSKTCSNCGFTITSADYDRVLEKLKKTATGWMTTINGKELKVEGQITYYNRYKRQNVVKDLSVELDRLSEESVNNDISSWTKGRSGEALSLLKKRFSHRPVQEKFVCLNCGFETHADEQAALNIARSWLFLRSQEYKKYQTNKTTGNTDKRAFVETWQSFYRKKLKEVWKPAV

SEQ ID NO: 35572 - protein, 979 aa, synthetic construct
  REGION 1..979: note = engineered CasX variant
QEIKRINKIRRRLVKDSNTKKAGKTGPMKTLLVRVMTPDLRERLENLRKKPENIPQPISNTSRANLNKLLTDYTEMKKAILHVYWEEFQKDPVGLMSRVAQPASKKIDQNKLKPEMDEKGNLTTAGFACSQCGQPLFVYKLEQVSEKGKAYTNYFGRCNVAEHEKLILLAQLKPEKDSDEAVTYSLGKFGQRALDFYSIHVTKESTHPVKPLAQIAGNRYASTPVGKALSDACMGTIASFLSKYQDIIIEHQKVVKGNQKRLESLRELAGKENLEYPSVTLPPQPHTSEGVDAYNEVIARVRMWVNLNLWQKLKLSRDDAKPLLRLKGFPSFPLVERQQANEVDWWDMVCNVKKLINEKKEDGKVFWQNLAGYKRQEALRPYLSSEEDRKKGKKFARYQLGDLLLHLEKKHGEDWGKVYDEAWERIDKKVEGLSKHIKLEEERRSEDAQSKAALTDWLRAKASFVIEGLKEADKDEFCRCELKLQKWYGDLRGKPFAIEAENSILDISGFSKQYNCAFIWQKDGVKKLNLYLIINYFKGGKLRFKKIKPEAFEANRFYTVINKKSGEIVPMEVNFNFDDPNLIILPLAFGKRQGREFIWNDLLSLETGSLKLANGRVIEKTLYNRRTRQDEPALFVALTFERREVLDSSNIKPMNLIGVDRGENIPAVIALTDPEGCPLSRFKDSLGNPTHILRIGESYKEKQRTIQAKKEVEQRRAGGYSRKYASKAKNLADDMVRNTARDLLYYAVTQDAMLIFENLSRGFGRQGKRTFMAERQYTRMEDWLTAKLAYEGLPSKTYLSKTLAQYTSKTCSNCGFTITSADYDRVLEKLKKTATGWMTTINGKELKVEGQITYYNRYKRQNVVKDLSVELDRLSEESVNNDISSWTKGRSGEALSLLKKRFSHRPVQEKFVCLNCGFETHADEQAALNIARSWLFLRSQEYKKYQTNKTTGNTDKRAFVETWQSFYRKKLKEVWKPAV

SEQ ID NO: 35573 - protein, 979 aa, synthetic construct
  REGION 1..979: note = engineered CasX variant
QEIKRINKIRRRLVKDSNTKKAGKTGPMKTLLVRVMTPDLRERLENLRKKPENIPQPISNTSRANLNKLLTDYTEMKKAILHVYWEEFQKDPVGLMSRVAQPASKKIDQNKLKPEMDEKGNLTTAGFACSQCGQPLFVYKLEQVSEKGKAYTNYFGRCNVAEHEKLILLAQLKPEKDSDEAVTYSLGKFGQRALDFYSIHVTKESTHPVKPLAQIAGNRYASAPVGKALSDACMGTIASFLSKYQDIIIEHQKVVKGNQKRLESLRELAGKENLEYPSVTLPPQPHTSEGVDAYNEVIARVRMWVNLNLWQKLKLSRDDAKPLLRLKGFPSFPLVERQQANEVDWWDMVCNVKKLINEKKEDGKVFWQNLAGYKRQEALRPYLSSEEDRKKGKKFARYQLGDLLLHLEKKHGEDWGKVYDEAWERIDKKVEGLSKHIKLEEERRSEDAQSKAALTDWLRAKASFVIEGLKEADKDEFCRCELKLQKWYGDLRGKPFAIEAENSILDISGFSKQYNCAFIWQKDGVKKLNLYLIINYFKGGKLRFKKIKPEAFEANRFYTVINKKSGEIVPMEVNFNFDDPNLIILPLAFGKRQGREFIWNDLLSLETGSLKLANGRVIEKTLYNRRTRQDEPALFVALTFERREVLDSSNIKPMNLIGVDRGENIPAVIALTDPEGCPLSRFKDSLGNPTHILRIGESYKEKQRTIQAKKEVEQRRAGGYSRKYASKAKNLADDMVRNTARDLLYYAVTQDAMLIFENLSRGFGRQGKRTFMAERQYTRMEDWLTAKLAYEGLPSKTYLSKTLAQYTSKTCSNCGFTITSADYDRVLEKLKKTATGWMTTINGKELKVEGQITYYNRYKRQNVVKDLSVELDRLSEESVNNDISSWTKGRSGEALSLLKKRFSHRPVQEKFVCLNCGFETHADEQAALNIARSWLFLRSQEYKKYQTNKTTGNTDKRAFVETWQSFYRKKLKEVWKPAV

SEQ ID NO: 35574 - protein, 979 aa, synthetic construct
  REGION 1..979: note = engineered CasX variant
QEIKRINKIRRRLVKDSNTKKAGKTGPMKTLLVRVMTPDLRERLENLRKKPENIPQPISNTSRANLNKLLTDYTEMKKAILHVYWEEFQKDPVGLMSRVAQPASKKIDQNKLKPEMDEKGNLTTAGFACSQCGQPLFVYKLEQVSEKGKAYTNYFGRCNVAEHEKLILLAQLKPEKDSDEAVTYSLGKFGQRALDFYSIHVTKESTHPVKPLAQIAGNRYASVPVGKALSDACMGTIASFLSKYQDIIIEHQKVVKGNQKRLESLRELAGKENLEYPSVTLPPQPHTSEGVDAYNEVIARVRMWVNLNLWQKLKLSRDDAKPLLRLKGFPSFPLVERQQANEVDWWDMVCNVKKLINEKKEDGKVFWQNLAGYKRQEALRPYLSSEEDRKKGKKFARYQLGDLLLHLEKKHGEDWGKVYDEAWERIDKKVEGLSKHIKLEEERRSEDAQSKAALTDWLRAKASFVIEGLKEADKDEFCRCELKLQKWYGDLRGKPFAIEAENSILDISGFSKQYNCAFIWQKDGVKKLNLYLIINYFKGGKLRFKKIKPEAFEANRFYTVINKKSGEIVPMEVNFNFDDPNLIILPLAFGKRQGREFIWNDLLSLETGSLKLANGRVIEKTLYNRRTRQDEPALFVALTFERREVLDSSNIKPMNLIGVDRGENIPAVIALTDPEGCPLSRFKDSLGNPTHILRIGESYKEKQRTIQAKKEVEQRRAGGYSRKYASKAKNLADDMVRNTARDLLYYAVTQDAMLIFENLSRGFGRQGKRTFMAERQYTRMEDWLTAKLAYEGLPSKTYLSKTLAQYTSKTCSNCGFTITSADYDRVLEKLKKTATGWMTTINGKELKVEGQITYYNRYKRQNVVKDLSVELDRLSEESVNNDISSWTKGRSGEALSLLKKRFSHRPVQEKFVCLNCGFETHADEQAALNIARSWLFLRSQEYKKYQTNKTTGNTDKRAFVETWQSFYRKKLKEVWKPAV

SEQ ID NO: 35575 - protein, 979 aa, synthetic construct
  REGION 1..979: note = engineered CasX variant
QEIKRINKIRRRLVKDSNTKKAGKTGPMKTLLVRVMTPDLRERLENLRKKPENIPQPISNTSRANLNKLLTDYTEMKKAILHVYWEEFQKDPVGLMSRVAQPASKKIDQNKLKPEMDEKGNLTTAGFACSQCGQPLFVYKLEQVSEKGKAYTNYFGRCNVAEHEKLIKLAQLKPEKDSDEAVTYSLGKFGQRALDFYSIHVTKESTHPVKPLAQIAGNRYASGPVGKALSDACMGTIASFLSKYQDIIIEHQKVVKGNQKRLESLRELAGKENLEYPSVTLPPQPHTSEGVDAYNEVIARVRMWVNLNLWQKLKLSRDDAKPLLRLKGFPSFPLVERQQANEVDWWDMVCNVKKLINEKKEDGKVFWQNLAGYKRQEALRPYLSSEEDRKKGKKFARYQLGDLLLHLEKKHGEDWGKVYDEAWERIDKKVEGLSKHIKLEEERRSEDAQSKAALTDWLRAKASFVIEGLKEADKDEFCRCELKLQKWYGDLRGKPFAIEAENSILDISGFSKQYNCAFIWQKDGVKKLNLYLIINYFKGGKLRFKKIKPEAFEANRFYTVINKKSGEIVPMEVNFNFDDPNLIILPLAFGKRQGREFIWNDLLSLETGSLKLANGRVIEKTLYNRRTRQDEPALFVALTFERREVLDSSNIKPMNLIGVDRGENIPAVIALTDPEGCPLSRFKDSLGNPTHILRIGESYKEKQRTIQAKKEVEQRRAGGYSRKYASKAKNLADDMVRNTARDLLYYAVTQDAMLIFENLSRGFGRQGKRTFMAERQYTRMEDWLTAKLAYEGLPSKTYLSKTLAQYTSKTCSNCGFTITSADYDRVLEKLKKTATGWMTTINGKELKVEGQITYYNRYKRQNVVKDLSVELDRLSEESVNNDISSWTKGRSGEALSLLKKRFSHRPVQEKFVCLNCGFETHADEQAALNIARSWLFLRSQEYKKYQTNKTTGNTDKRAFVETWQSFYRKKLKEVWKPAV

SEQ ID NO: 35576 - protein, 978 aa, synthetic construct
  REGION 1..978: note = engineered CasX variant
QEIKRINKIRRRLVKDSNTKKAGKTGPMKTLLVRVMTPDLRERLENLRKKPENIPQPISNTSRANLNKLLTDYTEMKKAILHVYWEEFQKDPVGLMSRVAQPASKKIDQNKLKPEMDEKGNLTTAGFACSQCGQPLFVYKLEQVSEKGKAYTNYFGRCNVAEHEKLILLAQLKPEKDSDEAVTYSLGKFGQRALDFYSIHVTKESTHPVKPLAQIAGNRYASPVGKALSDACMGTIASFLSKYQDIIIEHQKVVKGNQKRLESLRELAGKENLEYPSVTLPPQPHTSEGVDAYNEVIARVRMWVNLNLWQKLKLSRDDAKPLLRLKGFPSFPLVERQQANEVDWWDMVCNVKKLINEKKEDGKVFWQNLAGYKRQEALRPYLSSEEDRKKGKKFARYQLGDLLLHLEKKHGEDWGKVYDEAWERIDKKVEGLSKHIKLEEERRSEDAQSKAALTDWLRAKASFVIEGLKEADKDEFCRCELKLQKWYGDLRGKPFAIEAENSILDISGFSKQYNCAFIWQKDGVKKLNLYLIINYFKGGKLRFKKIKPEAFEANRFYTVINKKSGEIVPMEVNFNFDDPNLIILPLAFGKRQGREFIWNDLLSLETGSLKLANGRVIEKTLYNRRTRQDEPALFVALTFERREVLDSSNIKPMNLIGVDRGENIPAVIALTDPEGCPLSRFKDSLGNPTHILRIGESYKEKQRTIQAKKEVEQRRAGGYSRKYASKAKNLADDMVRNTARDLLYYAVTQDAMLIFENLSRGFGRQGKRTFMAERQYTRMEDWLTAKLAYEGLPSKTYLSKTLAQYTSKTCSNCGFTITSADYDRVLEKLKKTATGWMTTINGKELKVEGQITYYNRYKRQNVVKDLSVELDRLSEESVNNDISSWTKGRSGEALSLLKKRFSHRPVQEKFVCLNCGFETHADEQAALNIARSWLFLRSQEYKKYQTNKTTGNTDKRAFVETWQSFYRKKLKEVWKPAV

SEQ ID NO: 35577 - protein, 979 aa, synthetic construct
  REGION 1..979: note = engineered CasX variant
QEIKRINKIRRRLVKDSNTKKAGKTGPMKTLLVRVMTPDLRERLENLRKKPENIPQPISNTSRANLNKLLTDYTEMKKAILHVYWEEFQKDPVGLMSRVAQPASKKIDQNKLKPEMDEKGNLTTAGFACSQCGQPLFVYKLEQVSEKGKAYTNYFGRCNVAEHEKLILLAQLKPEKDSDEAVTYSLGKFGQRALDFYSIHVTKESTHPVKPLAQIAGNRYASYPVGKALSDACMGTIASFLSKYQDIIIEHQKVVKGNQKRLESLRELAGKENLEYPSVTLPPQPHTSEGVDAYNEVIARVRMWVNLNLWQKLKLSRDDAKPLLRLKGFPSFPLVERQANAEVDWWDMVCNVKKLINEKKEDGKVFWQNLAGYKRQEALRPYLSSEEDRKKGKKFARYQLGDLLLHLEKKHGEDWGKVYDEAWERIDKKVEGLSKHIKLEEERRSEDAQSKAALTDWLRAKASFVIEGLKEADKDEFCRCELKLQKWYGDLRGKPFAIEAENSILDISGFSKQYNCAFIWQKDGVKKLNLYLIINYFKGGKLRFKKIKPEAFEANRFYTVINKKSGEIVPMEVNFNFDDPNLIILPLAFGKRQGREFIWNDLLSLETGSLKLANGRVIEKTLYNRRTRQDEPALFVALTFERREVLDSSNIKPMNLIGVDRGENIPAVIALTDPEGCPLSRFKDSLGNPTHILRIGESYKEKQRTIQAKKEVEQRRAGGYSRKYASKAKNLADDMVRNTARDLLYYAVTQDAMLIFENLSRGFGRQGKRTFMAERQYTRMEDWLTAKLAYEGLPSKTYLSKTLAQYTSKTCSNCGFTITSADYDRVLEKLKKTATGWMTTINGKELKVEGQITYYNRYKRQNVVKDLSVELDRLSEESVNNDISSWTKGRSGEALSLLKKRFSHRPVQEKFVCLNCGFETHADEQAALNIARSWLFLRSQEYKKYQTNKTTGNTDKRAFVETWQSFYRKKLKEVWKPAV

SEQ ID NO: 35578 - protein, 979 aa, synthetic construct
  REGION 1..979: note = engineered CasX variant
QEIKRINKIRRRLVKDSNTKKAGKTGPMKTLLVRVMTPDLRERLENLRKKPENIPQPISNTSRANLNKLLTDYTEMKKAILHVYWEEFQKDPVGLMSRVAQPASKKIDQNKLKPEMDEKGNLTTAGFACSQCGQPLFVYKLEQVSEKGKAYTNYFGRCNVAEHEKLILLAQLKPEKDSDEAVTYSLGKFGQRALDFYSIHVTKESTHPVKPLAQIAGNRYASHPVGKALSDACMGTIASFLSKYQDIIIEHQKVVKGNQKRLESLRELAGKENLEYPSVTLPPQPHTSEGVDAYNEVIARVRMWVNLNLWQKLKLSRDDAKPLLRLKGFPSFPLVERQANAEVDWWDMVCNVKKLINEKKEDGKVFWQNLAGYKRQEALRPYLSSEEDRKKGKKFARYQLGDLLLHLEKKHGEDWGKVYDEAWERIDKKVEGLSKHIKLEEERRSEDAQSKAALTDWLRAKASFVIEGLKEADKDEFCRCELKLQKWYGDLRGKPFAIEAENSILDISGFSKQYNCAFIWQKDGVKKLNLYLIINYFKGGKLRFKKIKPEAFEANRFYTVINKKSGEIVPMEVNFNFDDPNLIILPLAFGKRQGREFIWNDLLSLETGSLKLANGRVIEKTLYNRRTRQDEPALFVALTFERREVLDSSNIKPMNLIGVDRGENIPAVIALTDPEGCPLSRFKDSLGNPTHILRIGESYKEKQRTIQAKKEVEQRRAGGYSRKYASKAKNLADDMVRNTARDLLYYAVTQDAMLIFENLSRGFGRQGKRTFMAERQYTRMEDWLTAKLAYEGLPSKTYLSKTLAQYTSKTCSNCGFTITSADYDRVLEKLKKTATGWMTTINGKELKVEGQITYYNRYKRQNVVKDLSVELDRLSEESVNNDISSWTKGRSGEALSLLKKRFSHRPVQEKFVCLNCGFETHADEQAALNIARSWLFLRSQEYKKYQTNKTTGNTDKRAFVETWQSFYRKKLKEVWKPAV

SEQ ID NO: 35579 - protein, 979 aa, synthetic construct
  REGION 1..979: note = engineered CasX variant
QEIKRINKIRRRLVKDSNTKKAGKTGPMKTLLVRVMTPDLRERLENLRKKPENIPQPISNTSRANLNKLLTDYTEMKKAILHVYWEEFQKDPVGLMSRVAQPASKKIDQNKLKPEMDEKGNLTTAGFACSQCGQPLFVYKLEQVSEKGKAYTNYFGRCNVAEHEKLILLAQLKPEKDSDEAVTYSLGKFGQRALDFYSIHVTKESTHPVKPLAQIAGNRYASSPVGKALSDACMGTIASFLSKYQDIIIEHQKVVKGNQKRLESLRELAGKENLEYPSVTLPPQPHTSEGVDAYNEVIARVRMWVNLNLWQKLKLSRDDAKPLLRLKGFPSFPLVERQANAEVDWWDMVCNVKKLINEKKEDGKVFWQNLAGYKRQEALRPYLSSEEDRKKGKKFARYQLGDLLLHLEKKHGEDWGKVYDEAWERIDKKVEGLSKHIKLEEERRSEDAQSKAALTDWLRAKASFVIEGLKEADKDEFCRCELKLQKWYGDLRGKPFAIEAENSILDISGFSKQYNCAFIWQKDGVKKLNLYLIINYFKGGKLRFKKIKPEAFEANRFYTVINKKSGEIVPMEVNFNFDDPNLIILPLAFGKRQGREFIWNDLLSLETGSLKLANGRVIEKTLYNRRTRQDEPALFVALTFERREVLDSSNIKPMNLIGVDRGENIPAVIALTDPEGCPLSRFKDSLGNPTHILRIGESYKEKQRTIQAKKEVEQRRAGGYSRKYASKAKNLADDMVRNTARDLLYYAVTQDAMLIFENLSRGFGRQGKRTFMAERQYTRMEDWLTAKLAYEGLPSKTYLSKTLAQYTSKTCSNCGFTITSADYDRVLEKLKKTATGWMTTINGKELKVEGQITYYNRYKRQNVVKDLSVELDRLSEESVNNDISSWTKGRSGEALSLLKKRFSHRPVQEKFVCLNCGFETHADEQAALNIARSWLFLRSQEYKKYQTNKTTGNTDKRAFVETWQSFYRKKLKEVWKPAV

SEQ ID NO: 35580 - protein, 979 aa, synthetic construct
  REGION 1..979: note = engineered CasX variant
QEIKRINKIRRRLVKDSNTKKAGKTGPMKTLLVRVMTPDLRERLENLRKKPENIPQPISNTSRANLNKLLTDYTEMKKAILHVYWEEFQKDPVGLMSRVAQPASKKIDQNKLKPEMDEKGNLTTAGFACSQCGQPLFVYKLEQVSEKGKAYTNYFGRCNVAEHEKLILLAQLKPEKDSDEAVTYSLGKFGQRALDFYSIHVTKESTHPVKPLAQIAGNRYASTPVGKALSDACMGTIASFLSKYQDIIIEHQKVVKGNQKRLESLRELAGKENLEYPSVTLPPQPHTSEGVDAYNEVIARVRMWVNLNLWQKLKLSRDDAKPLLRLKGFPSFPLVERQANAEVDWWDMVCNVKKLINEKKEDGKVFWQNLAGYKRQEALRPYLSSEEDRKKGKKFARYQLGDLLLHLEKKHGEDWGKVYDEAWERIDKKVEGLSKHIKLEEERRSEDAQSKAALTDWLRAKASFVIEGLKEADKDEFCRCELKLQKWYGDLRGKPFAIEAENSILDISGFSKQYNCAFIWQKDGVKKLNLYLIINYFKGGKLRFKKIKPEAFEANRFYTVINKKSGEIVPMEVNFNFDDPNLIILPLAFGKRQGREFIWNDLLSLETGSLKLANGRVIEKTLYNRRTRQDEPALFVALTFERREVLDSSNIKPMNLIGVDRGENIPAVIALTDPEGCPLSRFKDSLGNPTHILRIGESYKEKQRTIQAKKEVEQRRAGGYSRKYASKAKNLADDMVRNTARDLLYYAVTQDAMLIFENLSRGFGRQGKRTFMAERQYTRMEDWLTAKLAYEGLPSKTYLSKTLAQYTSKTCSNCGFTITSADYDRVLEKLKKTATGWMTTINGKELKVEGQITYYNRYKRQNVVKDLSVELDRLSEESVNNDISSWTKGRSGEALSLLKKRFSHRPVQEKFVCLNCGFETHADEQAALNIARSWLFLRSQEYKKYQTNKTTGNTDKRAFVETWQSFYRKKLKEVWKPAV

SEQ ID NO: 35581 - protein, 979 aa, synthetic construct
  REGION 1..979: note = engineered CasX variant
QEIKRINKIRRRLVKDSNTKKAGKTGPMKTLLVRVMTPDLRERLENLRKKPENIPQPISNTSRANLNKLLTDYTEMKKAILHVYWEEFQKDPVGLMSRVAQPASKKIDQNKLKPEMDEKGNLTTAGFACSQCGQPLFVYKLEQVSEKGKAYTNYFGRCNVAEHEKLILLAQLKPEKDSDEAVTYSLGKFGQRALDFYSIHVTKESTHPVKPLAQIAGNRYASAPVGKALSDACMGTIASFLSKYQDIIIEHQKVVKGNQKRLESLRELAGKENLEYPSVTLPPQPHTSEGVDAYNEVIARVRMWVNLNLWQKLKLSRDDAKPLLRLKGFPSFPLVERQANAEVDWWDMVCNVKKLINEKKEDGKVFWQNLAGYKRQEALRPYLSSEEDRKKGKKFARYQLGDLLLHLEKKHGEDWGKVYDEAWERIDKKVEGLSKHIKLEEERRSEDAQSKAALTDWLRAKASFVIEGLKEADKDEFCRCELKLQKWYGDLRGKPFAIEAENSILDISGFSKQYNCAFIWQKDGVKKLNLYLIINYFKGGKLRFKKIKPEAFEANRFYTVINKKSGEIVPMEVNFNFDDPNLIILPLAFGKRQGREFIWNDLLSLETGSLKLANGRVIEKTLYNRRTRQDEPALFVALTFERREVLDSSNIKPMNLIGVDRGENIPAVIALTDPEGCPLSRFKDSLGNPTHILRIGESYKEKQRTIQAKKEVEQRRAGGYSRKYASKAKNLADDMVRNTARDLLYYAVTQDAMLIFENLSRGFGRQGKRTFMAERQYTRMEDWLTAKLAYEGLPSKTYLSKTLAQYTSKTCSNCGFTITSADYDRVLEKLKKTATGWMTTINGKELKVEGQITYYNRYKRQNVVKDLSVELDRLSEESVNNDISSWTKGRSGEALSLLKKRFSHRPVQEKFVCLNCGFETHADEQAALNIARSWLFLRSQEYKKYQTNKTTGNTDKRAFVETWQSFYRKKLKEVWKPAV

SEQ ID NO: 35582 - protein, 979 aa, synthetic construct
  REGION 1..979: note = engineered CasX variant
QEIKRINKIRRRLVKDSNTKKAGKTGPMKTLLVRVMTPDLRERLENLRKKPENIPQPISNTSRANLNKLLTDYTEMKKAILHVYWEEFQKDPVGLMSRVAQPASKKIDQNKLKPEMDEKGNLTTAGFACSQCGQPLFVYKLEQVSEKGKAYTNYFGRCNVAEHEKLILLAQLKPEKDSDEAVTYSLGKFGQRALDFYSIHVTKESTHPVKPLAQIAGNRYASVPVGKALSDACMGTIASFLSKYQDIIIEHQKVVKGNQKRLESLRELAGKENLEYPSVTLPPQPHTSEGVDAYNEVIARVRMWVNLNLWQKLKLSRDDAKPLLRLKGFPSFPLVERQANAEVDWWDMVCNVKKLINEKKEDGKVFWQNLAGYKRQEALRPYLSSEEDRKKGKKFARYQLGDLLLHLEKKHGEDWGKVYDEAWERIDKKVEGLSKHIKLEEERRSEDAQSKAALTDWLRAKASFVIEGLKEADKDEFCRCELKLQKWYGDLRGKPFAIEAENSILDISGFSKQYNCAFIWQKDGVKKLNLYLIINYFKGGKLRFKKIKPEAFEANRFYTVINKKSGEIVPMEVNFNFDDPNLIILPLAFGKRQGREFIWNDLLSLETGSLKLANGRVIEKTLYNRRTRQDEPALFVALTFERREVLDSSNIKPMNLIGVDRGENIPAVIALTDPEGCPLSRFKDSLGNPTHILRIGESYKEKQRTIQAKKEVEQRRAGGYSRKYASKAKNLADDMVRNTARDLLYYAVTQDAMLIFENLSRGFGRQGKRTFMAERQYTRMEDWLTAKLAYEGLPSKTYLSKTLAQYTSKTCSNCGFTITSADYDRVLEKLKKTATGWMTTINGKELKVEGQITYYNRYKRQNVVKDLSVELDRLSEESVNNDISSWTKGRSGEALSLLKKRFSHRPVQEKFVCLNCGFETHADEQAALNIARSWLFLRSQEYKKYQTNKTTGNTDKRAFVETWQSFYRKKLKEVWKPAV

SEQ ID NO: 35583 - protein, 979 aa, synthetic construct
  REGION 1..979: note = engineered CasX variant
QEIKRINKIRRRLVKDSNTKKAGKTGPMKTLLVRVMTPDLRERLENLRKKPENIPQPISNTSRANLNKLLTDYTEMKKAILHVYWEEFQKDPVGLMSRVAQPASKKIDQNKLKPEMDEKGNLTTAGFACSQCGQPLFVYKLEQVSEKGKAYTNYFGRCNVAEHEKLIKLAQLKPEKDSDEAVTYSLGKFGQRALDFYSIHVTKESTHPVKPLAQIAGNRYASGPVGKALSDACMGTIASFLSKYQDIIIEHQKVVKGNQKRLESLRELAGKENLEYPSVTLPPQPHTSEGVDAYNEVIARVRMWVNLNLWQKLKLSRDDAKPLLRLKGFPSFPLVERQANAEVDWWDMVCNVKKLINEKKEDGKVFWQNLAGYKRQEALRPYLSSEEDRKKGKKFARYQLGDLLLHLEKKHGEDWGKVYDEAWERIDKKVEGLSKHIKLEEERRSEDAQSKAALTDWLRAKASFVIEGLKEADKDEFCRCELKLQKWYGDLRGKPFAIEAENSILDISGFSKQYNCAFIWQKDGVKKLNLYLIINYFKGGKLRFKKIKPEAFEANRFYTVINKKSGEIVPMEVNFNFDDPNLIILPLAFGKRQGREFIWNDLLSLETGSLKLANGRVIEKTLYNRRTRQDEPALFVALTFERREVLDSSNIKPMNLIGVDRGENIPAVIALTDPEGCPLSRFKDSLGNPTHILRIGESYKEKQRTIQAKKEVEQRRAGGYSRKYASKAKNLADDMVRNTARDLLYYAVTQDAMLIFENLSRGFGRQGKRTFMAERQYTRMEDWLTAKLAYEGLPSKTYLSKTLAQYTSKTCSNCGFTITSADYDRVLEKLKKTATGWMTTINGKELKVEGQITYYNRYKRQNVVKDLSVELDRLSEESVNNDISSWTKGRSGEALSLLKKRFSHRPVQEKFVCLNCGFETHADEQAALNIARSWLFLRSQEYKKYQTNKTTGNTDKRAFVETWQSFYRKKLKEVWKPAV

SEQ ID NO: 35584 - protein, 978 aa, synthetic construct
  REGION 1..978: note = engineered CasX variant
QEIKRINKIRRRLVKDSNTKKAGKTGPMKTLLVRVMTPDLRERLENLRKKPENIPQPISNTSRANLNKLLTDYTEMKKAILHVYWEEFQKDPVGLMSRVAQPASKKIDQNKLKPEMDEKGNLTTAGFACSQCGQPLFVYKLEQVSEKGKAYTNYFGRCNVAEHEKLILLAQLKPEKDSDEAVTYSLGKFGQRALDFYSIHVTKESTHPVKPLAQIAGNRYASPVGKALSDACMGTIASFLSKYQDIIIEHQKVVKGNQKRLESLRELAGKENLEYPSVTLPPQPHTSEGVDAYNEVIARVRMWVNLNLWQKLKLSRDDAKPLLRLKGFPSFPLVERQANAEVDWWDMVCNVKKLINEKKEDGKVFWQNLAGYKRQEALRPYLSSEEDRKKGKKFARYQLGDLLLHLEKKHGEDWGKVYDEAWERIDKKVEGLSKHIKLEEERRSEDAQSKAALTDWLRAKASFVIEGLKEADKDEFCRCELKLQKWYGDLRGKPFAIEAENSILDISGFSKQYNCAFIWQKDGVKKLNLYLIINYFKGGKLRFKKIKPEAFEANRFYTVINKKSGEIVPMEVNFNFDDPNLIILPLAFGKRQGREFIWNDLLSLETGSLKLANGRVIEKTLYNRRTRQDEPALFVALTFERREVLDSSNIKPMNLIGVDRGENIPAVIALTDPEGCPLSRFKDSLGNPTHILRIGESYKEKQRTIQAKKEVEQRRAGGYSRKYASKAKNLADDMVRNTARDLLYYAVTQDAMLIFENLSRGFGRQGKRTFMAERQYTRMEDWLTAKLAYEGLPSKTYLSKTLAQYTSKTCSNCGFTITSADYDRVLEKLKKTATGWMTTINGKELKVEGQITYYNRYKRQNVVKDLSVELDRLSEESVNNDISSWTKGRSGEALSLLKKRFSHRPVQEKFVCLNCGFETHADEQAALNIARSWLFLRSQEYKKYQTNKTTGNTDKRAFVETWQSFYRKKLKEVWKPAV

SEQ ID NO: 35585 - protein, 978 aa, synthetic construct
  REGION 1..978: note = engineered CasX variant
QEIKRINKIRRRLVKDSNTKKAGKTGPMKTLLVRVMTPDLRERLENLRKKPENIPQPISNTSRANLNKLLTDYTEMKKAILHVYWEEFQKDPVGLMSRVAQPASKKIDQNKLKPEMDEKGNLTTAGFACSQCGQPLFVYKLEQVSEKGKAYTNYFGRCNVAEHEKLILLAQLKPEKDSDEAVTYSLGKFGQRALDFYSIHVTKESTHPVKPLAQIAGNRYASYPVGKALSDACMGTIASFLSKYQDIIIEHQKVVKGNQKRLESLRELAGKENLEYPSVTLPPQPHTSEGVDAYNEVIARVRMWVNLNLWQKLKLSRDDAKPLLRLKGFPSFPLVERQANEVDWWDMVCNVKKLINEKKEDGKVFWQNLAGYKRQEALRPYLSSEEDRKKGKKFARTQLGDLLLHLEKKHGEDWGKVYDEAWERIDKKVEGLSKHIKLEEERRSEDAQSKAALTDWLRAKASFVIEGLKEADKDEFCRCELKLQKWYGDLRGKPFAIEAENSILDISGFSKQYNCAFIWQKDGVKKLNLYLIINYFKGGKLRFKKIKPEAFEANRFYTVINKKSGEIVPMEVNFNFDDPNLIILPLAFGKRQGREFIWNDLLSLETGSLKLANGRVIEKTLYNRRTRQDEPALFVALTFERREVLDSSNIKPMNLIGVDRGENIPAVIALTDPEGCPLSRFKDSLGNPTHILRIGESYKEKQRTIQAKKEVEQRRAGGYSRKYASKAKNLADDMVRNTARDLLYYAVTQDAMLIFENLSRGFGRQGKRTFMAERQYTRMEDWLTAKLAYEGLPSKTYLSKTLAQYTSKTCSNCGFTITSADYDRVLEKLKKTATGWMTTINGKELKVEGQITYYNRYKRQNVVKDLSVELDRLSEESVNNDISSWTKGRSGEALSLLKKRFSHRPVQEKFVCLNCGFETHADEQAALNIARSWLFLRSQEYKKYQTNKTTGNTDKRAFVETWQSFYRKKLKEVWKPAV

SEQ ID NO: 35586 - protein, 978 aa, synthetic construct
  REGION 1..978: note = engineered CasX variant
QEIKRINKIRRRLVKDSNTKKAGKTGPMKTLLVRVMTPDLRERLENLRKKPENIPQPISNTSRANLNKLLTDYTEMKKAILHVYWEEFQKDPVGLMSRVAQPASKKIDQNKLKPEMDEKGNLTTAGFACSQCGQPLFVYKLEQVSEKGKAYTNYFGRCNVAEHEKLILLAQLKPEKDSDEAVTYSLGKFGQRALDFYSIHVTKESTHPVKPLAQIAGNRYASHPVGKALSDACMGTIASFLSKYQDIIIEHQKVVKGNQKRLESLRELAGKENLEYPSVTLPPQPHTSEGVDAYNEVIARVRMWVNLNLWQKLKLSRDDAKPLLRLKGFPSFPLVERQANEVDWWDMVCNVKKLINEKKEDGKVFWQNLAGYKRQEALRPYLSSEEDRKKGKKFARTQLGDLLLHLEKKHGEDWGKVYDEAWERIDKKVEGLSKHIKLEEERRSEDAQSKAALTDWLRAKASFVIEGLKEADKDEFCRCELKLQKWYGDLRGKPFAIEAENSILDISGFSKQYNCAFIWQKDGVKKLNLYLIINYFKGGKLRFKKIKPEAFEANRFYTVINKKSGEIVPMEVNFNFDDPNLIILPLAFGKRQGREFIWNDLLSLETGSLKLANGRVIEKTLYNRRTRQDEPALFVALTFERREVLDSSNIKPMNLIGVDRGENIPAVIALTDPEGCPLSRFKDSLGNPTHILRIGESYKEKQRTIQAKKEVEQRRAGGYSRKYASKAKNLADDMVRNTARDLLYYAVTQDAMLIFENLSRGFGRQGKRTFMAERQYTRMEDWLTAKLAYEGLPSKTYLSKTLAQYTSKTCSNCGFTITSADYDRVLEKLKKTATGWMTTINGKELKVEGQITYYNRYKRQNVVKDLSVELDRLSEESVNNDISSWTKGRSGEALSLLKKRFSHRPVQEKFVCLNCGFETHADEQAALNIARSWLFLRSQEYKKYQTNKTTGNTDKRAFVETWQSFYRKKLKEVWKPAV

SEQ ID NO: 35587 - protein, 978 aa, synthetic construct
  REGION 1..978: note = engineered CasX variant
QEIKRINKIRRRLVKDSNTKKAGKTGPMKTLLVRVMTPDLRERLENLRKKPENIPQPISNTSRANLNKLLTDYTEMKKAILHVYWEEFQKDPVGLMSRVAQPASKKIDQNKLKPEMDEKGNLTTAGFACSQCGQPLFVYKLEQVSEKGKAYTNYFGRCNVAEHEKLILLAQLKPEKDSDEAVTYSLGKFGQRALDFYSIHVTKESTHPVKPLAQIAGNRYASSPVGKALSDACMGTIASFLSKYQDIIIEHQKVVKGNQKRLESLRELAGKENLEYPSVTLPPQPHTSEGVDAYNEVIARVRMWVNLNLWQKLKLSRDDAKPLLRLKGFPSFPLVERQANEVDWWDMVCNVKKLINEKKEDGKVFWQNLAGYKRQEALRPYLSSEEDRKKGKKFARTQLGDLLLHLEKKHGEDWGKVYDEAWERIDKKVEGLSKHIKLEEERRSEDAQSKAALTDWLRAKASFVIEGLKEADKDEFCRCELKLQKWYGDLRGKPFAIEAENSILDISGFSKQYNCAFIWQKDGVKKLNLYLIINYFKGGKLRFKKIKPEAFEANRFYTVINKKSGEIVPMEVNFNFDDPNLIILPLAFGKRQGREFIWNDLLSLETGSLKLANGRVIEKTLYNRRTRQDEPALFVALTFERREVLDSSNIKPMNLIGVDRGENIPAVIALTDPEGCPLSRFKDSLGNPTHILRIGESYKEKQRTIQAKKEVEQRRAGGYSRKYASKAKNLADDMVRNTARDLLYYAVTQDAMLIFENLSRGFGRQGKRTFMAERQYTRMEDWLTAKLAYEGLPSKTYLSKTLAQYTSKTCSNCGFTITSADYDRVLEKLKKTATGWMTTINGKELKVEGQITYYNRYKRQNVVKDLSVELDRLSEESVNNDISSWTKGRSGEALSLLKKRFSHRPVQEKFVCLNCGFETHADEQAALNIARSWLFLRSQEYKKYQTNKTTGNTDKRAFVETWQSFYRKKLKEVWKPAV

SEQ ID NO: 35588 - protein, 978 aa, synthetic construct
  REGION 1..978: note = engineered CasX variant
QEIKRINKIRRRLVKDSNTKKAGKTGPMKTLLVRVMTPDLRERLENLRKKPENIPQPISNTSRANLNKLLTDYTEMKKAILHVYWEEFQKDPVGLMSRVAQPASKKIDQNKLKPEMDEKGNLTTAGFACSQCGQPLFVYKLEQVSEKGKAYTNYFGRCNVAEHEKLILLAQLKPEKDSDEAVTYSLGKFGQRALDFYSIHVTKESTHPVKPLAQIAGNRYASTPVGKALSDACMGTIASFLSKYQDIIIEHQKVVKGNQKRLESLRELAGKENLEYPSVTLPPQPHTSEGVDAYNEVIARVRMWVNLNLWQKLKLSRDDAKPLLRLKGFPSFPLVERQANEVDWWDMVCNVKKLINEKKEDGKVFWQNLAGYKRQEALRPYLSSEEDRKKGKKFARTQLGDLLLHLEKKHGEDWGKVYDEAWERIDKKVEGLSKHIKLEEERRSEDAQSKAALTDWLRAKASFVIEGLKEADKDEFCRCELKLQKWYGDLRGKPFAIEAENSILDISGFSKQYNCAFIWQKDGVKKLNLYLIINYFKGGKLRFKKIKPEAFEANRFYTVINKKSGEIVPMEVNFNFDDPNLIILPLAFGKRQGREFIWNDLLSLETGSLKLANGRVIEKTLYNRRTRQDEPALFVALTFERREVLDSSNIKPMNLIGVDRGENIPAVIALTDPEGCPLSRFKDSLGNPTHILRIGESYKEKQRTIQAKKEVEQRRAGGYSRKYASKAKNLADDMVRNTARDLLYYAVTQDAMLIFENLSRGFGRQGKRTFMAERQYTRMEDWLTAKLAYEGLPSKTYLSKTLAQYTSKTCSNCGFTITSADYDRVLEKLKKTATGWMTTINGKELKVEGQITYYNRYKRQNVVKDLSVELDRLSEESVNNDISSWTKGRSGEALSLLKKRFSHRPVQEKFVCLNCGFETHADEQAALNIARSWLFLRSQEYKKYQTNKTTGNTDKRAFVETWQSFYRKKLKEVWKPAV

SEQ ID NO: 35589 - protein, 978 aa, synthetic construct
  REGION 1..978: note = engineered CasX variant
QEIKRINKIRRRLVKDSNTKKAGKTGPMKTLLVRVMTPDLRERLENLRKKPENIPQPISNTSRANLNKLLTDYTEMKKAILHVYWEEFQKDPVGLMSRVAQPASKKIDQNKLKPEMDEKGNLTTAGFACSQCGQPLFVYKLEQVSEKGKAYTNYFGRCNVAEHEKLILLAQLKPEKDSDEAVTYSLGKFGQRALDFYSIHVTKESTHPVKPLAQIAGNRYASAPVGKALSDACMGTIASFLSKYQDIIIEHQKVVKGNQKRLESLRELAGKENLEYPSVTLPPQPHTSEGVDAYNEVIARVRMWVNLNLWQKLKLSRDDAKPLLRLKGFPSFPLVERQANEVDWWDMVCNVKKLINEKKEDGKVFWQNLAGYKRQEALRPYLSSEEDRKKGKKFARTQLGDLLLHLEKKHGEDWGKVYDEAWERIDKKVEGLSKHIKLEEERRSEDAQSKAALTDWLRAKASFVIEGLKEADKDEFCRCELKLQKWYGDLRGKPFAIEAENSILDISGFSKQYNCAFIWQKDGVKKLNLYLIINYFKGGKLRFKKIKPEAFEANRFYTVINKKSGEIVPMEVNFNFDDPNLIILPLAFGKRQGREFIWNDLLSLETGSLKLANGRVIEKTLYNRRTRQDEPALFVALTFERREVLDSSNIKPMNLIGVDRGENIPAVIALTDPEGCPLSRFKDSLGNPTHILRIGESYKEKQRTIQAKKEVEQRRAGGYSRKYASKAKNLADDMVRNTARDLLYYAVTQDAMLIFENLSRGFGRQGKRTFMAERQYTRMEDWLTAKLAYEGLPSKTYLSKTLAQYTSKTCSNCGFTITSADYDRVLEKLKKTATGWMTTINGKELKVEGQITYYNRYKRQNVVKDLSVELDRLSEESVNNDISSWTKGRSGEALSLLKKRFSHRPVQEKFVCLNCGFETHADEQAALNIARSWLFLRSQEYKKYQTNKTTGNTDKRAFVETWQSFYRKKLKEVWKPAV

SEQ ID NO: 35590 - protein, 978 aa, synthetic construct
  REGION 1..978: note = engineered CasX variant
QEIKRINKIRRRLVKDSNTKKAGKTGPMKTLLVRVMTPDLRERLENLRKKPENIPQPISNTSRANLNKLLTDYTEMKKAILHVYWEEFQKDPVGLMSRVAQPASKKIDQNKLKPEMDEKGNLTTAGFACSQCGQPLFVYKLEQVSEKGKAYTNYFGRCNVAEHEKLILLAQLKPEKDSDEAVTYSLGKFGQRALDFYSIHVTKESTHPVKPLAQIAGNRYASVPVGKALSDACMGTIASFLSKYQDIIIEHQKVVKGNQKRLESLRELAGKENLEYPSVTLPPQPHTSEGVDAYNEVIARVRMWVNLNLWQKLKLSRDDAKPLLRLKGFPSFPLVERQANEVDWWDMVCNVKKLINEKKEDGKVFWQNLAGYKRQEALRPYLSSEEDRKKGKKFARTQLGDLLLHLEKKHGEDWGKVYDEAWERIDKKVEGLSKHIKLEEERRSEDAQSKAALTDWLRAKASFVIEGLKEADKDEFCRCELKLQKWYGDLRGKPFAIEAENSILDISGFSKQYNCAFIWQKDGVKKLNLYLIINYFKGGKLRFKKIKPEAFEANRFYTVINKKSGEIVPMEVNFNFDDPNLIILPLAFGKRQGREFIWNDLLSLETGSLKLANGRVIEKTLYNRRTRQDEPALFVALTFERREVLDSSNIKPMNLIGVDRGENIPAVIALTDPEGCPLSRFKDSLGNPTHILRIGESYKEKQRTIQAKKEVEQRRAGGYSRKYASKAKNLADDMVRNTARDLLYYAVTQDAMLIFENLSRGFGRQGKRTFMAERQYTRMEDWLTAKLAYEGLPSKTYLSKTLAQYTSKTCSNCGFTITSADYDRVLEKLKKTATGWMTTINGKELKVEGQITYYNRYKRQNVVKDLSVELDRLSEESVNNDISSWTKGRSGEALSLLKKRFSHRPVQEKFVCLNCGFETHADEQAALNIARSWLFLRSQEYKKYQTNKTTGNTDKRAFVETWQSFYRKKLKEVWKPAV

SEQ ID NO: 35591 - protein, 978 aa, synthetic construct
  REGION 1..978: note = engineered CasX variant
QEIKRINKIRRRLVKDSNTKKAGKTGPMKTLLVRVMTPDLRERLENLRKKPENIPQPISNTSRANLNKLLTDYTEMKKAILHVYWEEFQKDPVGLMSRVAQPASKKIDQNKLKPEMDEKGNLTTAGFACSQCGQPLFVYKLEQVSEKGKAYTNYFGRCNVAEHEKLIKLAQLKPEKDSDEAVTYSLGKFGQRALDFYSIHVTKESTHPVKPLAQIAGNRYASGPVGKALSDACMGTIASFLSKYQDIIIEHQKVVKGNQKRLESLRELAGKENLEYPSVTLPPQPHTSEGVDAYNEVIARVRMWVNLNLWQKLKLSRDDAKPLLRLKGFPSFPLVERQANEVDWWDMVCNVKKLINEKKEDGKVFWQNLAGYKRQEALRPYLSSEEDRKKGKKFARTQLGDLLLHLEKKHGEDWGKVYDEAWERIDKKVEGLSKHIKLEEERRSEDAQSKAALTDWLRAKASFVIEGLKEADKDEFCRCELKLQKWYGDLRGKPFAIEAENSILDISGFSKQYNCAFIWQKDGVKKLNLYLIINYFKGGKLRFKKIKPEAFEANRFYTVINKKSGEIVPMEVNFNFDDPNLIILPLAFGKRQGREFIWNDLLSLETGSLKLANGRVIEKTLYNRRTRQDEPALFVALTFERREVLDSSNIKPMNLIGVDRGENIPAVIALTDPEGCPLSRFKDSLGNPTHILRIGESYKEKQRTIQAKKEVEQRRAGGYSRKYASKAKNLADDMVRNTARDLLYYAVTQDAMLIFENLSRGFGRQGKRTFMAERQYTRMEDWLTAKLAYEGLPSKTYLSKTLAQYTSKTCSNCGFTITSADYDRVLEKLKKTATGWMTTINGKELKVEGQITYYNRYKRQNVVKDLSVELDRLSEESVNNDISSWTKGRSGEALSLLKKRFSHRPVQEKFVCLNCGFETHADEQAALNIARSWLFLRSQEYKKYQTNKTTGNTDKRAFVETWQSFYRKKLKEVWKPAV

SEQ ID NO: 35592 - protein, 977 aa, synthetic construct
  REGION 1..977: note = engineered CasX variant
QEIKRINKIRRRLVKDSNTKKAGKTGPMKTLLVRVMTPDLRERLENLRKKPENIPQPISNTSRANLNKLLTDYTEMKKAILHVYWEEFQKDPVGLMSRVAQPASKKIDQNKLKPEMDEKGNLTTAGFACSQCGQPLFVYKLEQVSEKGKAYTNYFGRCNVAEHEKLILLAQLKPEKDSDEAVTYSLGKFGQRALDFYSIHVTKESTHPVKPLAQIAGNRYASPVGKALSDACMGTIASFLSKYQDIIIEHQKVVKGNQKRLESLRELAGKENLEYPSVTLPPQPHTSEGVDAYNEVIARVRMWVNLNLWQKLKLSRDDAKPLLRLKGFPSFPLVERQANEVDWWDMVCNVKKLINEKKEDGKVFWQNLAGYKRQEALRPYLSSEEDRKKGKKFARTQLGDLLLHLEKKHGEDWGKVYDEAWERIDKKVEGLSKHIKLEEERRSEDAQSKAALTDWLRAKASFVIEGLKEADKDEFCRCELKLQKWYGDLRGKPFAIEAENSILDISGFSKQYNCAFIWQKDGVKKLNLYLIINYFKGGKLRFKKIKPEAFEANRFYTVINKKSGEIVPMEVNFNFDDPNLIILPLAFGKRQGREFIWNDLLSLETGSLKLANGRVIEKTLYNRRTRQDEPALFVALTFERREVLDSSNIKPMNLIGVDRGENIPAVIALTDPEGCPLSRFKDSLGNPTHILRIGESYKEKQRTIQAKKEVEQRRAGGYSRKYASKAKNLADDMVRNTARDLLYYAVTQDAMLIFENLSRGFGRQGKRTFMAERQYTRMEDWLTAKLAYEGLPSKTYLSKTLAQYTSKTCSNCGFTITSADYDRVLEKLKKTATGWMTTINGKELKVEGQITYYNRYKRQNVVKDLSVELDRLSEESVNNDISSWTKGRSGEALSLLKKRFSHRPVQEKFVCLNCGFETHADEQAALNIARSWLFLRSQEYKKYQTNKTTGNTDKRAFVETWQSFYRKKLKEVWKPAV

SEQ ID NO: 35593 - protein, 979 aa, synthetic construct
  REGION 1..979: note = engineered CasX variant
QEIKRINKIRRRLVKDSNTKKAGKTGPMKTLLVRVMTPDLRERLENLRKKPENIPQPISNTSRANLNKLLTDYTEMKKAILHVYWEEFQKDPVGLMSRVAQPASKKIDQNKLKPEMDEKGNLTTAGFACSQCGQPLFVYKLEQVSEKGKAYTNYFGRCNVAEHEKLILLAQLKPEKDSDEAVTYSLGKFGQRALDFYSIHVTKESTHPVKPLAQIAGNRYASYPVGKALSDACMGTIASFLSKYQDIIIEHQKVVKGNQKRLESLRELAGKENLEYPSVTLPPQPHTSEGVDAYNEVIARVRMWVNLNLWQKLKLSRDDAKPLLRLKGFPSFPLVERQANEVDWWDMVCNVKKLINEKKEDGKVFWQNLAGYKRQEALRPYLSSEEDRKKGKKFARYQLGDLLLHLEKKHEGEDWGKVYDEAWERIDKKVEGLSKHIKLEEERRSEDAQSKAALTDWLRAKASFVIEGLKEADKDEFCRCELKLQKWYGDLRGKPFAIEAENSILDISGFSKQYNCAFIWQKDGVKKLNLYLIINYFKGGKLRFKKIKPEAFEANRFYTVINKKSGEIVPMEVNFNFDDPNLIILPLAFGKRQGREFIWNDLLSLETGSLKLANGRVIEKTLYNRRTRQDEPALFVALTFERREVLDSSNIKPMNLIGVDRGENIPAVIALTDPEGCPLSRFKDSLGNPTHILRIGESYKEKQRTIQAKKEVEQRRAGGYSRKYASKAKNLADDMVRNTARDLLYYAVTQDAMLIFENLSRGFGRQGKRTFMAERQYTRMEDWLTAKLAYEGLPSKTYLSKTLAQYTSKTCSNCGFTITSADYDRVLEKLKKTATGWMTTINGKELKVEGQITYYNRYKRQNVVKDLSVELDRLSEESVNNDISSWTKGRSGEALSLLKKRFSHRPVQEKFVCLNCGFETHADEQAALNIARSWLFLRSQEYKKYQTNKTTGNTDKRAFVETWQSFYRKKLKEVWKPAV

SEQ ID NO: 35594 - protein, 979 aa, synthetic construct
  REGION 1..979: note = engineered CasX variant
QEIKRINKIRRRLVKDSNTKKAGKTGPMKTLLVRVMTPDLRERLENLRKKPENIPQPISNTSRANLNKLLTDYTEMKKAILHVYWEEFQKDPVGLMSRVAQPASKKIDQNKLKPEMDEKGNLTTAGFACSQCGQPLFVYKLEQVSEKGKAYTNYFGRCNVAEHEKLILLAQLKPEKDSDEAVTYSLGKFGQRALDFYSIHVTKESTHPVKPLAQIAGNRYASHPVGKALSDACMGTIASFLSKYQDIIIEHQKVVKGNQKRLESLRELAGKENLEYPSVTLPPQPHTSEGVDAYNEVIARVRMWVNLNLWQKLKLSRDDAKPLLRLKGFPSFPLVERQANEVDWWDMVCNVKKLINEKKEDGKVFWQNLAGYKRQEALRPYLSSEEDRKKGKKFARYQLGDLLLHLEKKHEGEDWGKVYDEAWERIDKKVEGLSKHIKLEEERRSEDAQSKAALTDWLRAKASFVIEGLKEADKDEFCRCELKLQKWYGDLRGKPFAIEAENSILDISGFSKQYNCAFIWQKDGVKKLNLYLIINYFKGGKLRFKKIKPEAFEANRFYTVINKKSGEIVPMEVNFNFDDPNLIILPLAFGKRQGREFIWNDLLSLETGSLKLANGRVIEKTLYNRRTRQDEPALFVALTFERREVLDSSNIKPMNLIGVDRGENIPAVIALTDPEGCPLSRFKDSLGNPTHILRIGESYKEKQRTIQAKKEVEQRRAGGYSRKYASKAKNLADDMVRNTARDLLYYAVTQDAMLIFENLSRGFGRQGKRTFMAERQYTRMEDWLTAKLAYEGLPSKTYLSKTLAQYTSKTCSNCGFTITSADYDRVLEKLKKTATGWMTTINGKELKVEGQITYYNRYKRQNVVKDLSVELDRLSEESVNNDISSWTKGRSGEALSLLKKRFSHRPVQEKFVCLNCGFETHADEQAALNIARSWLFLRSQEYKKYQTNKTTGNTDKRAFVETWQSFYRKKLKEVWKPAV

SEQ ID NO: 35595 - protein, 979 aa, synthetic construct
  REGION 1..979: note = engineered CasX variant
QEIKRINKIRRRLVKDSNTKKAGKTGPMKTLLVRVMTPDLRERLENLRKKPENIPQPISNTSRANLNKLLTDYTEMKKAILHVYWEEFQKDPVGLMSRVAQPASKKIDQNKLKPEMDEKGNLTTAGFACSQCGQPLFVYKLEQVSEKGKAYTNYFGRCNVAEHEKLILLAQLKPEKDSDEAVTYSLGKFGQRALDFYSIHVTKESTHPVKPLAQIAGNRYASSPVGKALSDACMGTIASFLSKYQDIIIEHQKVVKGNQKRLESLRELAGKENLEYPSVTLPPQPHTSEGVDAYNEVIARVRMWVNLNLWQKLKLSRDDAKPLLRLKGFPSFPLVERQANEVDWWDMVCNVKKLINEKKEDGKVFWQNLAGYKRQEALRPYLSSEEDRKKGKKFARYQLGDLLLHLEKKHEGEDWGKVYDEAWERIDKKVEGLSKHIKLEEERRSEDAQSKAALTDWLRAKASFVIEGLKEADKDEFCRCELKLQKWYGDLRGKPFAIEAENSILDISGFSKQYNCAFIWQKDGVKKLNLYLIINYFKGGKLRFKKIKPEAFEANRFYTVINKKSGEIVPMEVNFNFDDPNLIILPLAFGKRQGREFIWNDLLSLETGSLKLANGRVIEKTLYNRRTRQDEPALFVALTFERREVLDSSNIKPMNLIGVDRGENIPAVIALTDPEGCPLSRFKDSLGNPTHILRIGESYKEKQRTIQAKKEVEQRRAGGYSRKYASKAKNLADDMVRNTARDLLYYAVTQDAMLIFENLSRGFGRQGKRTFMAERQYTRMEDWLTAKLAYEGLPSKTYLSKTLAQYTSKTCSNCGFTITSADYDRVLEKLKKTATGWMTTINGKELKVEGQITYYNRYKRQNVVKDLSVELDRLSEESVNNDISSWTKGRSGEALSLLKKRFSHRPVQEKFVCLNCGFETHADEQAALNIARSWLFLRSQEYKKYQTNKTTGNTDKRAFVETWQSFYRKKLKEVWKPAV

SEQ ID NO: 35596 - protein, 979 aa, synthetic construct
  REGION 1..979: note = engineered CasX variant
QEIKRINKIRRRLVKDSNTKKAGKTGPMKTLLVRVMTPDLRERLENLRKKPENIPQPISNTSRANLNKLLTDYTEMKKAILHVYWEEFQKDPVGLMSRVAQPASKKIDQNKLKPEMDEKGNLTTAGFACSQCGQPLFVYKLEQVSEKGKAYTNYFGRCNVAEHEKLILLAQLKPEKDSDEAVTYSLGKFGQRALDFYSIHVTKESTHPVKPLAQIAGNRYASTPVGKALSDACMGTIASFLSKYQDIIIEHQKVVKGNQKRLESLRELAGKENLEYPSVTLPPQPHTSEGVDAYNEVIARVRMWVNLNLWQKLKLSRDDAKPLLRLKGFPSFPLVERQANEVDWWDMVCNVKKLINEKKEDGKVFWQNLAGYKRQEALRPYLSSEEDRKKGKKFARYQLGDLLLHLEKKHEGEDWGKVYDEAWERIDKKVEGLSKHIKLEEERRSEDAQSKAALTDWLRAKASFVIEGLKEADKDEFCRCELKLQKWYGDLRGKPFAIEAENSILDISGFSKQYNCAFIWQKDGVKKLNLYLIINYFKGGKLRFKKIKPEAFEANRFYTVINKKSGEIVPMEVNFNFDDPNLIILPLAFGKRQGREFIWNDLLSLETGSLKLANGRVIEKTLYNRRTRQDEPALFVALTFERREVLDSSNIKPMNLIGVDRGENIPAVIALTDPEGCPLSRFKDSLGNPTHILRIGESYKEKQRTIQAKKEVEQRRAGGYSRKYASKAKNLADDMVRNTARDLLYYAVTQDAMLIFENLSRGFGRQGKRTFMAERQYTRMEDWLTAKLAYEGLPSKTYLSKTLAQYTSKTCSNCGFTITSADYDRVLEKLKKTATGWMTTINGKELKVEGQITYYNRYKRQNVVKDLSVELDRLSEESVNNDISSWTKGRSGEALSLLKKRFSHRPVQEKFVCLNCGFETHADEQAALNIARSWLFLRSQEYKKYQTNKTTGNTDKRAFVETWQSFYRKKLKEVWKPAV

SEQ ID NO: 35597 - protein, 979 aa, synthetic construct
  REGION 1..979: note = engineered CasX variant
QEIKRINKIRRRLVKDSNTKKAGKTGPMKTLLVRVMTPDLRERLENLRKKPENIPQPISNTSRANLNKLLTDYTEMKKAILHVYWEEFQKDPVGLMSRVAQPASKKIDQNKLKPEMDEKGNLTTAGFACSQCGQPLFVYKLEQVSEKGKAYTNYFGRCNVAEHEKLILLAQLKPEKDSDEAVTYSLGKFGQRALDFYSIHVTKESTHPVKPLAQIAGNRYASAPVGKALSDACMGTIASFLSKYQDIIIEHQKVVKGNQKRLESLRELAGKENLEYPSVTLPPQPHTSEGVDAYNEVIARVRMWVNLNLWQKLKLSRDDAKPLLRLKGFPSFPLVERQANEVDWWDMVCNVKKLINEKKEDGKVFWQNLAGYKRQEALRPYLSSEEDRKKGKKFARYQLGDLLLHLEKKHEGEDWGKVYDEAWERIDKKVEGLSKHIKLEEERRSEDAQSKAALTDWLRAKASFVIEGLKEADKDEFCRCELKLQKWYGDLRGKPFAIEAENSILDISGFSKQYNCAFIWQKDGVKKLNLYLIINYFKGGKLRFKKIKPEAFEANRFYTVINKKSGEIVPMEVNFNFDDPNLIILPLAFGKRQGREFIWNDLLSLETGSLKLANGRVIEKTLYNRRTRQDEPALFVALTFERREVLDSSNIKPMNLIGVDRGENIPAVIALTDPEGCPLSRFKDSLGNPTHILRIGESYKEKQRTIQAKKEVEQRRAGGYSRKYASKAKNLADDMVRNTARDLLYYAVTQDAMLIFENLSRGFGRQGKRTFMAERQYTRMEDWLTAKLAYEGLPSKTYLSKTLAQYTSKTCSNCGFTITSADYDRVLEKLKKTATGWMTTINGKELKVEGQITYYNRYKRQNVVKDLSVELDRLSEESVNNDISSWTKGRSGEALSLLKKRFSHRPVQEKFVCLNCGFETHADEQAALNIARSWLFLRSQEYKKYQTNKTTGNTDKRAFVETWQSFYRKKLKEVWKPAV

SEQ ID NO: 35598 - protein, 979 aa, synthetic construct
  REGION 1..979: note = engineered CasX variant
QEIKRINKIRRRLVKDSNTKKAGKTGPMKTLLVRVMTPDLRERLENLRKKPENIPQPISNTSRANLNKLLTDYTEMKKAILHVYWEEFQKDPVGLMSRVAQPASKKIDQNKLKPEMDEKGNLTTAGFACSQCGQPLFVYKLEQVSEKGKAYTNYFGRCNVAEHEKLILLAQLKPEKDSDEAVTYSLGKFGQRALDFYSIHVTKESTHPVKPLAQIAGNRYASVPVGKALSDACMGTIASFLSKYQDIIIEHQKVVKGNQKRLESLRELAGKENLEYPSVTLPPQPHTSEGVDAYNEVIARVRMWVNLNLWQKLKLSRDDAKPLLRLKGFPSFPLVERQANEVDWWDMVCNVKKLINEKKEDGKVFWQNLAGYKRQEALRPYLSSEEDRKKGKKFARYQLGDLLLHLEKKHEGEDWGKVYDEAWERIDKKVEGLSKHIKLEEERRSEDAQSKAALTDWLRAKASFVIEGLKEADKDEFCRCELKLQKWYGDLRGKPFAIEAENSILDISGFSKQYNCAFIWQKDGVKKLNLYLIINYFKGGKLRFKKIKPEAFEANRFYTVINKKSGEIVPMEVNFNFDDPNLIILPLAFGKRQGREFIWNDLLSLETGSLKLANGRVIEKTLYNRRTRQDEPALFVALTFERREVLDSSNIKPMNLIGVDRGENIPAVIALTDPEGCPLSRFKDSLGNPTHILRIGESYKEKQRTIQAKKEVEQRRAGGYSRKYASKAKNLADDMVRNTARDLLYYAVTQDAMLIFENLSRGFGRQGKRTFMAERQYTRMEDWLTAKLAYEGLPSKTYLSKTLAQYTSKTCSNCGFTITSADYDRVLEKLKKTATGWMTTINGKELKVEGQITYYNRYKRQNVVKDLSVELDRLSEESVNNDISSWTKGRSGEALSLLKKRFSHRPVQEKFVCLNCGFETHADEQAALNIARSWLFLRSQEYKKYQTNKTTGNTDKRAFVETWQSFYRKKLKEVWKPAV

SEQ ID NO: 35599 - protein, 979 aa, synthetic construct
  REGION 1..979: note = engineered CasX variant
QEIKRINKIRRRLVKDSNTKKAGKTGPMKTLLVRVMTPDLRERLENLRKKPENIPQPISNTSRANLNKLLTDYTEMKKAILHVYWEEFQKDPVGLMSRVAQPASKKIDQNKLKPEMDEKGNLTTAGFACSQCGQPLFVYKLEQVSEKGKAYTNYFGRCNVAEHEKLIKLAQLKPEKDSDEAVTYSLGKFGQRALDFYSIHVTKESTHPVKPLAQIAGNRYASGPVGKALSDACMGTIASFLSKYQDIIIEHQKVVKGNQKRLESLRELAGKENLEYPSVTLPPQPHTSEGVDAYNEVIARVRMWVNLNLWQKLKLSRDDAKPLLRLKGFPSFPLVERQANEVDWWDMVCNVKKLINEKKEDGKVFWQNLAGYKRQEALRPYLSSEEDRKKGKKFARYQLGDLLLHLEKKHEGEDWGKVYDEAWERIDKKVEGLSKHIKLEEERRSEDAQSKAALTDWLRAKASFVIEGLKEADKDEFCRCELKLQKWYGDLRGKPFAIEAENSILDISGFSKQYNCAFIWQKDGVKKLNLYLIINYFKGGKLRFKKIKPEAFEANRFYTVINKKSGEIVPMEVNFNFDDPNLIILPLAFGKRQGREFIWNDLLSLETGSLKLANGRVIEKTLYNRRTRQDEPALFVALTFERREVLDSSNIKPMNLIGVDRGENIPAVIALTDPEGCPLSRFKDSLGNPTHILRIGESYKEKQRTIQAKKEVEQRRAGGYSRKYASKAKNLADDMVRNTARDLLYYAVTQDAMLIFENLSRGFGRQGKRTFMAERQYTRMEDWLTAKLAYEGLPSKTYLSKTLAQYTSKTCSNCGFTITSADYDRVLEKLKKTATGWMTTINGKELKVEGQITYYNRYKRQNVVKDLSVELDRLSEESVNNDISSWTKGRSGEALSLLKKRFSHRPVQEKFVCLNCGFETHADEQAALNIARSWLFLRSQEYKKYQTNKTTGNTDKRAFVETWQSFYRKKLKEVWKPAV

SEQ ID NO: 35600 - protein, 978 aa, synthetic construct
  REGION 1..978: note = engineered CasX variant
QEIKRINKIRRRLVKDSNTKKAGKTGPMKTLLVRVMTPDLRERLENLRKKPENIPQPISNTSRANLNKLLTDYTEMKKAILHVYWEEFQKDPVGLMSRVAQPASKKIDQNKLKPEMDEKGNLTTAGFACSQCGQPLFVYKLEQVSEKGKAYTNYFGRCNVAEHEKLILLAQLKPEKDSDEAVTYSLGKFGQRALDFYSIHVTKESTHPVKPLAQIAGNRYASPVGKALSDACMGTIASFLSKYQDIIIEHQKVVKGNQKRLESLRELAGKENLEYPSVTLPPQPHTSEGVDAYNEVIARVRMWVNLNLWQKLKLSRDDAKPLLRLKGFPSFPLVERQANEVDWWDMVCNVKKLINEKKEDGKVFWQNLAGYKRQEALRPYLSSEEDRKKGKKFARYQLGDLLLHLEKKHEGEDWGKVYDEAWERIDKKVEGLSKHIKLEEERRSEDAQSKAALTDWLRAKASFVIEGLKEADKDEFCRCELKLQKWYGDLRGKPFAIEAENSILDISGFSKQYNCAFIWQKDGVKKLNLYLIINYFKGGKLRFKKIKPEAFEANRFYTVINKKSGEIVPMEVNFNFDDPNLIILPLAFGKRQGREFIWNDLLSLETGSLKLANGRVIEKTLYNRRTRQDEPALFVALTFERREVLDSSNIKPMNLIGVDRGENIPAVIALTDPEGCPLSRFKDSLGNPTHILRIGESYKEKQRTIQAKKEVEQRRAGGYSRKYASKAKNLADDMVRNTARDLLYYAVTQDAMLIFENLSRGFGRQGKRTFMAERQYTRMEDWLTAKLAYEGLPSKTYLSKTLAQYTSKTCSNCGFTITSADYDRVLEKLKKTATGWMTTINGKELKVEGQITYYNRYKRQNVVKDLSVELDRLSEESVNNDISSWTKGRSGEALSLLKKRFSHRPVQEKFVCLNCGFETHADEQAALNIARSWLFLRSQEYKKYQTNKTTGNTDKRAFVETWQSFYRKKLKEVWKPAV

SEQ ID NO: 35601 - protein, 978 aa, synthetic construct
  REGION 1..978: note = engineered CasX variant
QEIKRINKIRRRLVKDSNTKKAGKTGPMKTLLVRVMTPDLRERLENLRKKPENIPQPISNTSRANLNKLLTDYTEMKKAILHVYWEEFQKDPVGLMSRVAQPASKKIDQNKLKPEMDEKGNLTTAGFACSQCGQPLFVYKLEQVSEKGKAYTNYFGRCNVAEHEKLILLAQLKPEKDSDEAVTYSLGKFGQRALDFYSIHVTKESTHPVKPLAQIAGNRYASYPVGKALSDACMGTIASFLSKYQDIIIEHQKVVKGNQKRLESLRELAGKENLEYPSVTLPPQPHTSEGVDAYNEVIARVRMWVNLNLWQKLKLSRDDAKPLLRLKGFPSFPLVERQANEVDWWDMVCNVKKLINEKKEDGKVFWQNLAGYKRQEALRPYLSSEEDRKKGKKFARYQLGDLLLHLEKKHGEDWGKVYDEAWERIDKKVEGLSKHIKLEEERRSEDAQSKAALTDWLRAKASFVIEGLKEADKDEFCRCDLKLQKWYGDLRGKPFAIEAENSILDISGFSKQYNCAFIWQKDGVKKLNLYLIINYFKGGKLRFKKIKPEAFEANRFYTVINKKSGEIVPMEVNFNFDDPNLIILPLAFGKRQGREFIWNDLLSLETGSLKLANGRVIEKTLYNRRTRQDEPALFVALTFERREVLDSSNIKPMNLIGVDRGENIPAVIALTDPEGCPLSRFKDSLGNPTHILRIGESYKEKQRTIQAKKEVEQRRAGGYSRKYASKAKNLADDMVRNTARDLLYYAVTQDAMLIFENLSRGFGRQGKRTFMAERQYTRMEDWLTAKLAYEGLPSKTYLSKTLAQYTSKTCSNCGFTITSADYDRVLEKLKKTATGWMTTINGKELKVEGQITYYNRYKRQNVVKDLSVELDRLSEESVNNDISSWTKGRSGEALSLLKKRFSHRPVQEKFVCLNCGFETHADEQAALNIARSWLFLRSQEYKKYQTNKTTGNTDKRAFVETWQSFYRKKLKEVWKPAV

SEQ ID NO: 35602 - protein, 978 aa, synthetic construct
  REGION 1..978: note = engineered CasX variant
QEIKRINKIRRRLVKDSNTKKAGKTGPMKTLLVRVMTPDLRERLENLRKKPENIPQPISNTSRANLNKLLTDYTEMKKAILHVYWEEFQKDPVGLMSRVAQPASKKIDQNKLKPEMDEKGNLTTAGFACSQCGQPLFVYKLEQVSEKGKAYTNYFGRCNVAEHEKLILLAQLKPEKDSDEAVTYSLGKFGQRALDFYSIHVTKESTHPVKPLAQIAGNRYASHPVGKALSDACMGTIASFLSKYQDIIIEHQKVVKGNQKRLESLRELAGKENLEYPSVTLPPQPHTSEGVDAYNEVIARVRMWVNLNLWQKLKLSRDDAKPLLRLKGFPSFPLVERQANEVDWWDMVCNVKKLINEKKEDGKVFWQNLAGYKRQEALRPYLSSEEDRKKGKKFARYQLGDLLLHLEKKHGEDWGKVYDEAWERIDKKVEGLSKHIKLEEERRSEDAQSKAALTDWLRAKASFVIEGLKEADKDEFCRCDLKLQKWYGDLRGKPFAIEAENSILDISGFSKQYNCAFIWQKDGVKKLNLYLIINYFKGGKLRFKKIKPEAFEANRFYTVINKKSGEIVPMEVNFNFDDPNLIILPLAFGKRQGREFIWNDLLSLETGSLKLANGRVIEKTLYNRRTRQDEPALFVALTFERREVLDSSNIKPMNLIGVDRGENIPAVIALTDPEGCPLSRFKDSLGNPTHILRIGESYKEKQRTIQAKKEVEQRRAGGYSRKYASKAKNLADDMVRNTARDLLYYAVTQDAMLIFENLSRGFGRQGKRTFMAERQYTRMEDWLTAKLAYEGLPSKTYLSKTLAQYTSKTCSNCGFTITSADYDRVLEKLKKTATGWMTTINGKELKVEGQITYYNRYKRQNVVKDLSVELDRLSEESVNNDISSWTKGRSGEALSLLKKRFSHRPVQEKFVCLNCGFETHADEQAALNIARSWLFLRSQEYKKYQTNKTTGNTDKRAFVETWQSFYRKKLKEVWKPAV

SEQ ID NO: 35603 - protein, 978 aa, synthetic construct
  REGION 1..978: note = engineered CasX variant
QEIKRINKIRRRLVKDSNTKKAGKTGPMKTLLVRVMTPDLRERLENLRKKPENIPQPISNTSRANLNKLLTDYTEMKKAILHVYWEEFQKDPVGLMSRVAQPASKKIDQNKLKPEMDEKGNLTTAGFACSQCGQPLFVYKLEQVSEKGKAYTNYFGRCNVAEHEKLILLAQLKPEKDSDEAVTYSLGKFGQRALDFYSIHVTKESTHPVKPLAQIAGNRYASSPVGKALSDACMGTIASFLSKYQDIIIEHQKVVKGNQKRLESLRELAGKENLEYPSVTLPPQPHTSEGVDAYNEVIARVRMWVNLNLWQKLKLSRDDAKPLLRLKGFPSFPLVERQANEVDWWDMVCNVKKLINEKKEDGKVFWQNLAGYKRQEALRPYLSSEEDRKKGKKFARYQLGDLLLHLEKKHGEDWGKVYDEAWERIDKKVEGLSKHIKLEEERRSEDAQSKAALTDWLRAKASFVIEGLKEADKDEFCRCDLKLQKWYGDLRGKPFAIEAENSILDISGFSKQYNCAFIWQKDGVKKLNLYLIINYFKGGKLRFKKIKPEAFEANRFYTVINKKSGEIVPMEVNFNFDDPNLIILPLAFGKRQGREFIWNDLLSLETGSLKLANGRVIEKTLYNRRTRQDEPALFVALTFERREVLDSSNIKPMNLIGVDRGENIPAVIALTDPEGCPLSRFKDSLGNPTHILRIGESYKEKQRTIQAKKEVEQRRAGGYSRKYASKAKNLADDMVRNTARDLLYYAVTQDAMLIFENLSRGFGRQGKRTFMAERQYTRMEDWLTAKLAYEGLPSKTYLSKTLAQYTSKTCSNCGFTITSADYDRVLEKLKKTATGWMTTINGKELKVEGQITYYNRYKRQNVVKDLSVELDRLSEESVNNDISSWTKGRSGEALSLLKKRFSHRPVQEKFVCLNCGFETHADEQAALNIARSWLFLRSQEYKKYQTNKTTGNTDKRAFVETWQSFYRKKLKEVWKPAV

SEQ ID NO: 35604 - protein, 978 aa, synthetic construct
  REGION 1..978: note = engineered CasX variant
QEIKRINKIRRRLVKDSNTKKAGKTGPMKTLLVRVMTPDLRERLENLRKKPENIPQPISNTSRANLNKLLTDYTEMKKAILHVYWEEFQKDPVGLMSRVAQPASKKIDQNKLKPEMDEKGNLTTAGFACSQCGQPLFVYKLEQVSEKGKAYTNYFGRCNVAEHEKLILLAQLKPEKDSDEAVTYSLGKFGQRALDFYSIHVTKESTHPVKPLAQIAGNRYASTPVGKALSDACMGTIASFLSKYQDIIIEHQKVVKGNQKRLESLRELAGKENLEYPSVTLPPQPHTSEGVDAYNEVIARVRMWVNLNLWQKLKLSRDDAKPLLRLKGFPSFPLVERQANEVDWWDMVCNVKKLINEKKEDGKVFWQNLAGYKRQEALRPYLSSEEDRKKGKKFARYQLGDLLLHLEKKHGEDWGKVYDEAWERIDKKVEGLSKHIKLEEERRSEDAQSKAALTDWLRAKASFVIEGLKEADKDEFCRCDLKLQKWYGDLRGKPFAIEAENSILDISGFSKQYNCAFIWQKDGVKKLNLYLIINYFKGGKLRFKKIKPEAFEANRFYTVINKKSGEIVPMEVNFNFDDPNLIILPLAFGKRQGREFIWNDLLSLETGSLKLANGRVIEKTLYNRRTRQDEPALFVALTFERREVLDSSNIKPMNLIGVDRGENIPAVIALTDPEGCPLSRFKDSLGNPTHILRIGESYKEKQRTIQAKKEVEQRRAGGYSRKYASKAKNLADDMVRNTARDLLYYAVTQDAMLIFENLSRGFGRQGKRTFMAERQYTRMEDWLTAKLAYEGLPSKTYLSKTLAQYTSKTCSNCGFTITSADYDRVLEKLKKTATGWMTTINGKELKVEGQITYYNRYKRQNVVKDLSVELDRLSEESVNNDISSWTKGRSGEALSLLKKRFSHRPVQEKFVCLNCGFETHADEQAALNIARSWLFLRSQEYKKYQTNKTTGNTDKRAFVETWQSFYRKKLKEVWKPAV

SEQ ID NO: 35605 - protein, 978 aa, synthetic construct
  REGION 1..978: note = engineered CasX variant
QEIKRINKIRRRLVKDSNTKKAGKTGPMKTLLVRVMTPDLRERLENLRKKPENIPQPISNTSRANLNKLLTDYTEMKKAILHVYWEEFQKDPVGLMSRVAQPASKKIDQNKLKPEMDEKGNLTTAGFACSQCGQPLFVYKLEQVSEKGKAYTNYFGRCNVAEHEKLILLAQLKPEKDSDEAVTYSLGKFGQRALDFYSIHVTKESTHPVKPLAQIAGNRYASAPVGKALSDACMGTIASFLSKYQDIIIEHQKVVKGNQKRLESLRELAGKENLEYPSVTLPPQPHTSEGVDAYNEVIARVRMWVNLNLWQKLKLSRDDAKPLLRLKGFPSFPLVERQANEVDWWDMVCNVKKLINEKKEDGKVFWQNLAGYKRQEALRPYLSSEEDRKKGKKFARYQLGDLLLHLEKKHGEDWGKVYDEAWERIDKKVEGLSKHIKLEEERRSEDAQSKAALTDWLRAKASFVIEGLKEADKDEFCRCDLKLQKWYGDLRGKPFAIEAENSILDISGFSKQYNCAFIWQKDGVKKLNLYLIINYFKGGKLRFKKIKPEAFEANRFYTVINKKSGEIVPMEVNFNFDDPNLIILPLAFGKRQGREFIWNDLLSLETGSLKLANGRVIEKTLYNRRTRQDEPALFVALTFERREVLDSSNIKPMNLIGVDRGENIPAVIALTDPEGCPLSRFKDSLGNPTHILRIGESYKEKQRTIQAKKEVEQRRAGGYSRKYASKAKNLADDMVRNTARDLLYYAVTQDAMLIFENLSRGFGRQGKRTFMAERQYTRMEDWLTAKLAYEGLPSKTYLSKTLAQYTSKTCSNCGFTITSADYDRVLEKLKKTATGWMTTINGKELKVEGQITYYNRYKRQNVVKDLSVELDRLSEESVNNDISSWTKGRSGEALSLLKKRFSHRPVQEKFVCLNCGFETHADEQAALNIARSWLFLRSQEYKKYQTNKTTGNTDKRAFVETWQSFYRKKLKEVWKPAV

SEQ ID NO: 35606 - protein, 978 aa, synthetic construct
  REGION 1..978: note = engineered CasX variant
QEIKRINKIRRRLVKDSNTKKAGKTGPMKTLLVRVMTPDLRERLENLRKKPENIPQPISNTSRANLNKLLTDYTEMKKAILHVYWEEFQKDPVGLMSRVAQPASKKIDQNKLKPEMDEKGNLTTAGFACSQCGQPLFVYKLEQVSEKGKAYTNYFGRCNVAEHEKLILLAQLKPEKDSDEAVTYSLGKFGQRALDFYSIHVTKESTHPVKPLAQIAGNRYASVPVGKALSDACMGTIASFLSKYQDIIIEHQKVVKGNQKRLESLRELAGKENLEYPSVTLPPQPHTSEGVDAYNEVIARVRMWVNLNLWQKLKLSRDDAKPLLRLKGFPSFPLVERQANEVDWWDMVCNVKKLINEKKEDGKVFWQNLAGYKRQEALRPYLSSEEDRKKGKKFARYQLGDLLLHLEKKHGEDWGKVYDEAWERIDKKVEGLSKHIKLEEERRSEDAQSKAALTDWLRAKASFVIEGLKEADKDEFCRCDLKLQKWYGDLRGKPFAIEAENSILDISGFSKQYNCAFIWQKDGVKKLNLYLIINYFKGGKLRFKKIKPEAFEANRFYTVINKKSGEIVPMEVNFNFDDPNLIILPLAFGKRQGREFIWNDLLSLETGSLKLANGRVIEKTLYNRRTRQDEPALFVALTFERREVLDSSNIKPMNLIGVDRGENIPAVIALTDPEGCPLSRFKDSLGNPTHILRIGESYKEKQRTIQAKKEVEQRRAGGYSRKYASKAKNLADDMVRNTARDLLYYAVTQDAMLIFENLSRGFGRQGKRTFMAERQYTRMEDWLTAKLAYEGLPSKTYLSKTLAQYTSKTCSNCGFTITSADYDRVLEKLKKTATGWMTTINGKELKVEGQITYYNRYKRQNVVKDLSVELDRLSEESVNNDISSWTKGRSGEALSLLKKRFSHRPVQEKFVCLNCGFETHADEQAALNIARSWLFLRSQEYKKYQTNKTTGNTDKRAFVETWQSFYRKKLKEVWKPAV

SEQ ID NO: 35607 - protein, 978 aa, synthetic construct
  REGION 1..978: note = engineered CasX variant
QEIKRINKIRRRLVKDSNTKKAGKTGPMKTLLVRVMTPDLRERLENLRKKPENIPQPISNTSRANLNKLLTDYTEMKKAILHVYWEEFQKDPVGLMSRVAQPASKKIDQNKLKPEMDEKGNLTTAGFACSQCGQPLFVYKLEQVSEKGKAYTNYFGRCNVAEHEKLIKLAQLKPEKDSDEAVTYSLGKFGQRALDFYSIHVTKESTHPVKPLAQIAGNRYASGPVGKALSDACMGTIASFLSKYQDIIIEHQKVVKGNQKRLESLRELAGKENLEYPSVTLPPQPHTSEGVDAYNEVIARVRMWVNLNLWQKLKLSRDDAKPLLRLKGFPSFPLVERQANEVDWWDMVCNVKKLINEKKEDGKVFWQNLAGYKRQEALRPYLSSEEDRKKGKKFARYQLGDLLLHLEKKHGEDWGKVYDEAWERIDKKVEGLSKHIKLEEERRSEDAQSKAALTDWLRAKASFVIEGLKEADKDEFCRCDLKLQKWYGDLRGKPFAIEAENSILDISGFSKQYNCAFIWQKDGVKKLNLYLIINYFKGGKLRFKKIKPEAFEANRFYTVINKKSGEIVPMEVNFNFDDPNLIILPLAFGKRQGREFIWNDLLSLETGSLKLANGRVIEKTLYNRRTRQDEPALFVALTFERREVLDSSNIKPMNLIGVDRGENIPAVIALTDPEGCPLSRFKDSLGNPTHILRIGESYKEKQRTIQAKKEVEQRRAGGYSRKYASKAKNLADDMVRNTARDLLYYAVTQDAMLIFENLSRGFGRQGKRTFMAERQYTRMEDWLTAKLAYEGLPSKTYLSKTLAQYTSKTCSNCGFTITSADYDRVLEKLKKTATGWMTTINGKELKVEGQITYYNRYKRQNVVKDLSVELDRLSEESVNNDISSWTKGRSGEALSLLKKRFSHRPVQEKFVCLNCGFETHADEQAALNIARSWLFLRSQEYKKYQTNKTTGNTDKRAFVETWQSFYRKKLKEVWKPAV

SEQ ID NO: 35608 - protein, 977 aa, synthetic construct
  REGION 1..977: note = engineered CasX variant
QEIKRINKIRRRLVKDSNTKKAGKTGPMKTLLVRVMTPDLRERLENLRKKPENIPQPISNTSRANLNKLLTDYTEMKKAILHVYWEEFQKDPVGLMSRVAQPASKKIDQNKLKPEMDEKGNLTTAGFACSQCGQPLFVYKLEQVSEKGKAYTNYFGRCNVAEHEKLILLAQLKPEKDSDEAVTYSLGKFGQRALDFYSIHVTKESTHPVKPLAQIAGNRYASPVGKALSDACMGTIASFLSKYQDIIIEHQKVVKGNQKRLESLRELAGKENLEYPSVTLPPQPHTSEGVDAYNEVIARVRMWVNLNLWQKLKLSRDDAKPLLRLKGFPSFPLVERQANEVDWWDMVCNVKKLINEKKEDGKVFWQNLAGYKRQEALRPYLSSEEDRKKGKKFARYQLGDLLLHLEKKHGEDWGKVYDEAWERIDKKVEGLSKHIKLEEERRSEDAQSKAALTDWLRAKASFVIEGLKEADKDEFCRCDLKLQKWYGDLRGKPFAIEAENSILDISGFSKQYNCAFIWQKDGVKKLNLYLIINYFKGGKLRFKKIKPEAFEANRFYTVINKKSGEIVPMEVNFNFDDPNLIILPLAFGKRQGREFIWNDLLSLETGSLKLANGRVIEKTLYNRRTRQDEPALFVALTFERREVLDSSNIKPMNLIGVDRGENIPAVIALTDPEGCPLSRFKDSLGNPTHILRIGESYKEKQRTIQAKKEVEQRRAGGYSRKYASKAKNLADDMVRNTARDLLYYAVTQDAMLIFENLSRGFGRQGKRTFMAERQYTRMEDWLTAKLAYEGLPSKTYLSKTLAQYTSKTCSNCGFTITSADYDRVLEKLKKTATGWMTTINGKELKVEGQITYYNRYKRQNVVKDLSVELDRLSEESVNNDISSWTKGRSGEALSLLKKRFSHRPVQEKFVCLNCGFETHADEQAALNIARSWLFLRSQEYKKYQTNKTTGNTDKRAFVETWQSFYRKKLKEVWKPAV

SEQ ID NO: 35609 - protein, 978 aa, synthetic construct
  REGION 1..978: note = engineered CasX variant
QEIKRINKIRRRLVKDSNTKKAGKTGPMKTLLVRVMTPDLRERLENLRKKPENIPQPISNTSRANLNKLLTDYTEMKKAILHVYWEEFQKDPVGLMSRVAQPASKKIDQNKLKPEMDEKGNLTTAGFACSQCGQPLFVYKLEQVSEKGKAYTNYFGRCNVAEHEKLILLAQLKPEKDSDEAVTYSLGKFGQRALDFYSIHVTKESTHPVKPLAQIAGNRYASYPVGKALSDACMGTIASFLSKYQDIIIEHQKVVKGNQKRLESLRELAGKENLEYPSVTLPPQPHTSEGVDAYNEVIARVRMWVNLNLWQKLKLSRDDAKPLLRLKGFPSFPLVERQANEVDWWDMVCNVKKLINEKKEDGKVFWQNLAGYKRQEALRPYLSSEEDRKKGKKFARYQLGDLLLHLEKKHGEDWGKVYDEAWERIDKKVEGLSKHIKLEEERRSEDAQSKAALTDWLRAKASFVIEGLKEADKDEFCRCELKLQKWYGDLRGKPFAIEAENSILDISGFSKQYNCAFIWQKDGVKKLNLYLIINYFKGGKLRFKKIKPEAFEANRFYTVINKKSGEIVPMEVNFNFDDPNLIILPLAFGKRFGREFIWNDLLSLETGSLKLANGRVIEKTLYNRRTRQDEPALFVALTFERREVLDSSNIKPMNLIGVDRGENIPAVIALTDPEGCPLSRFKDSLGNPTHILRIGESYKEKQRTIQAKKEVEQRRAGGYSRKYASKAKNLADDMVRNTARDLLYYAVTQDAMLIFENLSRGFGRQGKRTFMAERQYTRMEDWLTAKLAYEGLPSKTYLSKTLAQYTSKTCSNCGFTITSADYDRVLEKLKKTATGWMTTINGKELKVEGQITYYNRYKRQNVVKDLSVELDRLSEESVNNDISSWTKGRSGEALSLLKKRFSHRPVQEKFVCLNCGFETHADEQAALNIARSWLFLRSQEYKKYQTNKTTGNTDKRAFVETWQSFYRKKLKEVWKPAV

SEQ ID NO: 35610 - protein, 978 aa, synthetic construct
  REGION 1..978: note = engineered CasX variant
QEIKRINKIRRRLVKDSNTKKAGKTGPMKTLLVRVMTPDLRERLENLRKKPENIPQPISNTSRANLNKLLTDYTEMKKAILHVYWEEFQKDPVGLMSRVAQPASKKIDQNKLKPEMDEKGNLTTAGFACSQCGQPLFVYKLEQVSEKGKAYTNYFGRCNVAEHEKLILLAQLKPEKDSDEAVTYSLGKFGQRALDFYSIHVTKESTHPVKPLAQIAGNRYASHPVGKALSDACMGTIASFLSKYQDIIIEHQKVVKGNQKRLESLRELAGKENLEYPSVTLPPQPHTSEGVDAYNEVIARVRMWVNLNLWQKLKLSRDDAKPLLRLKGFPSFPLVERQANEVDWWDMVCNVKKLINEKKEDGKVFWQNLAGYKRQEALRPYLSSEEDRKKGKKFARYQLGDLLLHLEKKHGEDWGKVYDEAWERIDKKVEGLSKHIKLEEERRSEDAQSKAALTDWLRAKASFVIEGLKEADKDEFCRCELKLQKWYGDLRGKPFAIEAENSILDISGFSKQYNCAFIWQKDGVKKLNLYLIINYFKGGKLRFKKIKPEAFEANRFYTVINKKSGEIVPMEVNFNFDDPNLIILPLAFGKRFGREFIWNDLLSLETGSLKLANGRVIEKTLYNRRTRQDEPALFVALTFERREVLDSSNIKPMNLIGVDRGENIPAVIALTDPEGCPLSRFKDSLGNPTHILRIGESYKEKQRTIQAKKEVEQRRAGGYSRKYASKAKNLADDMVRNTARDLLYYAVTQDAMLIFENLSRGFGRQGKRTFMAERQYTRMEDWLTAKLAYEGLPSKTYLSKTLAQYTSKTCSNCGFTITSADYDRVLEKLKKTATGWMTTINGKELKVEGQITYYNRYKRQNVVKDLSVELDRLSEESVNNDISSWTKGRSGEALSLLKKRFSHRPVQEKFVCLNCGFETHADEQAALNIARSWLFLRSQEYKKYQTNKTTGNTDKRAFVETWQSFYRKKLKEVWKPAV

SEQ ID NO: 35611 - protein, 978 aa, synthetic construct
  REGION 1..978: note = engineered CasX variant
QEIKRINKIRRRLVKDSNTKKAGKTGPMKTLLVRVMTPDLRERLENLRKKPENIPQPISNTSRANLNKLLTDYTEMKKAILHVYWEEFQKDPVGLMSRVAQPASKKIDQNKLKPEMDEKGNLTTAGFACSQCGQPLFVYKLEQVSEKGKAYTNYFGRCNVAEHEKLILLAQLKPEKDSDEAVTYSLGKFGQRALDFYSIHVTKESTHPVKPLAQIAGNRYASSPVGKALSDACMGTIASFLSKYQDIIIEHQKVVKGNQKRLESLRELAGKENLEYPSVTLPPQPHTSEGVDAYNEVIARVRMWVNLNLWQKLKLSRDDAKPLLRLKGFPSFPLVERQANEVDWWDMVCNVKKLINEKKEDGKVFWQNLAGYKRQEALRPYLSSEEDRKKGKKFARYQLGDLLLHLEKKHGEDWGKVYDEAWERIDKKVEGLSKHIKLEEERRSEDAQSKAALTDWLRAKASFVIEGLKEADKDEFCRCELKLQKWYGDLRGKPFAIEAENSILDISGFSKQYNCAFIWQKDGVKKLNLYLIINYFKGGKLRFKKIKPEAFEANRFYTVINKKSGEIVPMEVNFNFDDPNLIILPLAFGKRFGREFIWNDLLSLETGSLKLANGRVIEKTLYNRRTRQDEPALFVALTFERREVLDSSNIKPMNLIGVDRGENIPAVIALTDPEGCPLSRFKDSLGNPTHILRIGESYKEKQRTIQAKKEVEQRRAGGYSRKYASKAKNLADDMVRNTARDLLYYAVTQDAMLIFENLSRGFGRQGKRTFMAERQYTRMEDWLTAKLAYEGLPSKTYLSKTLAQYTSKTCSNCGFTITSADYDRVLEKLKKTATGWMTTINGKELKVEGQITYYNRYKRQNVVKDLSVELDRLSEESVNNDISSWTKGRSGEALSLLKKRFSHRPVQEKFVCLNCGFETHADEQAALNIARSWLFLRSQEYKKYQTNKTTGNTDKRAFVETWQSFYRKKLKEVWKPAV

SEQ ID NO: 35612 - protein, 978 aa, synthetic construct
  REGION 1..978: note = engineered CasX variant
QEIKRINKIRRRLVKDSNTKKAGKTGPMKTLLVRVMTPDLRERLENLRKKPENIPQPISNTSRANLNKLLTDYTEMKKAILHVYWEEFQKDPVGLMSRVAQPASKKIDQNKLKPEMDEKGNLTTAGFACSQCGQPLFVYKLEQVSEKGKAYTNYFGRCNVAEHEKLILLAQLKPEKDSDEAVTYSLGKFGQRALDFYSIHVTKESTHPVKPLAQIAGNRYASTPVGKALSDACMGTIASFLSKYQDIIIEHQKVVKGNQKRLESLRELAGKENLEYPSVTLPPQPHTSEGVDAYNEVIARVRMWVNLNLWQKLKLSRDDAKPLLRLKGFPSFPLVERQANEVDWWDMVCNVKKLINEKKEDGKVFWQNLAGYKRQEALRPYLSSEEDRKKGKKFARYQLGDLLLHLEKKHGEDWGKVYDEAWERIDKKVEGLSKHIKLEEERRSEDAQSKAALTDWLRAKASFVIEGLKEADKDEFCRCELKLQKWYGDLRGKPFAIEAENSILDISGFSKQYNCAFIWQKDGVKKLNLYLIINYFKGGKLRFKKIKPEAFEANRFYTVINKKSGEIVPMEVNFNFDDPNLIILPLAFGKRFGREFIWNDLLSLETGSLKLANGRVIEKTLYNRRTRQDEPALFVALTFERREVLDSSNIKPMNLIGVDRGENIPAVIALTDPEGCPLSRFKDSLGNPTHILRIGESYKEKQRTIQAKKEVEQRRAGGYSRKYASKAKNLADDMVRNTARDLLYYAVTQDAMLIFENLSRGFGRQGKRTFMAERQYTRMEDWLTAKLAYEGLPSKTYLSKTLAQYTSKTCSNCGFTITSADYDRVLEKLKKTATGWMTTINGKELKVEGQITYYNRYKRQNVVKDLSVELDRLSEESVNNDISSWTKGRSGEALSLLKKRFSHRPVQEKFVCLNCGFETHADEQAALNIARSWLFLRSQEYKKYQTNKTTGNTDKRAFVETWQSFYRKKLKEVWKPAV

SEQ ID NO: 35613 - protein, 978 aa, synthetic construct
  REGION 1..978: note = engineered CasX variant
QEIKRINKIRRRLVKDSNTKKAGKTGPMKTLLVRVMTPDLRERLENLRKKPENIPQPISNTSRANLNKLLTDYTEMKKAILHVYWEEFQKDPVGLMSRVAQPASKKIDQNKLKPEMDEKGNLTTAGFACSQCGQPLFVYKLEQVSEKGKAYTNYFGRCNVAEHEKLILLAQLKPEKDSDEAVTYSLGKFGQRALDFYSIHVTKESTHPVKPLAQIAGNRYASAPVGKALSDACMGTIASFLSKYQDIIIEHQKVVKGNQKRLESLRELAGKENLEYPSVTLPPQPHTSEGVDAYNEVIARVRMWVNLNLWQKLKLSRDDAKPLLRLKGFPSFPLVERQANEVDWWDMVCNVKKLINEKKEDGKVFWQNLAGYKRQEALRPYLSSEEDRKKGKKFARYQLGDLLLHLEKKHGEDWGKVYDEAWERIDKKVEGLSKHIKLEEERRSEDAQSKAALTDWLRAKASFVIEGLKEADKDEFCRCELKLQKWYGDLRGKPFAIEAENSILDISGFSKQYNCAFIWQKDGVKKLNLYLIINYFKGGKLRFKKIKPEAFEANRFYTVINKKSGEIVPMEVNFNFDDPNLIILPLAFGKRFGREFIWNDLLSLETGSLKLANGRVIEKTLYNRRTRQDEPALFVALTFERREVLDSSNIKPMNLIGVDRGENIPAVIALTDPEGCPLSRFKDSLGNPTHILRIGESYKEKQRTIQAKKEVEQRRAGGYSRKYASKAKNLADDMVRNTARDLLYYAVTQDAMLIFENLSRGFGRQGKRTFMAERQYTRMEDWLTAKLAYEGLPSKTYLSKTLAQYTSKTCSNCGFTITSADYDRVLEKLKKTATGWMTTINGKELKVEGQITYYNRYKRQNVVKDLSVELDRLSEESVNNDISSWTKGRSGEALSLLKKRFSHRPVQEKFVCLNCGFETHADEQAALNIARSWLFLRSQEYKKYQTNKTTGNTDKRAFVETWQSFYRKKLKEVWKPAV

SEQ ID NO: 35614 - protein, 978 aa, synthetic construct
  REGION 1..978: note = engineered CasX variant
QEIKRINKIRRRLVKDSNTKKAGKTGPMKTLLVRVMTPDLRERLENLRKKPENIPQPISNTSRANLNKLLTDYTEMKKAILHVYWEEFQKDPVGLMSRVAQPASKKIDQNKLKPEMDEKGNLTTAGFACSQCGQPLFVYKLEQVSEKGKAYTNYFGRCNVAEHEKLILLAQLKPEKDSDEAVTYSLGKFGQRALDFYSIHVTKESTHPVKPLAQIAGNRYASVPVGKALSDACMGTIASFLSKYQDIIIEHQKVVKGNQKRLESLRELAGKENLEYPSVTLPPQPHTSEGVDAYNEVIARVRMWVNLNLWQKLKLSRDDAKPLLRLKGFPSFPLVERQANEVDWWDMVCNVKKLINEKKEDGKVFWQNLAGYKRQEALRPYLSSEEDRKKGKKFARYQLGDLLLHLEKKHGEDWGKVYDEAWERIDKKVEGLSKHIKLEEERRSEDAQSKAALTDWLRAKASFVIEGLKEADKDEFCRCELKLQKWYGDLRGKPFAIEAENSILDISGFSKQYNCAFIWQKDGVKKLNLYLIINYFKGGKLRFKKIKPEAFEANRFYTVINKKSGEIVPMEVNFNFDDPNLIILPLAFGKRFGREFIWNDLLSLETGSLKLANGRVIEKTLYNRRTRQDEPALFVALTFERREVLDSSNIKPMNLIGVDRGENIPAVIALTDPEGCPLSRFKDSLGNPTHILRIGESYKEKQRTIQAKKEVEQRRAGGYSRKYASKAKNLADDMVRNTARDLLYYAVTQDAMLIFENLSRGFGRQGKRTFMAERQYTRMEDWLTAKLAYEGLPSKTYLSKTLAQYTSKTCSNCGFTITSADYDRVLEKLKKTATGWMTTINGKELKVEGQITYYNRYKRQNVVKDLSVELDRLSEESVNNDISSWTKGRSGEALSLLKKRFSHRPVQEKFVCLNCGFETHADEQAALNIARSWLFLRSQEYKKYQTNKTTGNTDKRAFVETWQSFYRKKLKEVWKPAV

SEQ ID NO: 35615 - protein, 978 aa, synthetic construct
  REGION 1..978: note = engineered CasX variant
QEIKRINKIRRRLVKDSNTKKAGKTGPMKTLLVRVMTPDLRERLENLRKKPENIPQPISNTSRANLNKLLTDYTEMKKAILHVYWEEFQKDPVGLMSRVAQPASKKIDQNKLKPEMDEKGNLTTAGFACSQCGQPLFVYKLEQVSEKGKAYTNYFGRCNVAEHEKLIKLAQLKPEKDSDEAVTYSLGKFGQRALDFYSIHVTKESTHPVKPLAQIAGNRYASGPVGKALSDACMGTIASFLSKYQDIIIEHQKVVKGNQKRLESLRELAGKENLEYPSVTLPPQPHTSEGVDAYNEVIARVRMWVNLNLWQKLKLSRDDAKPLLRLKGFPSFPLVERQANEVDWWDMVCNVKKLINEKKEDGKVFWQNLAGYKRQEALRPYLSSEEDRKKGKKFARYQLGDLLLHLEKKHGEDWGKVYDEAWERIDKKVEGLSKHIKLEEERRSEDAQSKAALTDWLRAKASFVIEGLKEADKDEFCRCELKLQKWYGDLRGKPFAIEAENSILDISGFSKQYNCAFIWQKDGVKKLNLYLIINYFKGGKLRFKKIKPEAFEANRFYTVINKKSGEIVPMEVNFNFDDPNLIILPLAFGKRFGREFIWNDLLSLETGSLKLANGRVIEKTLYNRRTRQDEPALFVALTFERREVLDSSNIKPMNLIGVDRGENIPAVIALTDPEGCPLSRFKDSLGNPTHILRIGESYKEKQRTIQAKKEVEQRRAGGYSRKYASKAKNLADDMVRNTARDLLYYAVTQDAMLIFENLSRGFGRQGKRTFMAERQYTRMEDWLTAKLAYEGLPSKTYLSKTLAQYTSKTCSNCGFTITSADYDRVLEKLKKTATGWMTTINGKELKVEGQITYYNRYKRQNVVKDLSVELDRLSEESVNNDISSWTKGRSGEALSLLKKRFSHRPVQEKFVCLNCGFETHADEQAALNIARSWLFLRSQEYKKYQTNKTTGNTDKRAFVETWQSFYRKKLKEVWKPAV

SEQ ID NO: 35616 - protein, 977 aa, synthetic construct
  REGION 1..977: note = engineered CasX variant
QEIKRINKIRRRLVKDSNTKKAGKTGPMKTLLVRVMTPDLRERLENLRKKPENIPQPISNTSRANLNKLLTDYTEMKKAILHVYWEEFQKDPVGLMSRVAQPASKKIDQNKLKPEMDEKGNLTTAGFACSQCGQPLFVYKLEQVSEKGKAYTNYFGRCNVAEHEKLILLAQLKPEKDSDEAVTYSLGKFGQRALDFYSIHVTKESTHPVKPLAQIAGNRYASPVGKALSDACMGTIASFLSKYQDIIIEHQKVVKGNQKRLESLRELAGKENLEYPSVTLPPQPHTSEGVDAYNEVIARVRMWVNLNLWQKLKLSRDDAKPLLRLKGFPSFPLVERQANEVDWWDMVCNVKKLINEKKEDGKVFWQNLAGYKRQEALRPYLSSEEDRKKGKKFARYQLGDLLLHLEKKHGEDWGKVYDEAWERIDKKVEGLSKHIKLEEERRSEDAQSKAALTDWLRAKASFVIEGLKEADKDEFCRCELKLQKWYGDLRGKPFAIEAENSILDISGFSKQYNCAFIWQKDGVKKLNLYLIINYFKGGKLRFKKIKPEAFEANRFYTVINKKSGEIVPMEVNFNFDDPNLIILPLAFGKRFGREFIWNDLLSLETGSLKLANGRVIEKTLYNRRTRQDEPALFVALTFERREVLDSSNIKPMNLIGVDRGENIPAVIALTDPEGCPLSRFKDSLGNPTHILRIGESYKEKQRTIQAKKEVEQRRAGGYSRKYASKAKNLADDMVRNTARDLLYYAVTQDAMLIFENLSRGFGRQGKRTFMAERQYTRMEDWLTAKLAYEGLPSKTYLSKTLAQYTSKTCSNCGFTITSADYDRVLEKLKKTATGWMTTINGKELKVEGQITYYNRYKRQNVVKDLSVELDRLSEESVNNDISSWTKGRSGEALSLLKKRFSHRPVQEKFVCLNCGFETHADEQAALNIARSWLFLRSQEYKKYQTNKTTGNTDKRAFVETWQSFYRKKLKEVWKPAV

SEQ ID NO: 35617 - protein, 978 aa, synthetic construct
  REGION 1..978: note = engineered CasX variant
QEIKRINKIRRRLVKDSNTKKAGKTGPMKTLLVRVMTPDLRERLENLRKKPENIPQPISNTSRANLNKLLTDYTEMKKAILHVYWEEFQKDPVGLMSRVAQPASKKIDQNKLKPEMDEKGNLTTAGFACSQCGQPLFVYKLEQVSEKGKAYTNYFGRCNVAEHEKLILLAQLKPEKDSDEAVTYSLGKFGQRALDFYSIHVTKESTHPVKPLAQIAGNRYASYPVGKALSDACMGTIASFLSKYQDIIIEHQKVVKGNQKRLESLRELAGKENLEYPSVTLPPQPHTSEGVDAYNEVIARVRMWVNLNLWQKLKLSRDDAKPLLRLKGFPSFPLVERQANEVDWWDMVCNVKKLINEKKEDGKVFWQNLAGYKRQEALRPYLSSEEDRKKGKKFARYQLGDLLLHLEKKHGEDWGKVYDEAWERIDKKVEGLSKHIKLEEERRSEDAQSKAALTDWLRAKASFVIEGLKEADKDEFCRCELKLQKWYGDLRGKPFAIEAENSILDISGFSKQYNCAFIWQKDGVKKLNLYLIINYFKGGKLRFKKIKPEAFEANRFYTVINKKSGEIVPMEVNFNFDDPNLIILPLAFGKRVGREFIWNDLLSLETGSLKLANGRVIEKTLYNRRTRQDEPALFVALTFERREVLDSSNIKPMNLIGVDRGENIPAVIALTDPEGCPLSRFKDSLGNPTHILRIGESYKEKQRTIQAKKEVEQRRAGGYSRKYASKAKNLADDMVRNTARDLLYYAVTQDAMLIFENLSRGFGRQGKRTFMAERQYTRMEDWLTAKLAYEGLPSKTYLSKTLAQYTSKTCSNCGFTITSADYDRVLEKLKKTATGWMTTINGKELKVEGQITYYNRYKRQNVVKDLSVELDRLSEESVNNDISSWTKGRSGEALSLLKKRFSHRPVQEKFVCLNCGFETHADEQAALNIARSWLFLRSQEYKKYQTNKTTGNTDKRAFVETWQSFYRKKLKEVWKPAV

SEQ ID NO: 35618 - protein, 978 aa, synthetic construct
  REGION 1..978: note = engineered CasX variant
QEIKRINKIRRRLVKDSNTKKAGKTGPMKTLLVRVMTPDLRERLENLRKKPENIPQPISNTSRANLNKLLTDYTEMKKAILHVYWEEFQKDPVGLMSRVAQPASKKIDQNKLKPEMDEKGNLTTAGFACSQCGQPLFVYKLEQVSEKGKAYTNYFGRCNVAEHEKLILLAQLKPEKDSDEAVTYSLGKFGQRALDFYSIHVTKESTHPVKPLAQIAGNRYASHPVGKALSDACMGTIASFLSKYQDIIIEHQKVVKGNQKRLESLRELAGKENLEYPSVTLPPQPHTSEGVDAYNEVIARVRMWVNLNLWQKLKLSRDDAKPLLRLKGFPSFPLVERQANEVDWWDMVCNVKKLINEKKEDGKVFWQNLAGYKRQEALRPYLSSEEDRKKGKKFARYQLGDLLLHLEKKHGEDWGKVYDEAWERIDKKVEGLSKHIKLEEERRSEDAQSKAALTDWLRAKASFVIEGLKEADKDEFCRCELKLQKWYGDLRGKPFAIEAENSILDISGFSKQYNCAFIWQKDGVKKLNLYLIINYFKGGKLRFKKIKPEAFEANRFYTVINKKSGEIVPMEVNFNFDDPNLIILPLAFGKRVGREFIWNDLLSLETGSLKLANGRVIEKTLYNRRTRQDEPALFVALTFERREVLDSSNIKPMNLIGVDRGENIPAVIALTDPEGCPLSRFKDSLGNPTHILRIGESYKEKQRTIQAKKEVEQRRAGGYSRKYASKAKNLADDMVRNTARDLLYYAVTQDAMLIFENLSRGFGRQGKRTFMAERQYTRMEDWLTAKLAYEGLPSKTYLSKTLAQYTSKTCSNCGFTITSADYDRVLEKLKKTATGWMTTINGKELKVEGQITYYNRYKRQNVVKDLSVELDRLSEESVNNDISSWTKGRSGEALSLLKKRFSHRPVQEKFVCLNCGFETHADEQAALNIARSWLFLRSQEYKKYQTNKTTGNTDKRAFVETWQSFYRKKLKEVWKPAV

SEQ ID NO: 35619 - protein, 978 aa, synthetic construct
  REGION 1..978: note = engineered CasX variant
QEIKRINKIRRRLVKDSNTKKAGKTGPMKTLLVRVMTPDLRERLENLRKKPENIPQPISNTSRANLNKLLTDYTEMKKAILHVYWEEFQKDPVGLMSRVAQPASKKIDQNKLKPEMDEKGNLTTAGFACSQCGQPLFVYKLEQVSEKGKAYTNYFGRCNVAEHEKLILLAQLKPEKDSDEAVTYSLGKFGQRALDFYSIHVTKESTHPVKPLAQIAGNRYASSPVGKALSDACMGTIASFLSKYQDIIIEHQKVVKGNQKRLESLRELAGKENLEYPSVTLPPQPHTSEGVDAYNEVIARVRMWVNLNLWQKLKLSRDDAKPLLRLKGFPSFPLVERQANEVDWWDMVCNVKKLINEKKEDGKVFWQNLAGYKRQEALRPYLSSEEDRKKGKKFARYQLGDLLLHLEKKHGEDWGKVYDEAWERIDKKVEGLSKHIKLEEERRSEDAQSKAALTDWLRAKASFVIEGLKEADKDEFCRCELKLQKWYGDLRGKPFAIEAENSILDISGFSKQYNCAFIWQKDGVKKLNLYLIINYFKGGKLRFKKIKPEAFEANRFYTVINKKSGEIVPMEVNFNFDDPNLIILPLAFGKRVGREFIWNDLLSLETGSLKLANGRVIEKTLYNRRTRQDEPALFVALTFERREVLDSSNIKPMNLIGVDRGENIPAVIALTDPEGCPLSRFKDSLGNPTHILRIGESYKEKQRTIQAKKEVEQRRAGGYSRKYASKAKNLADDMVRNTARDLLYYAVTQDAMLIFENLSRGFGRQGKRTFMAERQYTRMEDWLTAKLAYEGLPSKTYLSKTLAQYTSKTCSNCGFTITSADYDRVLEKLKKTATGWMTTINGKELKVEGQITYYNRYKRQNVVKDLSVELDRLSEESVNNDISSWTKGRSGEALSLLKKRFSHRPVQEKFVCLNCGFETHADEQAALNIARSWLFLRSQEYKKYQTNKTTGNTDKRAFVETWQSFYRKKLKEVWKPAV

SEQ ID NO: 35620 - protein, 978 aa, synthetic construct
  REGION 1..978: note = engineered CasX variant
QEIKRINKIRRRLVKDSNTKKAGKTGPMKTLLVRVMTPDLRERLENLRKKPENIPQPISNTSRANLNKLLTDYTEMKKAILHVYWEEFQKDPVGLMSRVAQPASKKIDQNKLKPEMDEKGNLTTAGFACSQCGQPLFVYKLEQVSEKGKAYTNYFGRCNVAEHEKLILLAQLKPEKDSDEAVTYSLGKFGQRALDFYSIHVTKESTHPVKPLAQIAGNRYASTPVGKALSDACMGTIASFLSKYQDIIIEHQKVVKGNQKRLESLRELAGKENLEYPSVTLPPQPHTSEGVDAYNEVIARVRMWVNLNLWQKLKLSRDDAKPLLRLKGFPSFPLVERQANEVDWWDMVCNVKKLINEKKEDGKVFWQNLAGYKRQEALRPYLSSEEDRKKGKKFARYQLGDLLLHLEKKHGEDWGKVYDEAWERIDKKVEGLSKHIKLEEERRSEDAQSKAALTDWLRAKASFVIEGLKEADKDEFCRCELKLQKWYGDLRGKPFAIEAENSILDISGFSKQYNCAFIWQKDGVKKLNLYLIINYFKGGKLRFKKIKPEAFEANRFYTVINKKSGEIVPMEVNFNFDDPNLIILPLAFGKRVGREFIWNDLLSLETGSLKLANGRVIEKTLYNRRTRQDEPALFVALTFERREVLDSSNIKPMNLIGVDRGENIPAVIALTDPEGCPLSRFKDSLGNPTHILRIGESYKEKQRTIQAKKEVEQRRAGGYSRKYASKAKNLADDMVRNTARDLLYYAVTQDAMLIFENLSRGFGRQGKRTFMAERQYTRMEDWLTAKLAYEGLPSKTYLSKTLAQYTSKTCSNCGFTITSADYDRVLEKLKKTATGWMTTINGKELKVEGQITYYNRYKRQNVVKDLSVELDRLSEESVNNDISSWTKGRSGEALSLLKKRFSHRPVQEKFVCLNCGFETHADEQAALNIARSWLFLRSQEYKKYQTNKTTGNTDKRAFVETWQSFYRKKLKEVWKPAV

SEQ ID NO: 35621 - protein, 978 aa, synthetic construct
  REGION 1..978: note = engineered CasX variant
QEIKRINKIRRRLVKDSNTKKAGKTGPMKTLLVRVMTPDLRERLENLRKKPENIPQPISNTSRANLNKLLTDYTEMKKAILHVYWEEFQKDPVGLMSRVAQPASKKIDQNKLKPEMDEKGNLTTAGFACSQCGQPLFVYKLEQVSEKGKAYTNYFGRCNVAEHEKLILLAQLKPEKDSDEAVTYSLGKFGQRALDFYSIHVTKESTHPVKPLAQIAGNRYASAPVGKALSDACMGTIASFLSKYQDIIIEHQKVVKGNQKRLESLRELAGKENLEYPSVTLPPQPHTSEGVDAYNEVIARVRMWVNLNLWQKLKLSRDDAKPLLRLKGFPSFPLVERQANEVDWWDMVCNVKKLINEKKEDGKVFWQNLAGYKRQEALRPYLSSEEDRKKGKKFARYQLGDLLLHLEKKHGEDWGKVYDEAWERIDKKVEGLSKHIKLEEERRSEDAQSKAALTDWLRAKASFVIEGLKEADKDEFCRCELKLQKWYGDLRGKPFAIEAENSILDISGFSKQYNCAFIWQKDGVKKLNLYLIINYFKGGKLRFKKIKPEAFEANRFYTVINKKSGEIVPMEVNFNFDDPNLIILPLAFGKRVGREFIWNDLLSLETGSLKLANGRVIEKTLYNRRTRQDEPALFVALTFERREVLDSSNIKPMNLIGVDRGENIPAVIALTDPEGCPLSRFKDSLGNPTHILRIGESYKEKQRTIQAKKEVEQRRAGGYSRKYASKAKNLADDMVRNTARDLLYYAVTQDAMLIFENLSRGFGRQGKRTFMAERQYTRMEDWLTAKLAYEGLPSKTYLSKTLAQYTSKTCSNCGFTITSADYDRVLEKLKKTATGWMTTINGKELKVEGQITYYNRYKRQNVVKDLSVELDRLSEESVNNDISSWTKGRSGEALSLLKKRFSHRPVQEKFVCLNCGFETHADEQAALNIARSWLFLRSQEYKKYQTNKTTGNTDKRAFVETWQSFYRKKLKEVWKPAV

SEQ ID NO: 35622 - protein, 978 aa, synthetic construct
  REGION 1..978: note = engineered CasX variant
QEIKRINKIRRRLVKDSNTKKAGKTGPMKTLLVRVMTPDLRERLENLRKKPENIPQPISNTSRANLNKLLTDYTEMKKAILHVYWEEFQKDPVGLMSRVAQPASKKIDQNKLKPEMDEKGNLTTAGFACSQCGQPLFVYKLEQVSEKGKAYTNYFGRCNVAEHEKLILLAQLKPEKDSDEAVTYSLGKFGQRALDFYSIHVTKESTHPVKPLAQIAGNRYASVPVGKALSDACMGTIASFLSKYQDIIIEHQKVVKGNQKRLESLRELAGKENLEYPSVTLPPQPHTSEGVDAYNEVIARVRMWVNLNLWQKLKLSRDDAKPLLRLKGFPSFPLVERQANEVDWWDMVCNVKKLINEKKEDGKVFWQNLAGYKRQEALRPYLSSEEDRKKGKKFARYQLGDLLLHLEKKHGEDWGKVYDEAWERIDKKVEGLSKHIKLEEERRSEDAQSKAALTDWLRAKASFVIEGLKEADKDEFCRCELKLQKWYGDLRGKPFAIEAENSILDISGFSKQYNCAFIWQKDGVKKLNLYLIINYFKGGKLRFKKIKPEAFEANRFYTVINKKSGEIVPMEVNFNFDDPNLIILPLAFGKRVGREFIWNDLLSLETGSLKLANGRVIEKTLYNRRTRQDEPALFVALTFERREVLDSSNIKPMNLIGVDRGENIPAVIALTDPEGCPLSRFKDSLGNPTHILRIGESYKEKQRTIQAKKEVEQRRAGGYSRKYASKAKNLADDMVRNTARDLLYYAVTQDAMLIFENLSRGFGRQGKRTFMAERQYTRMEDWLTAKLAYEGLPSKTYLSKTLAQYTSKTCSNCGFTITSADYDRVLEKLKKTATGWMTTINGKELKVEGQITYYNRYKRQNVVKDLSVELDRLSEESVNNDISSWTKGRSGEALSLLKKRFSHRPVQEKFVCLNCGFETHADEQAALNIARSWLFLRSQEYKKYQTNKTTGNTDKRAFVETWQSFYRKKLKEVWKPAV

SEQ ID NO: 35623 - protein, 978 aa, synthetic construct
  REGION 1..978: note = engineered CasX variant
QEIKRINKIRRRLVKDSNTKKAGKTGPMKTLLVRVMTPDLRERLENLRKKPENIPQPISNTSRANLNKLLTDYTEMKKAILHVYWEEFQKDPVGLMSRVAQPASKKIDQNKLKPEMDEKGNLTTAGFACSQCGQPLFVYKLEQVSEKGKAYTNYFGRCNVAEHEKLIKLAQLKPEKDSDEAVTYSLGKFGQRALDFYSIHVTKESTHPVKPLAQIAGNRYASGPVGKALSDACMGTIASFLSKYQDIIIEHQKVVKGNQKRLESLRELAGKENLEYPSVTLPPQPHTSEGVDAYNEVIARVRMWVNLNLWQKLKLSRDDAKPLLRLKGFPSFPLVERQANEVDWWDMVCNVKKLINEKKEDGKVFWQNLAGYKRQEALRPYLSSEEDRKKGKKFARYQLGDLLLHLEKKHGEDWGKVYDEAWERIDKKVEGLSKHIKLEEERRSEDAQSKAALTDWLRAKASFVIEGLKEADKDEFCRCELKLQKWYGDLRGKPFAIEAENSILDISGFSKQYNCAFIWQKDGVKKLNLYLIINYFKGGKLRFKKIKPEAFEANRFYTVINKKSGEIVPMEVNFNFDDPNLIILPLAFGKRVGREFIWNDLLSLETGSLKLANGRVIEKTLYNRRTRQDEPALFVALTFERREVLDSSNIKPMNLIGVDRGENIPAVIALTDPEGCPLSRFKDSLGNPTHILRIGESYKEKQRTIQAKKEVEQRRAGGYSRKYASKAKNLADDMVRNTARDLLYYAVTQDAMLIFENLSRGFGRQGKRTFMAERQYTRMEDWLTAKLAYEGLPSKTYLSKTLAQYTSKTCSNCGFTITSADYDRVLEKLKKTATGWMTTINGKELKVEGQITYYNRYKRQNVVKDLSVELDRLSEESVNNDISSWTKGRSGEALSLLKKRFSHRPVQEKFVCLNCGFETHADEQAALNIARSWLFLRSQEYKKYQTNKTTGNTDKRAFVETWQSFYRKKLKEVWKPAV

SEQ ID NO: 35624 - protein, 977 aa, synthetic construct
  REGION 1..977: note = engineered CasX variant
QEIKRINKIRRRLVKDSNTKKAGKTGPMKTLLVRVMTPDLRERLENLRKKPENIPQPISNTSRANLNKLLTDYTEMKKAILHVYWEEFQKDPVGLMSRVAQPASKKIDQNKLKPEMDEKGNLTTAGFACSQCGQPLFVYKLEQVSEKGKAYTNYFGRCNVAEHEKLILLAQLKPEKDSDEAVTYSLGKFGQRALDFYSIHVTKESTHPVKPLAQIAGNRYASPVGKALSDACMGTIASFLSKYQDIIIEHQKVVKGNQKRLESLRELAGKENLEYPSVTLPPQPHTSEGVDAYNEVIARVRMWVNLNLWQKLKLSRDDAKPLLRLKGFPSFPLVERQANEVDWWDMVCNVKKLINEKKEDGKVFWQNLAGYKRQEALRPYLSSEEDRKKGKKFARYQLGDLLLHLEKKHGEDWGKVYDEAWERIDKKVEGLSKHIKLEEERRSEDAQSKAALTDWLRAKASFVIEGLKEADKDEFCRCELKLQKWYGDLRGKPFAIEAENSILDISGFSKQYNCAFIWQKDGVKKLNLYLIINYFKGGKLRFKKIKPEAFEANRFYTVINKKSGEIVPMEVNFNFDDPNLIILPLAFGKRVGREFIWNDLLSLETGSLKLANGRVIEKTLYNRRTRQDEPALFVALTFERREVLDSSNIKPMNLIGVDRGENIPAVIALTDPEGCPLSRFKDSLGNPTHILRIGESYKEKQRTIQAKKEVEQRRAGGYSRKYASKAKNLADDMVRNTARDLLYYAVTQDAMLIFENLSRGFGRQGKRTFMAERQYTRMEDWLTAKLAYEGLPSKTYLSKTLAQYTSKTCSNCGFTITSADYDRVLEKLKKTATGWMTTINGKELKVEGQITYYNRYKRQNVVKDLSVELDRLSEESVNNDISSWTKGRSGEALSLLKKRFSHRPVQEKFVCLNCGFETHADEQAALNIARSWLFLRSQEYKKYQTNKTTGNTDKRAFVETWQSFYRKKLKEVWKPAV

SEQ ID NO: 35625 - protein, 979 aa, synthetic construct
  REGION 1..979: note = engineered CasX variant
QEIKRINKIRRRLVKDSNTKKAGKTGPMKTLLVRVMTPDLRERLENLRKKPENIPQPISNTSRANLNKLLTDYTEMKKAILHVYWEEFQKDPVGLMSRVAQPASKKIDQNKLKPEMDEKGNLTTAGFACSQCGQPLFVYKLEQVSEKGKAYTNYFGRCNVAEHEKLILLAQLKPEKDSDEAVTYSLGKFGQRALDFYSIHVTKESTHPVKPLAQIAGNRYASYPVGKALSDACMGTIASFLSKYQDIIIEHQKVVKGNQKRLESLRELAGKENLEYPSVTLPPQPHTSEGVDAYNEVIARVRMWVNLNLWQKLKLSRDDAKPLLRLKGFPSFPLVERQANEVDWWDMVCNVKKLINEKKEDGKVFWQNLAGYKRQEALRPYLSSEEDRKKGKKFARYQLGDLLLHLEKKHGEDWGKVYDEAWERIDKKVEGLSKHIKLEEERRSEDAQSKAALTDWLRAKASFVIEGLKEADKDEFCRCELKLQKWYGDLRGKPFAIEAENSILDISGFSKQYNCAFIWQKDGVKKLNLYLIINYFKGGKLRFKKIKPEAFEANRFYTVINKKSGEIVPMEVNFNFDDPNLIILPLAFGKRQGREFIWNDLLSLETGSLKLANGRVIEKTLYNRRTRQDEPALFVALTFERREVLDSSNIKTPMNLIGVDRGENIPAVIALTDPEGCPLSRFKDSLGNPTHILRIGESYKEKQRTIQAKKEVEQRRAGGYSRKYASKAKNLADDMVRNTARDLLYYAVTQDAMLIFENLSRGFGRQGKRTFMAERQYTRMEDWLTAKLAYEGLPSKTYLSKTLAQYTSKTCSNCGFTITSADYDRVLEKLKKTATGWMTTINGKELKVEGQITYYNRYKRQNVVKDLSVELDRLSEESVNNDISSWTKGRSGEALSLLKKRFSHRPVQEKFVCLNCGFETHADEQAALNIARSWLFLRSQEYKKYQTNKTTGNTDKRAFVETWQSFYRKKLKEVWKPAV

SEQ ID NO: 35626 - protein, 979 aa, synthetic construct
  REGION 1..979: note = engineered CasX variant
QEIKRINKIRRRLVKDSNTKKAGKTGPMKTLLVRVMTPDLRERLENLRKKPENIPQPISNTSRANLNKLLTDYTEMKKAILHVYWEEFQKDPVGLMSRVAQPASKKIDQNKLKPEMDEKGNLTTAGFACSQCGQPLFVYKLEQVSEKGKAYTNYFGRCNVAEHEKLILLAQLKPEKDSDEAVTYSLGKFGQRALDFYSIHVTKESTHPVKPLAQIAGNRYASHPVGKALSDACMGTIASFLSKYQDIIIEHQKVVKGNQKRLESLRELAGKENLEYPSVTLPPQPHTSEGVDAYNEVIARVRMWVNLNLWQKLKLSRDDAKPLLRLKGFPSFPLVERQANEVDWWDMVCNVKKLINEKKEDGKVFWQNLAGYKRQEALRPYLSSEEDRKKGKKFARYQLGDLLLHLEKKHGEDWGKVYDEAWERIDKKVEGLSKHIKLEEERRSEDAQSKAALTDWLRAKASFVIEGLKEADKDEFCRCELKLQKWYGDLRGKPFAIEAENSILDISGFSKQYNCAFIWQKDGVKKLNLYLIINYFKGGKLRFKKIKPEAFEANRFYTVINKKSGEIVPMEVNFNFDDPNLIILPLAFGKRQGREFIWNDLLSLETGSLKLANGRVIEKTLYNRRTRQDEPALFVALTFERREVLDSSNIKTPMNLIGVDRGENIPAVIALTDPEGCPLSRFKDSLGNPTHILRIGESYKEKQRTIQAKKEVEQRRAGGYSRKYASKAKNLADDMVRNTARDLLYYAVTQDAMLIFENLSRGFGRQGKRTFMAERQYTRMEDWLTAKLAYEGLPSKTYLSKTLAQYTSKTCSNCGFTITSADYDRVLEKLKKTATGWMTTINGKELKVEGQITYYNRYKRQNVVKDLSVELDRLSEESVNNDISSWTKGRSGEALSLLKKRFSHRPVQEKFVCLNCGFETHADEQAALNIARSWLFLRSQEYKKYQTNKTTGNTDKRAFVETWQSFYRKKLKEVWKPAV

SEQ ID NO: 35627 - protein, 979 aa, synthetic construct
  REGION 1..979: note = engineered CasX variant
QEIKRINKIRRRLVKDSNTKKAGKTGPMKTLLVRVMTPDLRERLENLRKKPENIPQPISNTSRANLNKLLTDYTEMKKAILHVYWEEFQKDPVGLMSRVAQPASKKIDQNKLKPEMDEKGNLTTAGFACSQCGQPLFVYKLEQVSEKGKAYTNYFGRCNVAEHEKLILLAQLKPEKDSDEAVTYSLGKFGQRALDFYSIHVTKESTHPVKPLAQIAGNRYASSPVGKALSDACMGTIASFLSKYQDIIIEHQKVVKGNQKRLESLRELAGKENLEYPSVTLPPQPHTSEGVDAYNEVIARVRMWVNLNLWQKLKLSRDDAKPLLRLKGFPSFPLVERQANEVDWWDMVCNVKKLINEKKEDGKVFWQNLAGYKRQEALRPYLSSEEDRKKGKKFARYQLGDLLLHLEKKHGEDWGKVYDEAWERIDKKVEGLSKHIKLEEERRSEDAQSKAALTDWLRAKASFVIEGLKEADKDEFCRCELKLQKWYGDLRGKPFAIEAENSILDISGFSKQYNCAFIWQKDGVKKLNLYLIINYFKGGKLRFKKIKPEAFEANRFYTVINKKSGEIVPMEVNFNFDDPNLIILPLAFGKRQGREFIWNDLLSLETGSLKLANGRVIEKTLYNRRTRQDEPALFVALTFERREVLDSSNIKTPMNLIGVDRGENIPAVIALTDPEGCPLSRFKDSLGNPTHILRIGESYKEKQRTIQAKKEVEQRRAGGYSRKYASKAKNLADDMVRNTARDLLYYAVTQDAMLIFENLSRGFGRQGKRTFMAERQYTRMEDWLTAKLAYEGLPSKTYLSKTLAQYTSKTCSNCGFTITSADYDRVLEKLKKTATGWMTTINGKELKVEGQITYYNRYKRQNVVKDLSVELDRLSEESVNNDISSWTKGRSGEALSLLKKRFSHRPVQEKFVCLNCGFETHADEQAALNIARSWLFLRSQEYKKYQTNKTTGNTDKRAFVETWQSFYRKKLKEVWKPAV

SEQ ID NO: 35628 - protein, 979 aa, synthetic construct
  REGION 1..979: note = engineered CasX variant
QEIKRINKIRRRLVKDSNTKKAGKTGPMKTLLVRVMTPDLRERLENLRKKPENIPQPISNTSRANLNKLLTDYTEMKKAILHVYWEEFQKDPVGLMSRVAQPASKKIDQNKLKPEMDEKGNLTTAGFACSQCGQPLFVYKLEQVSEKGKAYTNYFGRCNVAEHEKLILLAQLKPEKDSDEAVTYSLGKFGQRALDFYSIHVTKESTHPVKPLAQIAGNRYASTPVGKALSDACMGTIASFLSKYQDIIIEHQKVVKGNQKRLESLRELAGKENLEYPSVTLPPQPHTSEGVDAYNEVIARVRMWVNLNLWQKLKLSRDDAKPLLRLKGFPSFPLVERQANEVDWWDMVCNVKKLINEKKEDGKVFWQNLAGYKRQEALRPYLSSEEDRKKGKKFARYQLGDLLLHLEKKHGEDWGKVYDEAWERIDKKVEGLSKHIKLEEERRSEDAQSKAALTDWLRAKASFVIEGLKEADKDEFCRCELKLQKWYGDLRGKPFAIEAENSILDISGFSKQYNCAFIWQKDGVKKLNLYLIINYFKGGKLRFKKIKPEAFEANRFYTVINKKSGEIVPMEVNFNFDDPNLIILPLAFGKRQGREFIWNDLLSLETGSLKLANGRVIEKTLYNRRTRQDEPALFVALTFERREVLDSSNIKTPMNLIGVDRGENIPAVIALTDPEGCPLSRFKDSLGNPTHILRIGESYKEKQRTIQAKKEVEQRRAGGYSRKYASKAKNLADDMVRNTARDLLYYAVTQDAMLIFENLSRGFGRQGKRTFMAERQYTRMEDWLTAKLAYEGLPSKTYLSKTLAQYTSKTCSNCGFTITSADYDRVLEKLKKTATGWMTTINGKELKVEGQITYYNRYKRQNVVKDLSVELDRLSEESVNNDISSWTKGRSGEALSLLKKRFSHRPVQEKFVCLNCGFETHADEQAALNIARSWLFLRSQEYKKYQTNKTTGNTDKRAFVETWQSFYRKKLKEVWKPAV

SEQ ID NO: 35629 - protein, 979 aa, synthetic construct
  REGION 1..979: note = engineered CasX variant
QEIKRINKIRRRLVKDSNTKKAGKTGPMKTLLVRVMTPDLRERLENLRKKPENIPQPISNTSRANLNKLLTDYTEMKKAILHVYWEEFQKDPVGLMSRVAQPASKKIDQNKLKPEMDEKGNLTTAGFACSQCGQPLFVYKLEQVSEKGKAYTNYFGRCNVAEHEKLILLAQLKPEKDSDEAVTYSLGKFGQRALDFYSIHVTKESTHPVKPLAQIAGNRYASAPVGKALSDACMGTIASFLSKYQDIIIEHQKVVKGNQKRLESLRELAGKENLEYPSVTLPPQPHTSEGVDAYNEVIARVRMWVNLNLWQKLKLSRDDAKPLLRLKGFPSFPLVERQANEVDWWDMVCNVKKLINEKKEDGKVFWQNLAGYKRQEALRPYLSSEEDRKKGKKFARYQLGDLLLHLEKKHGEDWGKVYDEAWERIDKKVEGLSKHIKLEEERRSEDAQSKAALTDWLRAKASFVIEGLKEADKDEFCRCELKLQKWYGDLRGKPFAIEAENSILDISGFSKQYNCAFIWQKDGVKKLNLYLIINYFKGGKLRFKKIKPEAFEANRFYTVINKKSGEIVPMEVNFNFDDPNLIILPLAFGKRQGREFIWNDLLSLETGSLKLANGRVIEKTLYNRRTRQDEPALFVALTFERREVLDSSNIKTPMNLIGVDRGENIPAVIALTDPEGCPLSRFKDSLGNPTHILRIGESYKEKQRTIQAKKEVEQRRAGGYSRKYASKAKNLADDMVRNTARDLLYYAVTQDAMLIFENLSRGFGRQGKRTFMAERQYTRMEDWLTAKLAYEGLPSKTYLSKTLAQYTSKTCSNCGFTITSADYDRVLEKLKKTATGWMTTINGKELKVEGQITYYNRYKRQNVVKDLSVELDRLSEESVNNDISSWTKGRSGEALSLLKKRFSHRPVQEKFVCLNCGFETHADEQAALNIARSWLFLRSQEYKKYQTNKTTGNTDKRAFVETWQSFYRKKLKEVWKPAV

SEQ ID NO: 35630 - protein, 979 aa, synthetic construct
  REGION 1..979: note = engineered CasX variant
QEIKRINKIRRRLVKDSNTKKAGKTGPMKTLLVRVMTPDLRERLENLRKKPENIPQPISNTSRANLNKLLTDYTEMKKAILHVYWEEFQKDPVGLMSRVAQPASKKIDQNKLKPEMDEKGNLTTAGFACSQCGQPLFVYKLEQVSEKGKAYTNYFGRCNVAEHEKLILLAQLKPEKDSDEAVTYSLGKFGQRALDFYSIHVTKESTHPVKPLAQIAGNRYASVPVGKALSDACMGTIASFLSKYQDIIIEHQKVVKGNQKRLESLRELAGKENLEYPSVTLPPQPHTSEGVDAYNEVIARVRMWVNLNLWQKLKLSRDDAKPLLRLKGFPSFPLVERQANEVDWWDMVCNVKKLINEKKEDGKVFWQNLAGYKRQEALRPYLSSEEDRKKGKKFARYQLGDLLLHLEKKHGEDWGKVYDEAWERIDKKVEGLSKHIKLEEERRSEDAQSKAALTDWLRAKASFVIEGLKEADKDEFCRCELKLQKWYGDLRGKPFAIEAENSILDISGFSKQYNCAFIWQKDGVKKLNLYLIINYFKGGKLRFKKIKPEAFEANRFYTVINKKSGEIVPMEVNFNFDDPNLIILPLAFGKRQGREFIWNDLLSLETGSLKLANGRVIEKTLYNRRTRQDEPALFVALTFERREVLDSSNIKTPMNLIGVDRGENIPAVIALTDPEGCPLSRFKDSLGNPTHILRIGESYKEKQRTIQAKKEVEQRRAGGYSRKYASKAKNLADDMVRNTARDLLYYAVTQDAMLIFENLSRGFGRQGKRTFMAERQYTRMEDWLTAKLAYEGLPSKTYLSKTLAQYTSKTCSNCGFTITSADYDRVLEKLKKTATGWMTTINGKELKVEGQITYYNRYKRQNVVKDLSVELDRLSEESVNNDISSWTKGRSGEALSLLKKRFSHRPVQEKFVCLNCGFETHADEQAALNIARSWLFLRSQEYKKYQTNKTTGNTDKRAFVETWQSFYRKKLKEVWKPAV

SEQ ID NO: 35631 - protein, 979 aa, synthetic construct
  REGION 1..979: note = engineered CasX variant
QEIKRINKIRRRLVKDSNTKKAGKTGPMKTLLVRVMTPDLRERLENLRKKPENIPQPISNTSRANLNKLLTDYTEMKKAILHVYWEEFQKDPVGLMSRVAQPASKKIDQNKLKPEMDEKGNLTTAGFACSQCGQPLFVYKLEQVSEKGKAYTNYFGRCNVAEHEKLIKLAQLKPEKDSDEAVTYSLGKFGQRALDFYSIHVTKESTHPVKPLAQIAGNRYASGPVGKALSDACMGTIASFLSKYQDIIIEHQKVVKGNQKRLESLRELAGKENLEYPSVTLPPQPHTSEGVDAYNEVIARVRMWVNLNLWQKLKLSRDDAKPLLRLKGFPSFPLVERQANEVDWWDMVCNVKKLINEKKEDGKVFWQNLAGYKRQEALRPYLSSEEDRKKGKKFARYQLGDLLLHLEKKHGEDWGKVYDEAWERIDKKVEGLSKHIKLEEERRSEDAQSKAALTDWLRAKASFVIEGLKEADKDEFCRCELKLQKWYGDLRGKPFAIEAENSILDISGFSKQYNCAFIWQKDGVKKLNLYLIINYFKGGKLRFKKIKPEAFEANRFYTVINKKSGEIVPMEVNFNFDDPNLIILPLAFGKRQGREFIWNDLLSLETGSLKLANGRVIEKTLYNRRTRQDEPALFVALTFERREVLDSSNIKTPMNLIGVDRGENIPAVIALTDPEGCPLSRFKDSLGNPTHILRIGESYKEKQRTIQAKKEVEQRRAGGYSRKYASKAKNLADDMVRNTARDLLYYAVTQDAMLIFENLSRGFGRQGKRTFMAERQYTRMEDWLTAKLAYEGLPSKTYLSKTLAQYTSKTCSNCGFTITSADYDRVLEKLKKTATGWMTTINGKELKVEGQITYYNRYKRQNVVKDLSVELDRLSEESVNNDISSWTKGRSGEALSLLKKRFSHRPVQEKFVCLNCGFETHADEQAALNIARSWLFLRSQEYKKYQTNKTTGNTDKRAFVETWQSFYRKKLKEVWKPAV

SEQ ID NO: 35632 - protein, 978 aa, synthetic construct
  REGION 1..978: note = engineered CasX variant
QEIKRINKIRRRLVKDSNTKKAGKTGPMKTLLVRVMTPDLRERLENLRKKPENIPQPISNTSRANLNKLLTDYTEMKKAILHVYWEEFQKDPVGLMSRVAQPASKKIDQNKLKPEMDEKGNLTTAGFACSQCGQPLFVYKLEQVSEKGKAYTNYFGRCNVAEHEKLILLAQLKPEKDSDEAVTYSLGKFGQRALDFYSIHVTKESTHPVKPLAQIAGNRYASPVGKALSDACMGTIASFLSKYQDIIIEHQKVVKGNQKRLESLRELAGKENLEYPSVTLPPQPHTSEGVDAYNEVIARVRMWVNLNLWQKLKLSRDDAKPLLRLKGFPSFPLVERQANEVDWWDMVCNVKKLINEKKEDGKVFWQNLAGYKRQEALRPYLSSEEDRKKGKKFARYQLGDLLLHLEKKHGEDWGKVYDEAWERIDKKVEGLSKHIKLEEERRSEDAQSKAALTDWLRAKASFVIEGLKEADKDEFCRCELKLQKWYGDLRGKPFAIEAENSILDISGFSKQYNCAFIWQKDGVKKLNLYLIINYFKGGKLRFKKIKPEAFEANRFYTVINKKSGEIVPMEVNFNFDDPNLIILPLAFGKRQGREFIWNDLLSLETGSLKLANGRVIEKTLYNRRTRQDEPALFVALTFERREVLDSSNIKTPMNLIGVDRGENIPAVIALTDPEGCPLSRFKDSLGNPTHILRIGESYKEKQRTIQAKKEVEQRRAGGYSRKYASKAKNLADDMVRNTARDLLYYAVTQDAMLIFENLSRGFGRQGKRTFMAERQYTRMEDWLTAKLAYEGLPSKTYLSKTLAQYTSKTCSNCGFTITSADYDRVLEKLKKTATGWMTTINGKELKVEGQITYYNRYKRQNVVKDLSVELDRLSEESVNNDISSWTKGRSGEALSLLKKRFSHRPVQEKFVCLNCGFETHADEQAALNIARSWLFLRSQEYKKYQTNKTTGNTDKRAFVETWQSFYRKKLKEVWKPAV

SEQ ID NO: 35633 - protein, 979 aa, synthetic construct
  REGION 1..979: note = engineered CasX variant
QEIKRINKIRRRLVKDSNTKKAGKTGPMKTLLVRVMTPDLRERLENLRKKPENIPQPISNTSRANLNKLLTDYTEMKKAILHVYWEEFQKDPVGLMSRVAQPASKKIDQNKLKPEMDEKGNLTTAGFACSQCGQPLFVYKLEQVSEKGKAYTNYFGRCNVAEHEKLILLAQLKPEKDSDEAVTYSLGKFGQRALDFYSIHVTKESTHPVKPLAQIAGNRYASYPVGKALSDACMGTIASFLSKYQDIIIEHQKVVKGNQKRLESLRELAGKENLEYPSVTLPPQPHTSEGVDAYNEVIARVRMWVNLNLWQKLKLSRDDAKPLLRLKGFPSFPLVERQANEVDWWDMVCNVKKLINEKKEDGKVFWQNLAGYKRQEALRPYLSSEEDRKKGKKFARYQLGDLLLHLEKKHGEDWGKVYDEAWERIDKKVEGLSKHIKLEEERRSEDAQSKAALTDWLRAKASFVIEGLKEADKDEFCRCELKLQKWYGDLRGKPFAIEAENSILDISGFSKQYNCAFIWQKDGVKKLNLYLIINYFKGGKLRFKKIKPEAFEANRFYTVINKKSGEIVPMEVNFNFDDPNLIILPLAFGKRQGREFIWNDLLSLETGSLKLANGRVIEKTLYNRRTRQDEPALFVALTFERREVLDSSNIKPMSNLIGVDRGENIPAVIALTDPEGCPLSRFKDSLGNPTHILRIGESYKEKQRTIQAKKEVEQRRAGGYSRKYASKAKNLADDMVRNTARDLLYYAVTQDAMLIFENLSRGFGRQGKRTFMAERQYTRMEDWLTAKLAYEGLPSKTYLSKTLAQYTSKTCSNCGFTITSADYDRVLEKLKKTATGWMTTINGKELKVEGQITYYNRYKRQNVVKDLSVELDRLSEESVNNDISSWTKGRSGEALSLLKKRFSHRPVQEKFVCLNCGFETHADEQAALNIARSWLFLRSQEYKKYQTNKTTGNTDKRAFVETWQSFYRKKLKEVWKPAV

SEQ ID NO: 35634 - protein, 979 aa, synthetic construct
  REGION 1..979: note = engineered CasX variant
QEIKRINKIRRRLVKDSNTKKAGKTGPMKTLLVRVMTPDLRERLENLRKKPENIPQPISNTSRANLNKLLTDYTEMKKAILHVYWEEFQKDPVGLMSRVAQPASKKIDQNKLKPEMDEKGNLTTAGFACSQCGQPLFVYKLEQVSEKGKAYTNYFGRCNVAEHEKLILLAQLKPEKDSDEAVTYSLGKFGQRALDFYSIHVTKESTHPVKPLAQIAGNRYASHPVGKALSDACMGTIASFLSKYQDIIIEHQKVVKGNQKRLESLRELAGKENLEYPSVTLPPQPHTSEGVDAYNEVIARVRMWVNLNLWQKLKLSRDDAKPLLRLKGFPSFPLVERQANEVDWWDMVCNVKKLINEKKEDGKVFWQNLAGYKRQEALRPYLSSEEDRKKGKKFARYQLGDLLLHLEKKHGEDWGKVYDEAWERIDKKVEGLSKHIKLEEERRSEDAQSKAALTDWLRAKASFVIEGLKEADKDEFCRCELKLQKWYGDLRGKPFAIEAENSILDISGFSKQYNCAFIWQKDGVKKLNLYLIINYFKGGKLRFKKIKPEAFEANRFYTVINKKSGEIVPMEVNFNFDDPNLIILPLAFGKRQGREFIWNDLLSLETGSLKLANGRVIEKTLYNRRTRQDEPALFVALTFERREVLDSSNIKPMSNLIGVDRGENIPAVIALTDPEGCPLSRFKDSLGNPTHILRIGESYKEKQRTIQAKKEVEQRRAGGYSRKYASKAKNLADDMVRNTARDLLYYAVTQDAMLIFENLSRGFGRQGKRTFMAERQYTRMEDWLTAKLAYEGLPSKTYLSKTLAQYTSKTCSNCGFTITSADYDRVLEKLKKTATGWMTTINGKELKVEGQITYYNRYKRQNVVKDLSVELDRLSEESVNNDISSWTKGRSGEALSLLKKRFSHRPVQEKFVCLNCGFETHADEQAALNIARSWLFLRSQEYKKYQTNKTTGNTDKRAFVETWQSFYRKKLKEVWKPAV

SEQ ID NO: 35635 - protein, 979 aa, synthetic construct
  REGION 1..979: note = engineered CasX variant
QEIKRINKIRRRLVKDSNTKKAGKTGPMKTLLVRVMTPDLRERLENLRKKPENIPQPISNTSRANLNKLLTDYTEMKKAILHVYWEEFQKDPVGLMSRVAQPASKKIDQNKLKPEMDEKGNLTTAGFACSQCGQPLFVYKLEQVSEKGKAYTNYFGRCNVAEHEKLILLAQLKPEKDSDEAVTYSLGKFGQRALDFYSIHVTKESTHPVKPLAQIAGNRYASSPVGKALSDACMGTIASFLSKYQDIIIEHQKVVKGNQKRLESLRELAGKENLEYPSVTLPPQPHTSEGVDAYNEVIARVRMWVNLNLWQKLKLSRDDAKPLLRLKGFPSFPLVERQANEVDWWDMVCNVKKLINEKKEDGKVFWQNLAGYKRQEALRPYLSSEEDRKKGKKFARYQLGDLLLHLEKKHGEDWGKVYDEAWERIDKKVEGLSKHIKLEEERRSEDAQSKAALTDWLRAKASFVIEGLKEADKDEFCRCELKLQKWYGDLRGKPFAIEAENSILDISGFSKQYNCAFIWQKDGVKKLNLYLIINYFKGGKLRFKKIKPEAFEANRFYTVINKKSGEIVPMEVNFNFDDPNLIILPLAFGKRQGREFIWNDLLSLETGSLKLANGRVIEKTLYNRRTRQDEPALFVALTFERREVLDSSNIKPMSNLIGVDRGENIPAVIALTDPEGCPLSRFKDSLGNPTHILRIGESYKEKQRTIQAKKEVEQRRAGGYSRKYASKAKNLADDMVRNTARDLLYYAVTQDAMLIFENLSRGFGRQGKRTFMAERQYTRMEDWLTAKLAYEGLPSKTYLSKTLAQYTSKTCSNCGFTITSADYDRVLEKLKKTATGWMTTINGKELKVEGQITYYNRYKRQNVVKDLSVELDRLSEESVNNDISSWTKGRSGEALSLLKKRFSHRPVQEKFVCLNCGFETHADEQAALNIARSWLFLRSQEYKKYQTNKTTGNTDKRAFVETWQSFYRKKLKEVWKPAV

SEQ ID NO: 35636 - protein, 979 aa, synthetic construct
  REGION 1..979: note = engineered CasX variant
QEIKRINKIRRRLVKDSNTKKAGKTGPMKTLLVRVMTPDLRERLENLRKKPENIPQPISNTSRANLNKLLTDYTEMKKAILHVYWEEFQKDPVGLMSRVAQPASKKIDQNKLKPEMDEKGNLTTAGFACSQCGQPLFVYKLEQVSEKGKAYTNYFGRCNVAEHEKLILLAQLKPEKDSDEAVTYSLGKFGQRALDFYSIHVTKESTHPVKPLAQIAGNRYASTPVGKALSDACMGTIASFLSKYQDIIIEHQKVVKGNQKRLESLRELAGKENLEYPSVTLPPQPHTSEGVDAYNEVIARVRMWVNLNLWQKLKLSRDDAKPLLRLKGFPSFPLVERQANEVDWWDMVCNVKKLINEKKEDGKVFWQNLAGYKRQEALRPYLSSEEDRKKGKKFARYQLGDLLLHLEKKHGEDWGKVYDEAWERIDKKVEGLSKHIKLEEERRSEDAQSKAALTDWLRAKASFVIEGLKEADKDEFCRCELKLQKWYGDLRGKPFAIEAENSILDISGFSKQYNCAFIWQKDGVKKLNLYLIINYFKGGKLRFKKIKPEAFEANRFYTVINKKSGEIVPMEVNFNFDDPNLIILPLAFGKRQGREFIWNDLLSLETGSLKLANGRVIEKTLYNRRTRQDEPALFVALTFERREVLDSSNIKPMSNLIGVDRGENIPAVIALTDPEGCPLSRFKDSLGNPTHILRIGESYKEKQRTIQAKKEVEQRRAGGYSRKYASKAKNLADDMVRNTARDLLYYAVTQDAMLIFENLSRGFGRQGKRTFMAERQYTRMEDWLTAKLAYEGLPSKTYLSKTLAQYTSKTCSNCGFTITSADYDRVLEKLKKTATGWMTTINGKELKVEGQITYYNRYKRQNVVKDLSVELDRLSEESVNNDISSWTKGRSGEALSLLKKRFSHRPVQEKFVCLNCGFETHADEQAALNIARSWLFLRSQEYKKYQTNKTTGNTDKRAFVETWQSFYRKKLKEVWKPAV

SEQ ID NO: 35637 - protein, 979 aa, synthetic construct
  REGION 1..979: note = engineered CasX variant
QEIKRINKIRRRLVKDSNTKKAGKTGPMKTLLVRVMTPDLRERLENLRKKPENIPQPISNTSRANLNKLLTDYTEMKKAILHVYWEEFQKDPVGLMSRVAQPASKKIDQNKLKPEMDEKGNLTTAGFACSQCGQPLFVYKLEQVSEKGKAYTNYFGRCNVAEHEKLILLAQLKPEKDSDEAVTYSLGKFGQRALDFYSIHVTKESTHPVKPLAQIAGNRYASAPVGKALSDACMGTIASFLSKYQDIIIEHQKVVKGNQKRLESLRELAGKENLEYPSVTLPPQPHTSEGVDAYNEVIARVRMWVNLNLWQKLKLSRDDAKPLLRLKGFPSFPLVERQANEVDWWDMVCNVKKLINEKKEDGKVFWQNLAGYKRQEALRPYLSSEEDRKKGKKFARYQLGDLLLHLEKKHGEDWGKVYDEAWERIDKKVEGLSKHIKLEEERRSEDAQSKAALTDWLRAKASFVIEGLKEADKDEFCRCELKLQKWYGDLRGKPFAIEAENSILDISGFSKQYNCAFIWQKDGVKKLNLYLIINYFKGGKLRFKKIKPEAFEANRFYTVINKKSGEIVPMEVNFNFDDPNLIILPLAFGKRQGREFIWNDLLSLETGSLKLANGRVIEKTLYNRRTRQDEPALFVALTFERREVLDSSNIKPMSNLIGVDRGENIPAVIALTDPEGCPLSRFKDSLGNPTHILRIGESYKEKQRTIQAKKEVEQRRAGGYSRKYASKAKNLADDMVRNTARDLLYYAVTQDAMLIFENLSRGFGRQGKRTFMAERQYTRMEDWLTAKLAYEGLPSKTYLSKTLAQYTSKTCSNCGFTITSADYDRVLEKLKKTATGWMTTINGKELKVEGQITYYNRYKRQNVVKDLSVELDRLSEESVNNDISSWTKGRSGEALSLLKKRFSHRPVQEKFVCLNCGFETHADEQAALNIARSWLFLRSQEYKKYQTNKTTGNTDKRAFVETWQSFYRKKLKEVWKPAV

SEQ ID NO: 35638 - protein, 979 aa, synthetic construct
  REGION 1..979: note = engineered CasX variant
QEIKRINKIRRRLVKDSNTKKAGKTGPMKTLLVRVMTPDLRERLENLRKKPENIPQPISNTSRANLNKLLTDYTEMKKAILHVYWEEFQKDPVGLMSRVAQPASKKIDQNKLKPEMDEKGNLTTAGFACSQCGQPLFVYKLEQVSEKGKAYTNYFGRCNVAEHEKLILLAQLKPEKDSDEAVTYSLGKFGQRALDFYSIHVTKESTHPVKPLAQIAGNRYASVPVGKALSDACMGTIASFLSKYQDIIIEHQKVVKGNQKRLESLRELAGKENLEYPSVTLPPQPHTSEGVDAYNEVIARVRMWVNLNLWQKLKLSRDDAKPLLRLKGFPSFPLVERQANEVDWWDMVCNVKKLINEKKEDGKVFWQNLAGYKRQEALRPYLSSEEDRKKGKKFARYQLGDLLLHLEKKHGEDWGKVYDEAWERIDKKVEGLSKHIKLEEERRSEDAQSKAALTDWLRAKASFVIEGLKEADKDEFCRCELKLQKWYGDLRGKPFAIEAENSILDISGFSKQYNCAFIWQKDGVKKLNLYLIINYFKGGKLRFKKIKPEAFEANRFYTVINKKSGEIVPMEVNFNFDDPNLIILPLAFGKRQGREFIWNDLLSLETGSLKLANGRVIEKTLYNRRTRQDEPALFVALTFERREVLDSSNIKPMSNLIGVDRGENIPAVIALTDPEGCPLSRFKDSLGNPTHILRIGESYKEKQRTIQAKKEVEQRRAGGYSRKYASKAKNLADDMVRNTARDLLYYAVTQDAMLIFENLSRGFGRQGKRTFMAERQYTRMEDWLTAKLAYEGLPSKTYLSKTLAQYTSKTCSNCGFTITSADYDRVLEKLKKTATGWMTTINGKELKVEGQITYYNRYKRQNVVKDLSVELDRLSEESVNNDISSWTKGRSGEALSLLKKRFSHRPVQEKFVCLNCGFETHADEQAALNIARSWLFLRSQEYKKYQTNKTTGNTDKRAFVETWQSFYRKKLKEVWKPAV

SEQ ID NO: 35639 - protein, 979 aa, synthetic construct
  REGION 1..979: note = engineered CasX variant
QEIKRINKIRRRLVKDSNTKKAGKTGPMKTLLVRVMTPDLRERLENLRKKPENIPQPISNTSRANLNKLLTDYTEMKKAILHVYWEEFQKDPVGLMSRVAQPASKKIDQNKLKPEMDEKGNLTTAGFACSQCGQPLFVYKLEQVSEKGKAYTNYFGRCNVAEHEKLIKLAQLKPEKDSDEAVTYSLGKFGQRALDFYSIHVTKESTHPVKPLAQIAGNRYASGPVGKALSDACMGTIASFLSKYQDIIIEHQKVVKGNQKRLESLRELAGKENLEYPSVTLPPQPHTSEGVDAYNEVIARVRMWVNLNLWQKLKLSRDDAKPLLRLKGFPSFPLVERQANEVDWWDMVCNVKKLINEKKEDGKVFWQNLAGYKRQEALRPYLSSEEDRKKGKKFARYQLGDLLLHLEKKHGEDWGKVYDEAWERIDKKVEGLSKHIKLEEERRSEDAQSKAALTDWLRAKASFVIEGLKEADKDEFCRCELKLQKWYGDLRGKPFAIEAENSILDISGFSKQYNCAFIWQKDGVKKLNLYLIINYFKGGKLRFKKIKPEAFEANRFYTVINKKSGEIVPMEVNFNFDDPNLIILPLAFGKRQGREFIWNDLLSLETGSLKLANGRVIEKTLYNRRTRQDEPALFVALTFERREVLDSSNIKPMSNLIGVDRGENIPAVIALTDPEGCPLSRFKDSLGNPTHILRIGESYKEKQRTIQAKKEVEQRRAGGYSRKYASKAKNLADDMVRNTARDLLYYAVTQDAMLIFENLSRGFGRQGKRTFMAERQYTRMEDWLTAKLAYEGLPSKTYLSKTLAQYTSKTCSNCGFTITSADYDRVLEKLKKTATGWMTTINGKELKVEGQITYYNRYKRQNVVKDLSVELDRLSEESVNNDISSWTKGRSGEALSLLKKRFSHRPVQEKFVCLNCGFETHADEQAALNIARSWLFLRSQEYKKYQTNKTTGNTDKRAFVETWQSFYRKKLKEVWKPAV

SEQ ID NO: 35640 - protein, 978 aa, synthetic construct
  REGION 1..978: note = engineered CasX variant
QEIKRINKIRRRLVKDSNTKKAGKTGPMKTLLVRVMTPDLRERLENLRKKPENIPQPISNTSRANLNKLLTDYTEMKKAILHVYWEEFQKDPVGLMSRVAQPASKKIDQNKLKPEMDEKGNLTTAGFACSQCGQPLFVYKLEQVSEKGKAYTNYFGRCNVAEHEKLILLAQLKPEKDSDEAVTYSLGKFGQRALDFYSIHVTKESTHPVKPLAQIAGNRYASPVGKALSDACMGTIASFLSKYQDIIIEHQKVVKGNQKRLESLRELAGKENLEYPSVTLPPQPHTSEGVDAYNEVIARVRMWVNLNLWQKLKLSRDDAKPLLRLKGFPSFPLVERQANEVDWWDMVCNVKKLINEKKEDGKVFWQNLAGYKRQEALRPYLSSEEDRKKGKKFARYQLGDLLLHLEKKHGEDWGKVYDEAWERIDKKVEGLSKHIKLEEERRSEDAQSKAALTDWLRAKASFVIEGLKEADKDEFCRCELKLQKWYGDLRGKPFAIEAENSILDISGFSKQYNCAFIWQKDGVKKLNLYLIINYFKGGKLRFKKIKPEAFEANRFYTVINKKSGEIVPMEVNFNFDDPNLIILPLAFGKRQGREFIWNDLLSLETGSLKLANGRVIEKTLYNRRTRQDEPALFVALTFERREVLDSSNIKPMSNLIGVDRGENIPAVIALTDPEGCPLSRFKDSLGNPTHILRIGESYKEKQRTIQAKKEVEQRRAGGYSRKYASKAKNLADDMVRNTARDLLYYAVTQDAMLIFENLSRGFGRQGKRTFMAERQYTRMEDWLTAKLAYEGLPSKTYLSKTLAQYTSKTCSNCGFTITSADYDRVLEKLKKTATGWMTTINGKELKVEGQITYYNRYKRQNVVKDLSVELDRLSEESVNNDISSWTKGRSGEALSLLKKRFSHRPVQEKFVCLNCGFETHADEQAALNIARSWLFLRSQEYKKYQTNKTTGNTDKRAFVETWQSFYRKKLKEVWKPAV

SEQ ID NO: 35641 - protein, 978 aa, synthetic construct
  REGION 1..978: note = engineered CasX variant
QEIKRINKIRRRLVKDSNTKKAGKTGPMKTLLVRVMTPDLRERLENLRKKPENIPQPISNTSRANLNKLLTDYTEMKKAILHVYWEEFQKDPVGLMSRVAQPASKKIDQNKLKPEMDEKGNLTTAGFACSQCGQPLFVYKLEQVSEKGKAYTNYFGRCNVAEHEKLILLAQLKPEKDSDEAVTYSLGKFGQRALDFYSIHVTKESTHPVKPLAQIAGNRYASYPVGKALSDACMGTIASFLSKYQDIIIEHQKVVKGNQKRLESLRELAGKENLEYPSVTLPPQPHTSEGVDAYNEVIARVRMWVNLNLWQKLKLSRDDAKPLLRLKGFPSFPLVERQANEVDWWDMVCNVKKLINEKKEDGKVFWQNLAGYKRQEALRPYLSSEEDRKKGKKFARYQLGDLLLHLEKKHGEDWGKVYDEAWERIDKKVEGLSKHIKLEEERRSEDAQSKAALTDWLRAKASFVIEGLKEADKDEFCRCELKLQKWYGDLRGKPFAIEAENSILDISGFSKQYNCAFIWQKDGVKKLNLYLIINYFKGGKLRFKKIKPEAFEANRFYTVINKKSGEIVPMEVNFNFDDPNLIILPLAFGKRQGREFIWNDLLSLETGSLKLANGRVIEKTLYNRRTRQDEPALFVALTFERREVLDSSNIKPMNLIGVDRGENIPAVIALTDPEGCPLSRFKDSLGNPTHILRIRESYKEKQRTIQAKKEVEQRRAGGYSRKYASKAKNLADDMVRNTARDLLYYAVTQDAMLIFENLSRGFGRQGKRTFMAERQYTRMEDWLTAKLAYEGLPSKTYLSKTLAQYTSKTCSNCGFTITSADYDRVLEKLKKTATGWMTTINGKELKVEGQITYYNRYKRQNVVKDLSVELDRLSEESVNNDISSWTKGRSGEALSLLKKRFSHRPVQEKFVCLNCGFETHADEQAALNIARSWLFLRSQEYKKYQTNKTTGNTDKRAFVETWQSFYRKKLKEVWKPAV

SEQ ID NO: 35642 - protein, 978 aa, synthetic construct
  REGION 1..978: note = engineered CasX variant
QEIKRINKIRRRLVKDSNTKKAGKTGPMKTLLVRVMTPDLRERLENLRKKPENIPQPISNTSRANLNKLLTDYTEMKKAILHVYWEEFQKDPVGLMSRVAQPASKKIDQNKLKPEMDEKGNLTTAGFACSQCGQPLFVYKLEQVSEKGKAYTNYFGRCNVAEHEKLILLAQLKPEKDSDEAVTYSLGKFGQRALDFYSIHVTKESTHPVKPLAQIAGNRYASHPVGKALSDACMGTIASFLSKYQDIIIEHQKVVKGNQKRLESLRELAGKENLEYPSVTLPPQPHTSEGVDAYNEVIARVRMWVNLNLWQKLKLSRDDAKPLLRLKGFPSFPLVERQANEVDWWDMVCNVKKLINEKKEDGKVFWQNLAGYKRQEALRPYLSSEEDRKKGKKFARYQLGDLLLHLEKKHGEDWGKVYDEAWERIDKKVEGLSKHIKLEEERRSEDAQSKAALTDWLRAKASFVIEGLKEADKDEFCRCELKLQKWYGDLRGKPFAIEAENSILDISGFSKQYNCAFIWQKDGVKKLNLYLIINYFKGGKLRFKKIKPEAFEANRFYTVINKKSGEIVPMEVNFNFDDPNLIILPLAFGKRQGREFIWNDLLSLETGSLKLANGRVIEKTLYNRRTRQDEPALFVALTFERREVLDSSNIKPMNLIGVDRGENIPAVIALTDPEGCPLSRFKDSLGNPTHILRIRESYKEKQRTIQAKKEVEQRRAGGYSRKYASKAKNLADDMVRNTARDLLYYAVTQDAMLIFENLSRGFGRQGKRTFMAERQYTRMEDWLTAKLAYEGLPSKTYLSKTLAQYTSKTCSNCGFTITSADYDRVLEKLKKTATGWMTTINGKELKVEGQITYYNRYKRQNVVKDLSVELDRLSEESVNNDISSWTKGRSGEALSLLKKRFSHRPVQEKFVCLNCGFETHADEQAALNIARSWLFLRSQEYKKYQTNKTTGNTDKRAFVETWQSFYRKKLKEVWKPAV

SEQ ID NO: 35643 - protein, 978 aa, synthetic construct
  REGION 1..978: note = engineered CasX variant
QEIKRINKIRRRLVKDSNTKKAGKTGPMKTLLVRVMTPDLRERLENLRKKPENIPQPISNTSRANLNKLLTDYTEMKKAILHVYWEEFQKDPVGLMSRVAQPASKKIDQNKLKPEMDEKGNLTTAGFACSQCGQPLFVYKLEQVSEKGKAYTNYFGRCNVAEHEKLILLAQLKPEKDSDEAVTYSLGKFGQRALDFYSIHVTKESTHPVKPLAQIAGNRYASSPVGKALSDACMGTIASFLSKYQDIIIEHQKVVKGNQKRLESLRELAGKENLEYPSVTLPPQPHTSEGVDAYNEVIARVRMWVNLNLWQKLKLSRDDAKPLLRLKGFPSFPLVERQANEVDWWDMVCNVKKLINEKKEDGKVFWQNLAGYKRQEALRPYLSSEEDRKKGKKFARYQLGDLLLHLEKKHGEDWGKVYDEAWERIDKKVEGLSKHIKLEEERRSEDAQSKAALTDWLRAKASFVIEGLKEADKDEFCRCELKLQKWYGDLRGKPFAIEAENSILDISGFSKQYNCAFIWQKDGVKKLNLYLIINYFKGGKLRFKKIKPEAFEANRFYTVINKKSGEIVPMEVNFNFDDPNLIILPLAFGKRQGREFIWNDLLSLETGSLKLANGRVIEKTLYNRRTRQDEPALFVALTFERREVLDSSNIKPMNLIGVDRGENIPAVIALTDPEGCPLSRFKDSLGNPTHILRIRESYKEKQRTIQAKKEVEQRRAGGYSRKYASKAKNLADDMVRNTARDLLYYAVTQDAMLIFENLSRGFGRQGKRTFMAERQYTRMEDWLTAKLAYEGLPSKTYLSKTLAQYTSKTCSNCGFTITSADYDRVLEKLKKTATGWMTTINGKELKVEGQITYYNRYKRQNVVKDLSVELDRLSEESVNNDISSWTKGRSGEALSLLKKRFSHRPVQEKFVCLNCGFETHADEQAALNIARSWLFLRSQEYKKYQTNKTTGNTDKRAFVETWQSFYRKKLKEVWKPAV

SEQ ID NO: 35644 - protein, 978 aa, synthetic construct
  REGION 1..978: note = engineered CasX variant
QEIKRINKIRRRLVKDSNTKKAGKTGPMKTLLVRVMTPDLRERLENLRKKPENIPQPISNTSRANLNKLLTDYTEMKKAILHVYWEEFQKDPVGLMSRVAQPASKKIDQNKLKPEMDEKGNLTTAGFACSQCGQPLFVYKLEQVSEKGKAYTNYFGRCNVAEHEKLILLAQLKPEKDSDEAVTYSLGKFGQRALDFYSIHVTKESTHPVKPLAQIAGNRYASTPVGKALSDACMGTIASFLSKYQDIIIEHQKVVKGNQKRLESLRELAGKENLEYPSVTLPPQPHTSEGVDAYNEVIARVRMWVNLNLWQKLKLSRDDAKPLLRLKGFPSFPLVERQANEVDWWDMVCNVKKLINEKKEDGKVFWQNLAGYKRQEALRPYLSSEEDRKKGKKFARYQLGDLLLHLEKKHGEDWGKVYDEAWERIDKKVEGLSKHIKLEEERRSEDAQSKAALTDWLRAKASFVIEGLKEADKDEFCRCELKLQKWYGDLRGKPFAIEAENSILDISGFSKQYNCAFIWQKDGVKKLNLYLIINYFKGGKLRFKKIKPEAFEANRFYTVINKKSGEIVPMEVNFNFDDPNLIILPLAFGKRQGREFIWNDLLSLETGSLKLANGRVIEKTLYNRRTRQDEPALFVALTFERREVLDSSNIKPMNLIGVDRGENIPAVIALTDPEGCPLSRFKDSLGNPTHILRIRESYKEKQRTIQAKKEVEQRRAGGYSRKYASKAKNLADDMVRNTARDLLYYAVTQDAMLIFENLSRGFGRQGKRTFMAERQYTRMEDWLTAKLAYEGLPSKTYLSKTLAQYTSKTCSNCGFTITSADYDRVLEKLKKTATGWMTTINGKELKVEGQITYYNRYKRQNVVKDLSVELDRLSEESVNNDISSWTKGRSGEALSLLKKRFSHRPVQEKFVCLNCGFETHADEQAALNIARSWLFLRSQEYKKYQTNKTTGNTDKRAFVETWQSFYRKKLKEVWKPAV

SEQ ID NO: 35645 - protein, 978 aa, synthetic construct
  REGION 1..978: note = engineered CasX variant
QEIKRINKIRRRLVKDSNTKKAGKTGPMKTLLVRVMTPDLRERLENLRKKPENIPQPISNTSRANLNKLLTDYTEMKKAILHVYWEEFQKDPVGLMSRVAQPASKKIDQNKLKPEMDEKGNLTTAGFACSQCGQPLFVYKLEQVSEKGKAYTNYFGRCNVAEHEKLILLAQLKPEKDSDEAVTYSLGKFGQRALDFYSIHVTKESTHPVKPLAQIAGNRYASAPVGKALSDACMGTIASFLSKYQDIIIEHQKVVKGNQKRLESLRELAGKENLEYPSVTLPPQPHTSEGVDAYNEVIARVRMWVNLNLWQKLKLSRDDAKPLLRLKGFPSFPLVERQANEVDWWDMVCNVKKLINEKKEDGKVFWQNLAGYKRQEALRPYLSSEEDRKKGKKFARYQLGDLLLHLEKKHGEDWGKVYDEAWERIDKKVEGLSKHIKLEEERRSEDAQSKAALTDWLRAKASFVIEGLKEADKDEFCRCELKLQKWYGDLRGKPFAIEAENSILDISGFSKQYNCAFIWQKDGVKKLNLYLIINYFKGGKLRFKKIKPEAFEANRFYTVINKKSGEIVPMEVNFNFDDPNLIILPLAFGKRQGREFIWNDLLSLETGSLKLANGRVIEKTLYNRRTRQDEPALFVALTFERREVLDSSNIKPMNLIGVDRGENIPAVIALTDPEGCPLSRFKDSLGNPTHILRIRESYKEKQRTIQAKKEVEQRRAGGYSRKYASKAKNLADDMVRNTARDLLYYAVTQDAMLIFENLSRGFGRQGKRTFMAERQYTRMEDWLTAKLAYEGLPSKTYLSKTLAQYTSKTCSNCGFTITSADYDRVLEKLKKTATGWMTTINGKELKVEGQITYYNRYKRQNVVKDLSVELDRLSEESVNNDISSWTKGRSGEALSLLKKRFSHRPVQEKFVCLNCGFETHADEQAALNIARSWLFLRSQEYKKYQTNKTTGNTDKRAFVETWQSFYRKKLKEVWKPAV

SEQ ID NO: 35646 - protein, 978 aa, synthetic construct
  REGION 1..978: note = engineered CasX variant
QEIKRINKIRRRLVKDSNTKKAGKTGPMKTLLVRVMTPDLRERLENLRKKPENIPQPISNTSRANLNKLLTDYTEMKKAILHVYWEEFQKDPVGLMSRVAQPASKKIDQNKLKPEMDEKGNLTTAGFACSQCGQPLFVYKLEQVSEKGKAYTNYFGRCNVAEHEKLILLAQLKPEKDSDEAVTYSLGKFGQRALDFYSIHVTKESTHPVKPLAQIAGNRYASVPVGKALSDACMGTIASFLSKYQDIIIEHQKVVKGNQKRLESLRELAGKENLEYPSVTLPPQPHTSEGVDAYNEVIARVRMWVNLNLWQKLKLSRDDAKPLLRLKGFPSFPLVERQANEVDWWDMVCNVKKLINEKKEDGKVFWQNLAGYKRQEALRPYLSSEEDRKKGKKFARYQLGDLLLHLEKKHGEDWGKVYDEAWERIDKKVEGLSKHIKLEEERRSEDAQSKAALTDWLRAKASFVIEGLKEADKDEFCRCELKLQKWYGDLRGKPFAIEAENSILDISGFSKQYNCAFIWQKDGVKKLNLYLIINYFKGGKLRFKKIKPEAFEANRFYTVINKKSGEIVPMEVNFNFDDPNLIILPLAFGKRQGREFIWNDLLSLETGSLKLANGRVIEKTLYNRRTRQDEPALFVALTFERREVLDSSNIKPMNLIGVDRGENIPAVIALTDPEGCPLSRFKDSLGNPTHILRIRESYKEKQRTIQAKKEVEQRRAGGYSRKYASKAKNLADDMVRNTARDLLYYAVTQDAMLIFENLSRGFGRQGKRTFMAERQYTRMEDWLTAKLAYEGLPSKTYLSKTLAQYTSKTCSNCGFTITSADYDRVLEKLKKTATGWMTTINGKELKVEGQITYYNRYKRQNVVKDLSVELDRLSEESVNNDISSWTKGRSGEALSLLKKRFSHRPVQEKFVCLNCGFETHADEQAALNIARSWLFLRSQEYKKYQTNKTTGNTDKRAFVETWQSFYRKKLKEVWKPAV

SEQ ID NO: 35647 - protein, 978 aa, synthetic construct
  REGION 1..978: note = engineered CasX variant
QEIKRINKIRRRLVKDSNTKKAGKTGPMKTLLVRVMTPDLRERLENLRKKPENIPQPISNTSRANLNKLLTDYTEMKKAILHVYWEEFQKDPVGLMSRVAQPASKKIDQNKLKPEMDEKGNLTTAGFACSQCGQPLFVYKLEQVSEKGKAYTNYFGRCNVAEHEKLIKLAQLKPEKDSDEAVTYSLGKFGQRALDFYSIHVTKESTHPVKPLAQIAGNRYASGPVGKALSDACMGTIASFLSKYQDIIIEHQKVVKGNQKRLESLRELAGKENLEYPSVTLPPQPHTSEGVDAYNEVIARVRMWVNLNLWQKLKLSRDDAKPLLRLKGFPSFPLVERQANEVDWWDMVCNVKKLINEKKEDGKVFWQNLAGYKRQEALRPYLSSEEDRKKGKKFARYQLGDLLLHLEKKHGEDWGKVYDEAWERIDKKVEGLSKHIKLEEERRSEDAQSKAALTDWLRAKASFVIEGLKEADKDEFCRCELKLQKWYGDLRGKPFAIEAENSILDISGFSKQYNCAFIWQKDGVKKLNLYLIINYFKGGKLRFKKIKPEAFEANRFYTVINKKSGEIVPMEVNFNFDDPNLIILPLAFGKRQGREFIWNDLLSLETGSLKLANGRVIEKTLYNRRTRQDEPALFVALTFERREVLDSSNIKPMNLIGVDRGENIPAVIALTDPEGCPLSRFKDSLGNPTHILRIRESYKEKQRTIQAKKEVEQRRAGGYSRKYASKAKNLADDMVRNTARDLLYYAVTQDAMLIFENLSRGFGRQGKRTFMAERQYTRMEDWLTAKLAYEGLPSKTYLSKTLAQYTSKTCSNCGFTITSADYDRVLEKLKKTATGWMTTINGKELKVEGQITYYNRYKRQNVVKDLSVELDRLSEESVNNDISSWTKGRSGEALSLLKKRFSHRPVQEKFVCLNCGFETHADEQAALNIARSWLFLRSQEYKKYQTNKTTGNTDKRAFVETWQSFYRKKLKEVWKPAV

SEQ ID NO: 35648 - protein, 977 aa, synthetic construct
  REGION 1..977: note = engineered CasX variant
QEIKRINKIRRRLVKDSNTKKAGKTGPMKTLLVRVMTPDLRERLENLRKKPENIPQPISNTSRANLNKLLTDYTEMKKAILHVYWEEFQKDPVGLMSRVAQPASKKIDQNKLKPEMDEKGNLTTAGFACSQCGQPLFVYKLEQVSEKGKAYTNYFGRCNVAEHEKLILLAQLKPEKDSDEAVTYSLGKFGQRALDFYSIHVTKESTHPVKPLAQIAGNRYASPVGKALSDACMGTIASFLSKYQDIIIEHQKVVKGNQKRLESLRELAGKENLEYPSVTLPPQPHTSEGVDAYNEVIARVRMWVNLNLWQKLKLSRDDAKPLLRLKGFPSFPLVERQANEVDWWDMVCNVKKLINEKKEDGKVFWQNLAGYKRQEALRPYLSSEEDRKKGKKFARYQLGDLLLHLEKKHGEDWGKVYDEAWERIDKKVEGLSKHIKLEEERRSEDAQSKAALTDWLRAKASFVIEGLKEADKDEFCRCELKLQKWYGDLRGKPFAIEAENSILDISGFSKQYNCAFIWQKDGVKKLNLYLIINYFKGGKLRFKKIKPEAFEANRFYTVINKKSGEIVPMEVNFNFDDPNLIILPLAFGKRQGREFIWNDLLSLETGSLKLANGRVIEKTLYNRRTRQDEPALFVALTFERREVLDSSNIKPMNLIGVDRGENIPAVIALTDPEGCPLSRFKDSLGNPTHILRIRESYKEKQRTIQAKKEVEQRRAGGYSRKYASKAKNLADDMVRNTARDLLYYAVTQDAMLIFENLSRGFGRQGKRTFMAERQYTRMEDWLTAKLAYEGLPSKTYLSKTLAQYTSKTCSNCGFTITSADYDRVLEKLKKTATGWMTTINGKELKVEGQITYYNRYKRQNVVKDLSVELDRLSEESVNNDISSWTKGRSGEALSLLKKRFSHRPVQEKFVCLNCGFETHADEQAALNIARSWLFLRSQEYKKYQTNKTTGNTDKRAFVETWQSFYRKKLKEVWKPAV

SEQ ID NO: 35649 - protein, 978 aa, synthetic construct
  REGION 1..978: note = engineered CasX variant
QEIKRINKIRRRLVKDSNTKKAGKTGPMKTLLVRVMTPDLRERLENLRKKPENIPQPISNTSRANLNKLLTDYTEMKKAILHVYWEEFQKDPVGLMSRVAQPASKKIDQNKLKPEMDEKGNLTTAGFACSQCGQPLFVYKLEQVSEKGKAYTNYFGRCNVAEHEKLILLAQLKPEKDSDEAVTYSLGKFGQRALDFYSIHVTKESTHPVKPLAQIAGNRYASYPVGKALSDACMGTIASFLSKYQDIIIEHQKVVKGNQKRLESLRELAGKENLEYPSVTLPPQPHTSEGVDAYNEVIARVRMWVNLNLWQKLKLSRDDAKPLLRLKGFPSFPLVERQANEVDWWDMVCNVKKLINEKKEDGKVFWQNLAGYKRQEALRPYLSSEEDRKKGKKFARYQLGDLLLHLEKKHGEDWGKVYDEAWERIDKKVEGLSKHIKLEEERRSEDAQSKAALTDWLRAKASFVIEGLKEADKDEFCRCELKLQKWYGDLRGKPFAIEAENSILDISGFSKQYNCAFIWQKDGVKKLNLYLIINYFKGGKLRFKKIKPEAFEANRFYTVINKKSGEIVPMEVNFNFDDPNLIILPLAFGKRQGREFIWNDLLSLETGSLKLANGRVIEKTLYNRRTRQDEPALFVALTFERREVLDSSNIKPMNLIGVDRGENIPAVIALTDPEGCPLSRFKDSLGNPTHILRIGESYKEKQRTIQAKKEVEQRRAGGYSRKYASKAKNLADDMVRNTARDLLYYAVTQDAMLIFENLSRGFGRQGKRTFSAERQYTRMEDWLTAKLAYEGLPSKTYLSKTLAQYTSKTCSNCGFTITSADYDRVLEKLKKTATGWMTTINGKELKVEGQITYYNRYKRQNVVKDLSVELDRLSEESVNNDISSWTKGRSGEALSLLKKRFSHRPVQEKFVCLNCGFETHADEQAALNIARSWLFLRSQEYKKYQTNKTTGNTDKRAFVETWQSFYRKKLKEVWKPAV

SEQ ID NO: 35650 - protein, 978 aa, synthetic construct
  REGION 1..978: note = engineered CasX variant
QEIKRINKIRRRLVKDSNTKKAGKTGPMKTLLVRVMTPDLRERLENLRKKPENIPQPISNTSRANLNKLLTDYTEMKKAILHVYWEEFQKDPVGLMSRVAQPASKKIDQNKLKPEMDEKGNLTTAGFACSQCGQPLFVYKLEQVSEKGKAYTNYFGRCNVAEHEKLILLAQLKPEKDSDEAVTYSLGKFGQRALDFYSIHVTKESTHPVKPLAQIAGNRYASHPVGKALSDACMGTIASFLSKYQDIIIEHQKVVKGNQKRLESLRELAGKENLEYPSVTLPPQPHTSEGVDAYNEVIARVRMWVNLNLWQKLKLSRDDAKPLLRLKGFPSFPLVERQANEVDWWDMVCNVKKLINEKKEDGKVFWQNLAGYKRQEALRPYLSSEEDRKKGKKFARYQLGDLLLHLEKKHGEDWGKVYDEAWERIDKKVEGLSKHIKLEEERRSEDAQSKAALTDWLRAKASFVIEGLKEADKDEFCRCELKLQKWYGDLRGKPFAIEAENSILDISGFSKQYNCAFIWQKDGVKKLNLYLIINYFKGGKLRFKKIKPEAFEANRFYTVINKKSGEIVPMEVNFNFDDPNLIILPLAFGKRQGREFIWNDLLSLETGSLKLANGRVIEKTLYNRRTRQDEPALFVALTFERREVLDSSNIKPMNLIGVDRGENIPAVIALTDPEGCPLSRFKDSLGNPTHILRIGESYKEKQRTIQAKKEVEQRRAGGYSRKYASKAKNLADDMVRNTARDLLYYAVTQDAMLIFENLSRGFGRQGKRTFSAERQYTRMEDWLTAKLAYEGLPSKTYLSKTLAQYTSKTCSNCGFTITSADYDRVLEKLKKTATGWMTTINGKELKVEGQITYYNRYKRQNVVKDLSVELDRLSEESVNNDISSWTKGRSGEALSLLKKRFSHRPVQEKFVCLNCGFETHADEQAALNIARSWLFLRSQEYKKYQTNKTTGNTDKRAFVETWQSFYRKKLKEVWKPAV

SEQ ID NO: 35651 - protein, 978 aa, synthetic construct
  REGION 1..978: note = engineered CasX variant
QEIKRINKIRRRLVKDSNTKKAGKTGPMKTLLVRVMTPDLRERLENLRKKPENIPQPISNTSRANLNKLLTDYTEMKKAILHVYWEEFQKDPVGLMSRVAQPASKKIDQNKLKPEMDEKGNLTTAGFACSQCGQPLFVYKLEQVSEKGKAYTNYFGRCNVAEHEKLILLAQLKPEKDSDEAVTYSLGKFGQRALDFYSIHVTKESTHPVKPLAQIAGNRYASSPVGKALSDACMGTIASFLSKYQDIIIEHQKVVKGNQKRLESLRELAGKENLEYPSVTLPPQPHTSEGVDAYNEVIARVRMWVNLNLWQKLKLSRDDAKPLLRLKGFPSFPLVERQANEVDWWDMVCNVKKLINEKKEDGKVFWQNLAGYKRQEALRPYLSSEEDRKKGKKFARYQLGDLLLHLEKKHGEDWGKVYDEAWERIDKKVEGLSKHIKLEEERRSEDAQSKAALTDWLRAKASFVIEGLKEADKDEFCRCELKLQKWYGDLRGKPFAIEAENSILDISGFSKQYNCAFIWQKDGVKKLNLYLIINYFKGGKLRFKKIKPEAFEANRFYTVINKKSGEIVPMEVNFNFDDPNLIILPLAFGKRQGREFIWNDLLSLETGSLKLANGRVIEKTLYNRRTRQDEPALFVALTFERREVLDSSNIKPMNLIGVDRGENIPAVIALTDPEGCPLSRFKDSLGNPTHILRIGESYKEKQRTIQAKKEVEQRRAGGYSRKYASKAKNLADDMVRNTARDLLYYAVTQDAMLIFENLSRGFGRQGKRTFSAERQYTRMEDWLTAKLAYEGLPSKTYLSKTLAQYTSKTCSNCGFTITSADYDRVLEKLKKTATGWMTTINGKELKVEGQITYYNRYKRQNVVKDLSVELDRLSEESVNNDISSWTKGRSGEALSLLKKRFSHRPVQEKFVCLNCGFETHADEQAALNIARSWLFLRSQEYKKYQTNKTTGNTDKRAFVETWQSFYRKKLKEVWKPAV

SEQ ID NO: 35652 - protein, 978 aa, synthetic construct
  REGION 1..978: note = engineered CasX variant
QEIKRINKIRRRLVKDSNTKKAGKTGPMKTLLVRVMTPDLRERLENLRKKPENIPQPISNTSRANLNKLLTDYTEMKKAILHVYWEEFQKDPVGLMSRVAQPASKKIDQNKLKPEMDEKGNLTTAGFACSQCGQPLFVYKLEQVSEKGKAYTNYFGRCNVAEHEKLILLAQLKPEKDSDEAVTYSLGKFGQRALDFYSIHVTKESTHPVKPLAQIAGNRYASTPVGKALSDACMGTIASFLSKYQDIIIEHQKVVKGNQKRLESLRELAGKENLEYPSVTLPPQPHTSEGVDAYNEVIARVRMWVNLNLWQKLKLSRDDAKPLLRLKGFPSFPLVERQANEVDWWDMVCNVKKLINEKKEDGKVFWQNLAGYKRQEALRPYLSSEEDRKKGKKFARYQLGDLLLHLEKKHGEDWGKVYDEAWERIDKKVEGLSKHIKLEEERRSEDAQSKAALTDWLRAKASFVIEGLKEADKDEFCRCELKLQKWYGDLRGKPFAIEAENSILDISGFSKQYNCAFIWQKDGVKKLNLYLIINYFKGGKLRFKKIKPEAFEANRFYTVINKKSGEIVPMEVNFNFDDPNLIILPLAFGKRQGREFIWNDLLSLETGSLKLANGRVIEKTLYNRRTRQDEPALFVALTFERREVLDSSNIKPMNLIGVDRGENIPAVIALTDPEGCPLSRFKDSLGNPTHILRIGESYKEKQRTIQAKKEVEQRRAGGYSRKYASKAKNLADDMVRNTARDLLYYAVTQDAMLIFENLSRGFGRQGKRTFSAERQYTRMEDWLTAKLAYEGLPSKTYLSKTLAQYTSKTCSNCGFTITSADYDRVLEKLKKTATGWMTTINGKELKVEGQITYYNRYKRQNVVKDLSVELDRLSEESVNNDISSWTKGRSGEALSLLKKRFSHRPVQEKFVCLNCGFETHADEQAALNIARSWLFLRSQEYKKYQTNKTTGNTDKRAFVETWQSFYRKKLKEVWKPAV

SEQ ID NO: 35653 - protein, 978 aa, synthetic construct
  REGION 1..978: note = engineered CasX variant
QEIKRINKIRRRLVKDSNTKKAGKTGPMKTLLVRVMTPDLRERLENLRKKPENIPQPISNTSRANLNKLLTDYTEMKKAILHVYWEEFQKDPVGLMSRVAQPASKKIDQNKLKPEMDEKGNLTTAGFACSQCGQPLFVYKLEQVSEKGKAYTNYFGRCNVAEHEKLILLAQLKPEKDSDEAVTYSLGKFGQRALDFYSIHVTKESTHPVKPLAQIAGNRYASAPVGKALSDACMGTIASFLSKYQDIIIEHQKVVKGNQKRLESLRELAGKENLEYPSVTLPPQPHTSEGVDAYNEVIARVRMWVNLNLWQKLKLSRDDAKPLLRLKGFPSFPLVERQANEVDWWDMVCNVKKLINEKKEDGKVFWQNLAGYKRQEALRPYLSSEEDRKKGKKFARYQLGDLLLHLEKKHGEDWGKVYDEAWERIDKKVEGLSKHIKLEEERRSEDAQSKAALTDWLRAKASFVIEGLKEADKDEFCRCELKLQKWYGDLRGKPFAIEAENSILDISGFSKQYNCAFIWQKDGVKKLNLYLIINYFKGGKLRFKKIKPEAFEANRFYTVINKKSGEIVPMEVNFNFDDPNLIILPLAFGKRQGREFIWNDLLSLETGSLKLANGRVIEKTLYNRRTRQDEPALFVALTFERREVLDSSNIKPMNLIGVDRGENIPAVIALTDPEGCPLSRFKDSLGNPTHILRIGESYKEKQRTIQAKKEVEQRRAGGYSRKYASKAKNLADDMVRNTARDLLYYAVTQDAMLIFENLSRGFGRQGKRTFSAERQYTRMEDWLTAKLAYEGLPSKTYLSKTLAQYTSKTCSNCGFTITSADYDRVLEKLKKTATGWMTTINGKELKVEGQITYYNRYKRQNVVKDLSVELDRLSEESVNNDISSWTKGRSGEALSLLKKRFSHRPVQEKFVCLNCGFETHADEQAALNIARSWLFLRSQEYKKYQTNKTTGNTDKRAFVETWQSFYRKKLKEVWKPAV

SEQ ID NO: 35654 - protein, 978 aa, synthetic construct
  REGION 1..978: note = engineered CasX variant
QEIKRINKIRRRLVKDSNTKKAGKTGPMKTLLVRVMTPDLRERLENLRKKPENIPQPISNTSRANLNKLLTDYTEMKKAILHVYWEEFQKDPVGLMSRVAQPASKKIDQNKLKPEMDEKGNLTTAGFACSQCGQPLFVYKLEQVSEKGKAYTNYFGRCNVAEHEKLILLAQLKPEKDSDEAVTYSLGKFGQRALDFYSIHVTKESTHPVKPLAQIAGNRYASVPVGKALSDACMGTIASFLSKYQDIIIEHQKVVKGNQKRLESLRELAGKENLEYPSVTLPPQPHTSEGVDAYNEVIARVRMWVNLNLWQKLKLSRDDAKPLLRLKGFPSFPLVERQANEVDWWDMVCNVKKLINEKKEDGKVFWQNLAGYKRQEALRPYLSSEEDRKKGKKFARYQLGDLLLHLEKKHGEDWGKVYDEAWERIDKKVEGLSKHIKLEEERRSEDAQSKAALTDWLRAKASFVIEGLKEADKDEFCRCELKLQKWYGDLRGKPFAIEAENSILDISGFSKQYNCAFIWQKDGVKKLNLYLIINYFKGGKLRFKKIKPEAFEANRFYTVINKKSGEIVPMEVNFNFDDPNLIILPLAFGKRQGREFIWNDLLSLETGSLKLANGRVIEKTLYNRRTRQDEPALFVALTFERREVLDSSNIKPMNLIGVDRGENIPAVIALTDPEGCPLSRFKDSLGNPTHILRIGESYKEKQRTIQAKKEVEQRRAGGYSRKYASKAKNLADDMVRNTARDLLYYAVTQDAMLIFENLSRGFGRQGKRTFSAERQYTRMEDWLTAKLAYEGLPSKTYLSKTLAQYTSKTCSNCGFTITSADYDRVLEKLKKTATGWMTTINGKELKVEGQITYYNRYKRQNVVKDLSVELDRLSEESVNNDISSWTKGRSGEALSLLKKRFSHRPVQEKFVCLNCGFETHADEQAALNIARSWLFLRSQEYKKYQTNKTTGNTDKRAFVETWQSFYRKKLKEVWKPAV

SEQ ID NO: 35655 - protein, 978 aa, synthetic construct
  REGION 1..978: note = engineered CasX variant
QEIKRINKIRRRLVKDSNTKKAGKTGPMKTLLVRVMTPDLRERLENLRKKPENIPQPISNTSRANLNKLLTDYTEMKKAILHVYWEEFQKDPVGLMSRVAQPASKKIDQNKLKPEMDEKGNLTTAGFACSQCGQPLFVYKLEQVSEKGKAYTNYFGRCNVAEHEKLIKLAQLKPEKDSDEAVTYSLGKFGQRALDFYSIHVTKESTHPVKPLAQIAGNRYASGPVGKALSDACMGTIASFLSKYQDIIIEHQKVVKGNQKRLESLRELAGKENLEYPSVTLPPQPHTSEGVDAYNEVIARVRMWVNLNLWQKLKLSRDDAKPLLRLKGFPSFPLVERQANEVDWWDMVCNVKKLINEKKEDGKVFWQNLAGYKRQEALRPYLSSEEDRKKGKKFARYQLGDLLLHLEKKHGEDWGKVYDEAWERIDKKVEGLSKHIKLEEERRSEDAQSKAALTDWLRAKASFVIEGLKEADKDEFCRCELKLQKWYGDLRGKPFAIEAENSILDISGFSKQYNCAFIWQKDGVKKLNLYLIINYFKGGKLRFKKIKPEAFEANRFYTVINKKSGEIVPMEVNFNFDDPNLIILPLAFGKRQGREFIWNDLLSLETGSLKLANGRVIEKTLYNRRTRQDEPALFVALTFERREVLDSSNIKPMNLIGVDRGENIPAVIALTDPEGCPLSRFKDSLGNPTHILRIGESYKEKQRTIQAKKEVEQRRAGGYSRKYASKAKNLADDMVRNTARDLLYYAVTQDAMLIFENLSRGFGRQGKRTFSAERQYTRMEDWLTAKLAYEGLPSKTYLSKTLAQYTSKTCSNCGFTITSADYDRVLEKLKKTATGWMTTINGKELKVEGQITYYNRYKRQNVVKDLSVELDRLSEESVNNDISSWTKGRSGEALSLLKKRFSHRPVQEKFVCLNCGFETHADEQAALNIARSWLFLRSQEYKKYQTNKTTGNTDKRAFVETWQSFYRKKLKEVWKPAV

SEQ ID NO: 35656 - protein, 977 aa, synthetic construct
  REGION 1..977: note = engineered CasX variant
QEIKRINKIRRRLVKDSNTKKAGKTGPMKTLLVRVMTPDLRERLENLRKKPENIPQPISNTSRANLNKLLTDYTEMKKAILHVYWEEFQKDPVGLMSRVAQPASKKIDQNKLKPEMDEKGNLTTAGFACSQCGQPLFVYKLEQVSEKGKAYTNYFGRCNVAEHEKLILLAQLKPEKDSDEAVTYSLGKFGQRALDFYSIHVTKESTHPVKPLAQIAGNRYASPVGKALSDACMGTIASFLSKYQDIIIEHQKVVKGNQKRLESLRELAGKENLEYPSVTLPPQPHTSEGVDAYNEVIARVRMWVNLNLWQKLKLSRDDAKPLLRLKGFPSFPLVERQANEVDWWDMVCNVKKLINEKKEDGKVFWQNLAGYKRQEALRPYLSSEEDRKKGKKFARYQLGDLLLHLEKKHGEDWGKVYDEAWERIDKKVEGLSKHIKLEEERRSEDAQSKAALTDWLRAKASFVIEGLKEADKDEFCRCELKLQKWYGDLRGKPFAIEAENSILDISGFSKQYNCAFIWQKDGVKKLNLYLIINYFKGGKLRFKKIKPEAFEANRFYTVINKKSGEIVPMEVNFNFDDPNLIILPLAFGKRQGREFIWNDLLSLETGSLKLANGRVIEKTLYNRRTRQDEPALFVALTFERREVLDSSNIKPMNLIGVDRGENIPAVIALTDPEGCPLSRFKDSLGNPTHILRIGESYKEKQRTIQAKKEVEQRRAGGYSRKYASKAKNLADDMVRNTARDLLYYAVTQDAMLIFENLSRGFGRQGKRTFSAERQYTRMEDWLTAKLAYEGLPSKTYLSKTLAQYTSKTCSNCGFTITSADYDRVLEKLKKTATGWMTTINGKELKVEGQITYYNRYKRQNVVKDLSVELDRLSEESVNNDISSWTKGRSGEALSLLKKRFSHRPVQEKFVCLNCGFETHADEQAALNIARSWLFLRSQEYKKYQTNKTTGNTDKRAFVETWQSFYRKKLKEVWKPAV

SEQ ID NO: 35657 - protein, 978 aa, synthetic construct
  REGION 1..978: note = engineered CasX variant
QEIKRINKIRRRLVKDSNTKKAGKTGPMKTLLVRVMTPDLRERLENLRKKPENIPQPISNTSRANLNKLLTDYTEMKKAILHVYWEEFQKDPVGLMSRVAQPASKKIDQNKLKPEMDEKGNLTTAGFACSQCGQPLFVYKLEQVSEKGKAYTNYFGRCNVAEHEKLILLAQLKPEKDSDEAVTYSLGKFGQRALDFYSIHVTKESTHPVKPLAQIAGNRYASYPVGKALSDACMGTIASFLSKYQDIIIEHQKVVKGNQKRLESLRELAGKENLEYPSVTLPPQPHTSEGVDAYNEVIARVRMWVNLNLWQKLKLSRDDAKPLLRLKGFPSFPLVERQANEVDWWDMVCNVKKLINEKKEDGKVFWQNLAGYKRQEALRPYLSSEEDRKKGKKFARYQLGDLLLHLEKKHGEDWGKVYDEAWERIDKKVEGLSKHIKLEEERRSEDAQSKAALTDWLRAKASFVIEGLKEADKDEFCRCELKLQKWYGDLRGKPFAIEAENSILDISGFSKQYNCAFIWQKDGVKKLNLYLIINYFKGGKLRFKKIKPEAFEANRFYTVINKKSGEIVPMEVNFNFDDPNLIILPLAFGKRQGREFIWNDLLSLETGSLKLANGRVIEKTLYNRRTRQDEPALFVALTFERREVLDSSNIKPMNLIGVDRGENIPAVIALTDPEGCPLSRFKDSLGNPTHILRIGESYKEKQRTIQAKKEVEQRRAGGYSRKYASKAKNLADDMVRNTARDLLYYAVTQDAMLIFENLSRGFGRQGKRTFMAERQYTRMEDWLTAKLAYEGLPSKTYLSKTLAQYTSKTCSNCGFTITSADYDRVLEKLKKTATGWMTTINGKELKVEGQITYYNRYKRQNVVKDLSVELDRLSEESVNNDISSWDKGRSGEALSLLKKRFSHRPVQEKFVCLNCGFETHADEQAALNIARSWLFLRSQEYKKYQTNKTTGNTDKRAFVETWQSFYRKKLKEVWKPAV

SEQ ID NO: 35658 - protein, 978 aa, synthetic construct
  REGION 1..978: note = engineered CasX variant
QEIKRINKIRRRLVKDSNTKKAGKTGPMKTLLVRVMTPDLRERLENLRKKPENIPQPISNTSRANLNKLLTDYTEMKKAILHVYWEEFQKDPVGLMSRVAQPASKKIDQNKLKPEMDEKGNLTTAGFACSQCGQPLFVYKLEQVSEKGKAYTNYFGRCNVAEHEKLILLAQLKPEKDSDEAVTYSLGKFGQRALDFYSIHVTKESTHPVKPLAQIAGNRYASHPVGKALSDACMGTIASFLSKYQDIIIEHQKVVKGNQKRLESLRELAGKENLEYPSVTLPPQPHTSEGVDAYNEVIARVRMWVNLNLWQKLKLSRDDAKPLLRLKGFPSFPLVERQANEVDWWDMVCNVKKLINEKKEDGKVFWQNLAGYKRQEALRPYLSSEEDRKKGKKFARYQLGDLLLHLEKKHGEDWGKVYDEAWERIDKKVEGLSKHIKLEEERRSEDAQSKAALTDWLRAKASFVIEGLKEADKDEFCRCELKLQKWYGDLRGKPFAIEAENSILDISGFSKQYNCAFIWQKDGVKKLNLYLIINYFKGGKLRFKKIKPEAFEANRFYTVINKKSGEIVPMEVNFNFDDPNLIILPLAFGKRQGREFIWNDLLSLETGSLKLANGRVIEKTLYNRRTRQDEPALFVALTFERREVLDSSNIKPMNLIGVDRGENIPAVIALTDPEGCPLSRFKDSLGNPTHILRIGESYKEKQRTIQAKKEVEQRRAGGYSRKYASKAKNLADDMVRNTARDLLYYAVTQDAMLIFENLSRGFGRQGKRTFMAERQYTRMEDWLTAKLAYEGLPSKTYLSKTLAQYTSKTCSNCGFTITSADYDRVLEKLKKTATGWMTTINGKELKVEGQITYYNRYKRQNVVKDLSVELDRLSEESVNNDISSWDKGRSGEALSLLKKRFSHRPVQEKFVCLNCGFETHADEQAALNIARSWLFLRSQEYKKYQTNKTTGNTDKRAFVETWQSFYRKKLKEVWKPAV

SEQ ID NO: 35659 - protein, 978 aa, synthetic construct
  REGION 1..978: note = engineered CasX variant
QEIKRINKIRRRLVKDSNTKKAGKTGPMKTLLVRVMTPDLRERLENLRKKPENIPQPISNTSRANLNKLLTDYTEMKKAILHVYWEEFQKDPVGLMSRVAQPASKKIDQNKLKPEMDEKGNLTTAGFACSQCGQPLFVYKLEQVSEKGKAYTNYFGRCNVAEHEKLILLAQLKPEKDSDEAVTYSLGKFGQRALDFYSIHVTKESTHPVKPLAQIAGNRYASSPVGKALSDACMGTIASFLSKYQDIIIEHQKVVKGNQKRLESLRELAGKENLEYPSVTLPPQPHTSEGVDAYNEVIARVRMWVNLNLWQKLKLSRDDAKPLLRLKGFPSFPLVERQANEVDWWDMVCNVKKLINEKKEDGKVFWQNLAGYKRQEALRPYLSSEEDRKKGKKFARYQLGDLLLHLEKKHGEDWGKVYDEAWERIDKKVEGLSKHIKLEEERRSEDAQSKAALTDWLRAKASFVIEGLKEADKDEFCRCELKLQKWYGDLRGKPFAIEAENSILDISGFSKQYNCAFIWQKDGVKKLNLYLIINYFKGGKLRFKKIKPEAFEANRFYTVINKKSGEIVPMEVNFNFDDPNLIILPLAFGKRQGREFIWNDLLSLETGSLKLANGRVIEKTLYNRRTRQDEPALFVALTFERREVLDSSNIKPMNLIGVDRGENIPAVIALTDPEGCPLSRFKDSLGNPTHILRIGESYKEKQRTIQAKKEVEQRRAGGYSRKYASKAKNLADDMVRNTARDLLYYAVTQDAMLIFENLSRGFGRQGKRTFMAERQYTRMEDWLTAKLAYEGLPSKTYLSKTLAQYTSKTCSNCGFTITSADYDRVLEKLKKTATGWMTTINGKELKVEGQITYYNRYKRQNVVKDLSVELDRLSEESVNNDISSWDKGRSGEALSLLKKRFSHRPVQEKFVCLNCGFETHADEQAALNIARSWLFLRSQEYKKYQTNKTTGNTDKRAFVETWQSFYRKKLKEVWKPAV

SEQ ID NO: 35660 - protein, 978 aa, synthetic construct
  REGION 1..978: note = engineered CasX variant
QEIKRINKIRRRLVKDSNTKKAGKTGPMKTLLVRVMTPDLRERLENLRKKPENIPQPISNTSRANLNKLLTDYTEMKKAILHVYWEEFQKDPVGLMSRVAQPASKKIDQNKLKPEMDEKGNLTTAGFACSQCGQPLFVYKLEQVSEKGKAYTNYFGRCNVAEHEKLILLAQLKPEKDSDEAVTYSLGKFGQRALDFYSIHVTKESTHPVKPLAQIAGNRYASTPVGKALSDACMGTIASFLSKYQDIIIEHQKVVKGNQKRLESLRELAGKENLEYPSVTLPPQPHTSEGVDAYNEVIARVRMWVNLNLWQKLKLSRDDAKPLLRLKGFPSFPLVERQANEVDWWDMVCNVKKLINEKKEDGKVFWQNLAGYKRQEALRPYLSSEEDRKKGKKFARYQLGDLLLHLEKKHGEDWGKVYDEAWERIDKKVEGLSKHIKLEEERRSEDAQSKAALTDWLRAKASFVIEGLKEADKDEFCRCELKLQKWYGDLRGKPFAIEAENSILDISGFSKQYNCAFIWQKDGVKKLNLYLIINYFKGGKLRFKKIKPEAFEANRFYTVINKKSGEIVPMEVNFNFDDPNLIILPLAFGKRQGREFIWNDLLSLETGSLKLANGRVIEKTLYNRRTRQDEPALFVALTFERREVLDSSNIKPMNLIGVDRGENIPAVIALTDPEGCPLSRFKDSLGNPTHILRIGESYKEKQRTIQAKKEVEQRRAGGYSRKYASKAKNLADDMVRNTARDLLYYAVTQDAMLIFENLSRGFGRQGKRTFMAERQYTRMEDWLTAKLAYEGLPSKTYLSKTLAQYTSKTCSNCGFTITSADYDRVLEKLKKTATGWMTTINGKELKVEGQITYYNRYKRQNVVKDLSVELDRLSEESVNNDISSWDKGRSGEALSLLKKRFSHRPVQEKFVCLNCGFETHADEQAALNIARSWLFLRSQEYKKYQTNKTTGNTDKRAFVETWQSFYRKKLKEVWKPAV

SEQ ID NO: 35661 - protein, 978 aa, synthetic construct
  REGION 1..978: note = engineered CasX variant
QEIKRINKIRRRLVKDSNTKKAGKTGPMKTLLVRVMTPDLRERLENLRKKPENIPQPISNTSRANLNKLLTDYTEMKKAILHVYWEEFQKDPVGLMSRVAQPASKKIDQNKLKPEMDEKGNLTTAGFACSQCGQPLFVYKLEQVSEKGKAYTNYFGRCNVAEHEKLILLAQLKPEKDSDEAVTYSLGKFGQRALDFYSIHVTKESTHPVKPLAQIAGNRYASAPVGKALSDACMGTIASFLSKYQDIIIEHQKVVKGNQKRLESLRELAGKENLEYPSVTLPPQPHTSEGVDAYNEVIARVRMWVNLNLWQKLKLSRDDAKPLLRLKGFPSFPLVERQANEVDWWDMVCNVKKLINEKKEDGKVFWQNLAGYKRQEALRPYLSSEEDRKKGKKFARYQLGDLLLHLEKKHGEDWGKVYDEAWERIDKKVEGLSKHIKLEEERRSEDAQSKAALTDWLRAKASFVIEGLKEADKDEFCRCELKLQKWYGDLRGKPFAIEAENSILDISGFSKQYNCAFIWQKDGVKKLNLYLIINYFKGGKLRFKKIKPEAFEANRFYTVINKKSGEIVPMEVNFNFDDPNLIILPLAFGKRQGREFIWNDLLSLETGSLKLANGRVIEKTLYNRRTRQDEPALFVALTFERREVLDSSNIKPMNLIGVDRGENIPAVIALTDPEGCPLSRFKDSLGNPTHILRIGESYKEKQRTIQAKKEVEQRRAGGYSRKYASKAKNLADDMVRNTARDLLYYAVTQDAMLIFENLSRGFGRQGKRTFMAERQYTRMEDWLTAKLAYEGLPSKTYLSKTLAQYTSKTCSNCGFTITSADYDRVLEKLKKTATGWMTTINGKELKVEGQITYYNRYKRQNVVKDLSVELDRLSEESVNNDISSWDKGRSGEALSLLKKRFSHRPVQEKFVCLNCGFETHADEQAALNIARSWLFLRSQEYKKYQTNKTTGNTDKRAFVETWQSFYRKKLKEVWKPAV

SEQ ID NO: 35662 - protein, 978 aa, synthetic construct
  REGION 1..978: note = engineered CasX variant
QEIKRINKIRRRLVKDSNTKKAGKTGPMKTLLVRVMTPDLRERLENLRKKPENIPQPISNTSRANLNKLLTDYTEMKKAILHVYWEEFQKDPVGLMSRVAQPASKKIDQNKLKPEMDEKGNLTTAGFACSQCGQPLFVYKLEQVSEKGKAYTNYFGRCNVAEHEKLILLAQLKPEKDSDEAVTYSLGKFGQRALDFYSIHVTKESTHPVKPLAQIAGNRYASVPVGKALSDACMGTIASFLSKYQDIIIEHQKVVKGNQKRLESLRELAGKENLEYPSVTLPPQPHTSEGVDAYNEVIARVRMWVNLNLWQKLKLSRDDAKPLLRLKGFPSFPLVERQANEVDWWDMVCNVKKLINEKKEDGKVFWQNLAGYKRQEALRPYLSSEEDRKKGKKFARYQLGDLLLHLEKKHGEDWGKVYDEAWERIDKKVEGLSKHIKLEEERRSEDAQSKAALTDWLRAKASFVIEGLKEADKDEFCRCELKLQKWYGDLRGKPFAIEAENSILDISGFSKQYNCAFIWQKDGVKKLNLYLIINYFKGGKLRFKKIKPEAFEANRFYTVINKKSGEIVPMEVNFNFDDPNLIILPLAFGKRQGREFIWNDLLSLETGSLKLANGRVIEKTLYNRRTRQDEPALFVALTFERREVLDSSNIKPMNLIGVDRGENIPAVIALTDPEGCPLSRFKDSLGNPTHILRIGESYKEKQRTIQAKKEVEQRRAGGYSRKYASKAKNLADDMVRNTARDLLYYAVTQDAMLIFENLSRGFGRQGKRTFMAERQYTRMEDWLTAKLAYEGLPSKTYLSKTLAQYTSKTCSNCGFTITSADYDRVLEKLKKTATGWMTTINGKELKVEGQITYYNRYKRQNVVKDLSVELDRLSEESVNNDISSWDKGRSGEALSLLKKRFSHRPVQEKFVCLNCGFETHADEQAALNIARSWLFLRSQEYKKYQTNKTTGNTDKRAFVETWQSFYRKKLKEVWKPAV

SEQ ID NO: 35663 - protein, 978 aa, synthetic construct
  REGION 1..978: note = engineered CasX variant
QEIKRINKIRRRLVKDSNTKKAGKTGPMKTLLVRVMTPDLRERLENLRKKPENIPQPISNTSRANLNKLLTDYTEMKKAILHVYWEEFQKDPVGLMSRVAQPASKKIDQNKLKPEMDEKGNLTTAGFACSQCGQPLFVYKLEQVSEKGKAYTNYFGRCNVAEHEKLIKLAQLKPEKDSDEAVTYSLGKFGQRALDFYSIHVTKESTHPVKPLAQIAGNRYASGPVGKALSDACMGTIASFLSKYQDIIIEHQKVVKGNQKRLESLRELAGKENLEYPSVTLPPQPHTSEGVDAYNEVIARVRMWVNLNLWQKLKLSRDDAKPLLRLKGFPSFPLVERQANEVDWWDMVCNVKKLINEKKEDGKVFWQNLAGYKRQEALRPYLSSEEDRKKGKKFARYQLGDLLLHLEKKHGEDWGKVYDEAWERIDKKVEGLSKHIKLEEERRSEDAQSKAALTDWLRAKASFVIEGLKEADKDEFCRCELKLQKWYGDLRGKPFAIEAENSILDISGFSKQYNCAFIWQKDGVKKLNLYLIINYFKGGKLRFKKIKPEAFEANRFYTVINKKSGEIVPMEVNFNFDDPNLIILPLAFGKRQGREFIWNDLLSLETGSLKLANGRVIEKTLYNRRTRQDEPALFVALTFERREVLDSSNIKPMNLIGVDRGENIPAVIALTDPEGCPLSRFKDSLGNPTHILRIGESYKEKQRTIQAKKEVEQRRAGGYSRKYASKAKNLADDMVRNTARDLLYYAVTQDAMLIFENLSRGFGRQGKRTFMAERQYTRMEDWLTAKLAYEGLPSKTYLSKTLAQYTSKTCSNCGFTITSADYDRVLEKLKKTATGWMTTINGKELKVEGQITYYNRYKRQNVVKDLSVELDRLSEESVNNDISSWDKGRSGEALSLLKKRFSHRPVQEKFVCLNCGFETHADEQAALNIARSWLFLRSQEYKKYQTNKTTGNTDKRAFVETWQSFYRKKLKEVWKPAV

SEQ ID NO: 35664 - protein, 977 aa, synthetic construct
  REGION 1..977: note = engineered CasX variant
QEIKRINKIRRRLVKDSNTKKAGKTGPMKTLLVRVMTPDLRERLENLRKKPENIPQPISNTSRANLNKLLTDYTEMKKAILHVYWEEFQKDPVGLMSRVAQPASKKIDQNKLKPEMDEKGNLTTAGFACSQCGQPLFVYKLEQVSEKGKAYTNYFGRCNVAEHEKLILLAQLKPEKDSDEAVTYSLGKFGQRALDFYSIHVTKESTHPVKPLAQIAGNRYASPVGKALSDACMGTIASFLSKYQDIIIEHQKVVKGNQKRLESLRELAGKENLEYPSVTLPPQPHTSEGVDAYNEVIARVRMWVNLNLWQKLKLSRDDAKPLLRLKGFPSFPLVERQANEVDWWDMVCNVKKLINEKKEDGKVFWQNLAGYKRQEALRPYLSSEEDRKKGKKFARYQLGDLLLHLEKKHGEDWGKVYDEAWERIDKKVEGLSKHIKLEEERRSEDAQSKAALTDWLRAKASFVIEGLKEADKDEFCRCELKLQKWYGDLRGKPFAIEAENSILDISGFSKQYNCAFIWQKDGVKKLNLYLIINYFKGGKLRFKKIKPEAFEANRFYTVINKKSGEIVPMEVNFNFDDPNLIILPLAFGKRQGREFIWNDLLSLETGSLKLANGRVIEKTLYNRRTRQDEPALFVALTFERREVLDSSNIKPMNLIGVDRGENIPAVIALTDPEGCPLSRFKDSLGNPTHILRIGESYKEKQRTIQAKKEVEQRRAGGYSRKYASKAKNLADDMVRNTARDLLYYAVTQDAMLIFENLSRGFGRQGKRTFMAERQYTRMEDWLTAKLAYEGLPSKTYLSKTLAQYTSKTCSNCGFTITSADYDRVLEKLKKTATGWMTTINGKELKVEGQITYYNRYKRQNVVKDLSVELDRLSEESVNNDISSWDKGRSGEALSLLKKRFSHRPVQEKFVCLNCGFETHADEQAALNIARSWLFLRSQEYKKYQTNKTTGNTDKRAFVETWQSFYRKKLKEVWKPAV

SEQ ID NO: 35665 - protein, 978 aa, synthetic construct
  REGION 1..978: note = engineered CasX variant
QEIKRINKIRRRLVKDSNTKKAGKTGPMKTLLVRVMTPDLRERLENLRKKPENIPQPISNTSRANLNKLLTDYTEMKKAILHVYWEEFQVDPVGLMSRVAQPASKKIDQNKLKPEMDEKGNLTTAGFACSQCGQPLFVYKLEQVSEKGKAYTNYFGRCNVAEHEKLILLAQLKPEKDSDEAVTYSLGKFGQRALDFYSIHVTKESTHPVKPLAQIAGNRYASYPVGKALSDACMGTIASFLSKYQDIIIEHQKVVKGNQKRLESLRELAGKENLEYPSVTLPPQPHTSEGVDAYNEVIARVRMWVNLNLWQKLKLSRDDAKPLLRLKGFPSFPLVERQANEVDWWDMVCNVKKLINEKKEDGKVFWQNLAGYKRQEALRPYLSSEEDRKKGKKFARYQLGDLLLHLEKKHGEDWGKVYDEAWERIDKKVEGLSKHIKLEEERRSEDAQSKAALTDWLRAKASFVIEGLKEADKDEFCRCELKLQKWYGDLRGKPFAIEAENSILDISGFSKQYNCAFIWQKDGVKKLNLYLIINYFKGGKLRFKKIKPEAFEANRFYTVINKKSGEIVPMEVNFNFDDPNLIILPLAFGKRQGREFIWNDLLSLETGSLKLANGRVIEKTLYNRRTRQDEPALFVALTFERREVLDSSNIKPMNLIGVDRGENIPAVIALTDPEGCPLSRFKDSLGNPTHILRIGESYKEKQRTIQAKKEVEQRRAGGYSRKYASKAKNLADDMVRNTARDLLYYAVTQDAMLIFENLSRGFGRQGKRTFMAERQYTRMEDWLTAKLAYEGLPSKTYLSKTLAQYTSKTCSNCGFTITSADYDRVLEKLKKTATGWMTTINGKELKVEGQITYYNRYKRQNVVKDLSVELDRLSEESVNNDISSWTKGRSGEALSLLKKRFSHRPVQEKFVCLNCGFETHADEQAALNIARSWLFLRSQEYKKYQTNKTTGNTDKRAFVETWQSFYRKKLKEVWKPAV

SEQ ID NO: 35666 - protein, 978 aa, synthetic construct
  REGION 1..978: note = engineered CasX variant
QEIKRINKIRRRLVKDSNTKKAGKTGPMKTLLVRVMTPDLRERLENLRKKPENIPQPISNTSRANLNKLLTDYTEMKKAILHVYWEEFQVDPVGLMSRVAQPASKKIDQNKLKPEMDEKGNLTTAGFACSQCGQPLFVYKLEQVSEKGKAYTNYFGRCNVAEHEKLILLAQLKPEKDSDEAVTYSLGKFGQRALDFYSIHVTKESTHPVKPLAQIAGNRYASHPVGKALSDACMGTIASFLSKYQDIIIEHQKVVKGNQKRLESLRELAGKENLEYPSVTLPPQPHTSEGVDAYNEVIARVRMWVNLNLWQKLKLSRDDAKPLLRLKGFPSFPLVERQANEVDWWDMVCNVKKLINEKKEDGKVFWQNLAGYKRQEALRPYLSSEEDRKKGKKFARYQLGDLLLHLEKKHGEDWGKVYDEAWERIDKKVEGLSKHIKLEEERRSEDAQSKAALTDWLRAKASFVIEGLKEADKDEFCRCELKLQKWYGDLRGKPFAIEAENSILDISGFSKQYNCAFIWQKDGVKKLNLYLIINYFKGGKLRFKKIKPEAFEANRFYTVINKKSGEIVPMEVNFNFDDPNLIILPLAFGKRQGREFIWNDLLSLETGSLKLANGRVIEKTLYNRRTRQDEPALFVALTFERREVLDSSNIKPMNLIGVDRGENIPAVIALTDPEGCPLSRFKDSLGNPTHILRIGESYKEKQRTIQAKKEVEQRRAGGYSRKYASKAKNLADDMVRNTARDLLYYAVTQDAMLIFENLSRGFGRQGKRTFMAERQYTRMEDWLTAKLAYEGLPSKTYLSKTLAQYTSKTCSNCGFTITSADYDRVLEKLKKTATGWMTTINGKELKVEGQITYYNRYKRQNVVKDLSVELDRLSEESVNNDISSWTKGRSGEALSLLKKRFSHRPVQEKFVCLNCGFETHADEQAALNIARSWLFLRSQEYKKYQTNKTTGNTDKRAFVETWQSFYRKKLKEVWKPAV

SEQ ID NO: 35667 - protein, 978 aa, synthetic construct
  REGION 1..978: note = engineered CasX variant
QEIKRINKIRRRLVKDSNTKKAGKTGPMKTLLVRVMTPDLRERLENLRKKPENIPQPISNTSRANLNKLLTDYTEMKKAILHVYWEEFQVDPVGLMSRVAQPASKKIDQNKLKPEMDEKGNLTTAGFACSQCGQPLFVYKLEQVSEKGKAYTNYFGRCNVAEHEKLILLAQLKPEKDSDEAVTYSLGKFGQRALDFYSIHVTKESTHPVKPLAQIAGNRYASSPVGKALSDACMGTIASFLSKYQDIIIEHQKVVKGNQKRLESLRELAGKENLEYPSVTLPPQPHTSEGVDAYNEVIARVRMWVNLNLWQKLKLSRDDAKPLLRLKGFPSFPLVERQANEVDWWDMVCNVKKLINEKKEDGKVFWQNLAGYKRQEALRPYLSSEEDRKKGKKFARYQLGDLLLHLEKKHGEDWGKVYDEAWERIDKKVEGLSKHIKLEEERRSEDAQSKAALTDWLRAKASFVIEGLKEADKDEFCRCELKLQKWYGDLRGKPFAIEAENSILDISGFSKQYNCAFIWQKDGVKKLNLYLIINYFKGGKLRFKKIKPEAFEANRFYTVINKKSGEIVPMEVNFNFDDPNLIILPLAFGKRQGREFIWNDLLSLETGSLKLANGRVIEKTLYNRRTRQDEPALFVALTFERREVLDSSNIKPMNLIGVDRGENIPAVIALTDPEGCPLSRFKDSLGNPTHILRIGESYKEKQRTIQAKKEVEQRRAGGYSRKYASKAKNLADDMVRNTARDLLYYAVTQDAMLIFENLSRGFGRQGKRTFMAERQYTRMEDWLTAKLAYEGLPSKTYLSKTLAQYTSKTCSNCGFTITSADYDRVLEKLKKTATGWMTTINGKELKVEGQITYYNRYKRQNVVKDLSVELDRLSEESVNNDISSWTKGRSGEALSLLKKRFSHRPVQEKFVCLNCGFETHADEQAALNIARSWLFLRSQEYKKYQTNKTTGNTDKRAFVETWQSFYRKKLKEVWKPAV

SEQ ID NO: 35668 - protein, 978 aa, synthetic construct
  REGION 1..978: note = engineered CasX variant
QEIKRINKIRRRLVKDSNTKKAGKTGPMKTLLVRVMTPDLRERLENLRKKPENIPQPISNTSRANLNKLLTDYTEMKKAILHVYWEEFQVDPVGLMSRVAQPASKKIDQNKLKPEMDEKGNLTTAGFACSQCGQPLFVYKLEQVSEKGKAYTNYFGRCNVAEHEKLILLAQLKPEKDSDEAVTYSLGKFGQRALDFYSIHVTKESTHPVKPLAQIAGNRYASTPVGKALSDACMGTIASFLSKYQDIIIEHQKVVKGNQKRLESLRELAGKENLEYPSVTLPPQPHTSEGVDAYNEVIARVRMWVNLNLWQKLKLSRDDAKPLLRLKGFPSFPLVERQANEVDWWDMVCNVKKLINEKKEDGKVFWQNLAGYKRQEALRPYLSSEEDRKKGKKFARYQLGDLLLHLEKKHGEDWGKVYDEAWERIDKKVEGLSKHIKLEEERRSEDAQSKAALTDWLRAKASFVIEGLKEADKDEFCRCELKLQKWYGDLRGKPFAIEAENSILDISGFSKQYNCAFIWQKDGVKKLNLYLIINYFKGGKLRFKKIKPEAFEANRFYTVINKKSGEIVPMEVNFNFDDPNLIILPLAFGKRQGREFIWNDLLSLETGSLKLANGRVIEKTLYNRRTRQDEPALFVALTFERREVLDSSNIKPMNLIGVDRGENIPAVIALTDPEGCPLSRFKDSLGNPTHILRIGESYKEKQRTIQAKKEVEQRRAGGYSRKYASKAKNLADDMVRNTARDLLYYAVTQDAMLIFENLSRGFGRQGKRTFMAERQYTRMEDWLTAKLAYEGLPSKTYLSKTLAQYTSKTCSNCGFTITSADYDRVLEKLKKTATGWMTTINGKELKVEGQITYYNRYKRQNVVKDLSVELDRLSEESVNNDISSWTKGRSGEALSLLKKRFSHRPVQEKFVCLNCGFETHADEQAALNIARSWLFLRSQEYKKYQTNKTTGNTDKRAFVETWQSFYRKKLKEVWKPAV

SEQ ID NO: 35669 - protein, 978 aa, synthetic construct
  REGION 1..978: note = engineered CasX variant
QEIKRINKIRRRLVKDSNTKKAGKTGPMKTLLVRVMTPDLRERLENLRKKPENIPQPISNTSRANLNKLLTDYTEMKKAILHVYWEEFQVDPVGLMSRVAQPASKKIDQNKLKPEMDEKGNLTTAGFACSQCGQPLFVYKLEQVSEKGKAYTNYFGRCNVAEHEKLILLAQLKPEKDSDEAVTYSLGKFGQRALDFYSIHVTKESTHPVKPLAQIAGNRYASAPVGKALSDACMGTIASFLSKYQDIIIEHQKVVKGNQKRLESLRELAGKENLEYPSVTLPPQPHTSEGVDAYNEVIARVRMWVNLNLWQKLKLSRDDAKPLLRLKGFPSFPLVERQANEVDWWDMVCNVKKLINEKKEDGKVFWQNLAGYKRQEALRPYLSSEEDRKKGKKFARYQLGDLLLHLEKKHGEDWGKVYDEAWERIDKKVEGLSKHIKLEEERRSEDAQSKAALTDWLRAKASFVIEGLKEADKDEFCRCELKLQKWYGDLRGKPFAIEAENSILDISGFSKQYNCAFIWQKDGVKKLNLYLIINYFKGGKLRFKKIKPEAFEANRFYTVINKKSGEIVPMEVNFNFDDPNLIILPLAFGKRQGREFIWNDLLSLETGSLKLANGRVIEKTLYNRRTRQDEPALFVALTFERREVLDSSNIKPMNLIGVDRGENIPAVIALTDPEGCPLSRFKDSLGNPTHILRIGESYKEKQRTIQAKKEVEQRRAGGYSRKYASKAKNLADDMVRNTARDLLYYAVTQDAMLIFENLSRGFGRQGKRTFMAERQYTRMEDWLTAKLAYEGLPSKTYLSKTLAQYTSKTCSNCGFTITSADYDRVLEKLKKTATGWMTTINGKELKVEGQITYYNRYKRQNVVKDLSVELDRLSEESVNNDISSWTKGRSGEALSLLKKRFSHRPVQEKFVCLNCGFETHADEQAALNIARSWLFLRSQEYKKYQTNKTTGNTDKRAFVETWQSFYRKKLKEVWKPAV

SEQ ID NO: 35670 - protein, 978 aa, synthetic construct
  REGION 1..978: note = engineered CasX variant
QEIKRINKIRRRLVKDSNTKKAGKTGPMKTLLVRVMTPDLRERLENLRKKPENIPQPISNTSRANLNKLLTDYTEMKKAILHVYWEEFQVDPVGLMSRVAQPASKKIDQNKLKPEMDEKGNLTTAGFACSQCGQPLFVYKLEQVSEKGKAYTNYFGRCNVAEHEKLILLAQLKPEKDSDEAVTYSLGKFGQRALDFYSIHVTKESTHPVKPLAQIAGNRYASVPVGKALSDACMGTIASFLSKYQDIIIEHQKVVKGNQKRLESLRELAGKENLEYPSVTLPPQPHTSEGVDAYNEVIARVRMWVNLNLWQKLKLSRDDAKPLLRLKGFPSFPLVERQANEVDWWDMVCNVKKLINEKKEDGKVFWQNLAGYKRQEALRPYLSSEEDRKKGKKFARYQLGDLLLHLEKKHGEDWGKVYDEAWERIDKKVEGLSKHIKLEEERRSEDAQSKAALTDWLRAKASFVIEGLKEADKDEFCRCELKLQKWYGDLRGKPFAIEAENSILDISGFSKQYNCAFIWQKDGVKKLNLYLIINYFKGGKLRFKKIKPEAFEANRFYTVINKKSGEIVPMEVNFNFDDPNLIILPLAFGKRQGREFIWNDLLSLETGSLKLANGRVIEKTLYNRRTRQDEPALFVALTFERREVLDSSNIKPMNLIGVDRGENIPAVIALTDPEGCPLSRFKDSLGNPTHILRIGESYKEKQRTIQAKKEVEQRRAGGYSRKYASKAKNLADDMVRNTARDLLYYAVTQDAMLIFENLSRGFGRQGKRTFMAERQYTRMEDWLTAKLAYEGLPSKTYLSKTLAQYTSKTCSNCGFTITSADYDRVLEKLKKTATGWMTTINGKELKVEGQITYYNRYKRQNVVKDLSVELDRLSEESVNNDISSWTKGRSGEALSLLKKRFSHRPVQEKFVCLNCGFETHADEQAALNIARSWLFLRSQEYKKYQTNKTTGNTDKRAFVETWQSFYRKKLKEVWKPAV

SEQ ID NO: 35671 - protein, 978 aa, synthetic construct
  REGION 1..978: note = engineered CasX variant
QEIKRINKIRRRLVKDSNTKKAGKTGPMKTLLVRVMTPDLRERLENLRKKPENIPQPISNTSRANLNKLLTDYTEMKKAILHVYWEEFQVDPVGLMSRVAQPASKKIDQNKLKPEMDEKGNLTTAGFACSQCGQPLFVYKLEQVSEKGKAYTNYFGRCNVAEHEKLIKLAQLKPEKDSDEAVTYSLGKFGQRALDFYSIHVTKESTHPVKPLAQIAGNRYASGPVGKALSDACMGTIASFLSKYQDIIIEHQKVVKGNQKRLESLRELAGKENLEYPSVTLPPQPHTSEGVDAYNEVIARVRMWVNLNLWQKLKLSRDDAKPLLRLKGFPSFPLVERQANEVDWWDMVCNVKKLINEKKEDGKVFWQNLAGYKRQEALRPYLSSEEDRKKGKKFARYQLGDLLLHLEKKHGEDWGKVYDEAWERIDKKVEGLSKHIKLEEERRSEDAQSKAALTDWLRAKASFVIEGLKEADKDEFCRCELKLQKWYGDLRGKPFAIEAENSILDISGFSKQYNCAFIWQKDGVKKLNLYLIINYFKGGKLRFKKIKPEAFEANRFYTVINKKSGEIVPMEVNFNFDDPNLIILPLAFGKRQGREFIWNDLLSLETGSLKLANGRVIEKTLYNRRTRQDEPALFVALTFERREVLDSSNIKPMNLIGVDRGENIPAVIALTDPEGCPLSRFKDSLGNPTHILRIGESYKEKQRTIQAKKEVEQRRAGGYSRKYASKAKNLADDMVRNTARDLLYYAVTQDAMLIFENLSRGFGRQGKRTFMAERQYTRMEDWLTAKLAYEGLPSKTYLSKTLAQYTSKTCSNCGFTITSADYDRVLEKLKKTATGWMTTINGKELKVEGQITYYNRYKRQNVVKDLSVELDRLSEESVNNDISSWTKGRSGEALSLLKKRFSHRPVQEKFVCLNCGFETHADEQAALNIARSWLFLRSQEYKKYQTNKTTGNTDKRAFVETWQSFYRKKLKEVWKPAV

SEQ ID NO: 35672 - protein, 977 aa, synthetic construct
  REGION 1..977: note = engineered CasX variant
QEIKRINKIRRRLVKDSNTKKAGKTGPMKTLLVRVMTPDLRERLENLRKKPENIPQPISNTSRANLNKLLTDYTEMKKAILHVYWEEFQVDPVGLMSRVAQPASKKIDQNKLKPEMDEKGNLTTAGFACSQCGQPLFVYKLEQVSEKGKAYTNYFGRCNVAEHEKLILLAQLKPEKDSDEAVTYSLGKFGQRALDFYSIHVTKESTHPVKPLAQIAGNRYASPVGKALSDACMGTIASFLSKYQDIIIEHQKVVKGNQKRLESLRELAGKENLEYPSVTLPPQPHTSEGVDAYNEVIARVRMWVNLNLWQKLKLSRDDAKPLLRLKGFPSFPLVERQANEVDWWDMVCNVKKLINEKKEDGKVFWQNLAGYKRQEALRPYLSSEEDRKKGKKFARYQLGDLLLHLEKKHGEDWGKVYDEAWERIDKKVEGLSKHIKLEEERRSEDAQSKAALTDWLRAKASFVIEGLKEADKDEFCRCELKLQKWYGDLRGKPFAIEAENSILDISGFSKQYNCAFIWQKDGVKKLNLYLIINYFKGGKLRFKKIKPEAFEANRFYTVINKKSGEIVPMEVNFNFDDPNLIILPLAFGKRQGREFIWNDLLSLETGSLKLANGRVIEKTLYNRRTRQDEPALFVALTFERREVLDSSNIKPMNLIGVDRGENIPAVIALTDPEGCPLSRFKDSLGNPTHILRIGESYKEKQRTIQAKKEVEQRRAGGYSRKYASKAKNLADDMVRNTARDLLYYAVTQDAMLIFENLSRGFGRQGKRTFMAERQYTRMEDWLTAKLAYEGLPSKTYLSKTLAQYTSKTCSNCGFTITSADYDRVLEKLKKTATGWMTTINGKELKVEGQITYYNRYKRQNVVKDLSVELDRLSEESVNNDISSWTKGRSGEALSLLKKRFSHRPVQEKFVCLNCGFETHADEQAALNIARSWLFLRSQEYKKYQTNKTTGNTDKRAFVETWQSFYRKKLKEVWKPAV

SEQ ID NO: 35673 - protein, 978 aa, synthetic construct
  REGION 1..978: note = engineered CasX variant
QEIKRLNKIRRRLVKDSNTKKAGKTGPMKTLLVRVMTPDLRERLENLRKKPENIPQPISNTSRANLNKLLTDYTEMKKAILHVYWEEFQKDPVGLMSRVAQPASKKIDQNKLKPEMDEKGNLTTAGFACSQCGQPLFVYKLEQVSEKGKAYTNYFGRCNVAEHEKLILLAQLKPEKDSDEAVTYSLGKFGQRALDFYSIHVTKESTHPVKPLAQIAGNRYASYPVGKALSDACMGTIASFLSKYQDIIIEHQKVVKGNQKRLESLRELAGKENLEYPSVTLPPQPHTSEGVDAYNEVIARVRMWVNLNLWQKLKLSRDDAKPLLRLKGFPSFPLVERQANEVDWWDMVCNVKKLINEKKEDGKVFWQNLAGYKRQEALRPYLSSEEDRKKGKKFARYQLGDLLLHLEKKHGEDWGKVYDEAWERIDKKVEGLSKHIKLEEERRSEDAQSKAALTDWLRAKASFVIEGLKEADKDEFCRCELKLQKWYGDLRGKPFAIEAENSILDISGFSKQYNCAFIWQKDGVKKLNLYLIINYFKGGKLRFKKIKPEAFEANRFYTVINKKSGEIVPMEVNFNFDDPNLIILPLAFGKRQGREFIWNDLLSLETGSLKLANGRVIEKTLYNRRTRQDEPALFVALTFERREVLDSSNIKPMNLIGVDRGENIPAVIALTDPEGCPLSRFKDSLGNPTHILRIGESYKEKQRTIQAKKEVEQRRAGGYSRKYASKAKNLADDMVRNTARDLLYYAVTQDAMLIFENLSRGFGRQGKRTFMAERQYTRMEDWLTAKLAYEGLPSKTYLSKTLAQYTSKTCSNCGFTITSADYDRVLEKLKKTATGWMTTINGKELKVEGQITYYNRYKRQNVVKDLSVELDRLSEESVNNDISSWTKGRSGEALSLLKKRFSHRPVQEKFVCLNCGFETHADEQAALNIARSWLFLRSQEYKKYQTNKTTGNTDKRAFVETWQSFYRKKLKEVWKPAV

SEQ ID NO: 35674 - protein, 978 aa, synthetic construct
  REGION 1..978: note = engineered CasX variant
QEIKRLNKIRRRLVKDSNTKKAGKTGPMKTLLVRVMTPDLRERLENLRKKPENIPQPISNTSRANLNKLLTDYTEMKKAILHVYWEEFQKDPVGLMSRVAQPASKKIDQNKLKPEMDEKGNLTTAGFACSQCGQPLFVYKLEQVSEKGKAYTNYFGRCNVAEHEKLILLAQLKPEKDSDEAVTYSLGKFGQRALDFYSIHVTKESTHPVKPLAQIAGNRYASHPVGKALSDACMGTIASFLSKYQDIIIEHQKVVKGNQKRLESLRELAGKENLEYPSVTLPPQPHTSEGVDAYNEVIARVRMWVNLNLWQKLKLSRDDAKPLLRLKGFPSFPLVERQANEVDWWDMVCNVKKLINEKKEDGKVFWQNLAGYKRQEALRPYLSSEEDRKKGKKFARYQLGDLLLHLEKKHGEDWGKVYDEAWERIDKKVEGLSKHIKLEEERRSEDAQSKAALTDWLRAKASFVIEGLKEADKDEFCRCELKLQKWYGDLRGKPFAIEAENSILDISGFSKQYNCAFIWQKDGVKKLNLYLIINYFKGGKLRFKKIKPEAFEANRFYTVINKKSGEIVPMEVNFNFDDPNLIILPLAFGKRQGREFIWNDLLSLETGSLKLANGRVIEKTLYNRRTRQDEPALFVALTFERREVLDSSNIKPMNLIGVDRGENIPAVIALTDPEGCPLSRFKDSLGNPTHILRIGESYKEKQRTIQAKKEVEQRRAGGYSRKYASKAKNLADDMVRNTARDLLYYAVTQDAMLIFENLSRGFGRQGKRTFMAERQYTRMEDWLTAKLAYEGLPSKTYLSKTLAQYTSKTCSNCGFTITSADYDRVLEKLKKTATGWMTTINGKELKVEGQITYYNRYKRQNVVKDLSVELDRLSEESVNNDISSWTKGRSGEALSLLKKRFSHRPVQEKFVCLNCGFETHADEQAALNIARSWLFLRSQEYKKYQTNKTTGNTDKRAFVETWQSFYRKKLKEVWKPAV

SEQ ID NO: 35675 - protein, 978 aa, synthetic construct
  REGION 1..978: note = engineered CasX variant
QEIKRLNKIRRRLVKDSNTKKAGKTGPMKTLLVRVMTPDLRERLENLRKKPENIPQPISNTSRANLNKLLTDYTEMKKAILHVYWEEFQKDPVGLMSRVAQPASKKIDQNKLKPEMDEKGNLTTAGFACSQCGQPLFVYKLEQVSEKGKAYTNYFGRCNVAEHEKLILLAQLKPEKDSDEAVTYSLGKFGQRALDFYSIHVTKESTHPVKPLAQIAGNRYASSPVGKALSDACMGTIASFLSKYQDIIIEHQKVVKGNQKRLESLRELAGKENLEYPSVTLPPQPHTSEGVDAYNEVIARVRMWVNLNLWQKLKLSRDDAKPLLRLKGFPSFPLVERQANEVDWWDMVCNVKKLINEKKEDGKVFWQNLAGYKRQEALRPYLSSEEDRKKGKKFARYQLGDLLLHLEKKHGEDWGKVYDEAWERIDKKVEGLSKHIKLEEERRSEDAQSKAALTDWLRAKASFVIEGLKEADKDEFCRCELKLQKWYGDLRGKPFAIEAENSILDISGFSKQYNCAFIWQKDGVKKLNLYLIINYFKGGKLRFKKIKPEAFEANRFYTVINKKSGEIVPMEVNFNFDDPNLIILPLAFGKRQGREFIWNDLLSLETGSLKLANGRVIEKTLYNRRTRQDEPALFVALTFERREVLDSSNIKPMNLIGVDRGENIPAVIALTDPEGCPLSRFKDSLGNPTHILRIGESYKEKQRTIQAKKEVEQRRAGGYSRKYASKAKNLADDMVRNTARDLLYYAVTQDAMLIFENLSRGFGRQGKRTFMAERQYTRMEDWLTAKLAYEGLPSKTYLSKTLAQYTSKTCSNCGFTITSADYDRVLEKLKKTATGWMTTINGKELKVEGQITYYNRYKRQNVVKDLSVELDRLSEESVNNDISSWTKGRSGEALSLLKKRFSHRPVQEKFVCLNCGFETHADEQAALNIARSWLFLRSQEYKKYQTNKTTGNTDKRAFVETWQSFYRKKLKEVWKPAV

SEQ ID NO: 35676 - protein, 978 aa, synthetic construct
  REGION 1..978: note = engineered CasX variant
QEIKRLNKIRRRLVKDSNTKKAGKTGPMKTLLVRVMTPDLRERLENLRKKPENIPQPISNTSRANLNKLLTDYTEMKKAILHVYWEEFQKDPVGLMSRVAQPASKKIDQNKLKPEMDEKGNLTTAGFACSQCGQPLFVYKLEQVSEKGKAYTNYFGRCNVAEHEKLILLAQLKPEKDSDEAVTYSLGKFGQRALDFYSIHVTKESTHPVKPLAQIAGNRYASTPVGKALSDACMGTIASFLSKYQDIIIEHQKVVKGNQKRLESLRELAGKENLEYPSVTLPPQPHTSEGVDAYNEVIARVRMWVNLNLWQKLKLSRDDAKPLLRLKGFPSFPLVERQANEVDWWDMVCNVKKLINEKKEDGKVFWQNLAGYKRQEALRPYLSSEEDRKKGKKFARYQLGDLLLHLEKKHGEDWGKVYDEAWERIDKKVEGLSKHIKLEEERRSEDAQSKAALTDWLRAKASFVIEGLKEADKDEFCRCELKLQKWYGDLRGKPFAIEAENSILDISGFSKQYNCAFIWQKDGVKKLNLYLIINYFKGGKLRFKKIKPEAFEANRFYTVINKKSGEIVPMEVNFNFDDPNLIILPLAFGKRQGREFIWNDLLSLETGSLKLANGRVIEKTLYNRRTRQDEPALFVALTFERREVLDSSNIKPMNLIGVDRGENIPAVIALTDPEGCPLSRFKDSLGNPTHILRIGESYKEKQRTIQAKKEVEQRRAGGYSRKYASKAKNLADDMVRNTARDLLYYAVTQDAMLIFENLSRGFGRQGKRTFMAERQYTRMEDWLTAKLAYEGLPSKTYLSKTLAQYTSKTCSNCGFTITSADYDRVLEKLKKTATGWMTTINGKELKVEGQITYYNRYKRQNVVKDLSVELDRLSEESVNNDISSWTKGRSGEALSLLKKRFSHRPVQEKFVCLNCGFETHADEQAALNIARSWLFLRSQEYKKYQTNKTTGNTDKRAFVETWQSFYRKKLKEVWKPAV

SEQ ID NO: 35677 - protein, 978 aa, synthetic construct
  REGION 1..978: note = engineered CasX variant
QEIKRLNKIRRRLVKDSNTKKAGKTGPMKTLLVRVMTPDLRERLENLRKKPENIPQPISNTSRANLNKLLTDYTEMKKAILHVYWEEFQKDPVGLMSRVAQPASKKIDQNKLKPEMDEKGNLTTAGFACSQCGQPLFVYKLEQVSEKGKAYTNYFGRCNVAEHEKLILLAQLKPEKDSDEAVTYSLGKFGQRALDFYSIHVTKESTHPVKPLAQIAGNRYASAPVGKALSDACMGTIASFLSKYQDIIIEHQKVVKGNQKRLESLRELAGKENLEYPSVTLPPQPHTSEGVDAYNEVIARVRMWVNLNLWQKLKLSRDDAKPLLRLKGFPSFPLVERQANEVDWWDMVCNVKKLINEKKEDGKVFWQNLAGYKRQEALRPYLSSEEDRKKGKKFARYQLGDLLLHLEKKHGEDWGKVYDEAWERIDKKVEGLSKHIKLEEERRSEDAQSKAALTDWLRAKASFVIEGLKEADKDEFCRCELKLQKWYGDLRGKPFAIEAENSILDISGFSKQYNCAFIWQKDGVKKLNLYLIINYFKGGKLRFKKIKPEAFEANRFYTVINKKSGEIVPMEVNFNFDDPNLIILPLAFGKRQGREFIWNDLLSLETGSLKLANGRVIEKTLYNRRTRQDEPALFVALTFERREVLDSSNIKPMNLIGVDRGENIPAVIALTDPEGCPLSRFKDSLGNPTHILRIGESYKEKQRTIQAKKEVEQRRAGGYSRKYASKAKNLADDMVRNTARDLLYYAVTQDAMLIFENLSRGFGRQGKRTFMAERQYTRMEDWLTAKLAYEGLPSKTYLSKTLAQYTSKTCSNCGFTITSADYDRVLEKLKKTATGWMTTINGKELKVEGQITYYNRYKRQNVVKDLSVELDRLSEESVNNDISSWTKGRSGEALSLLKKRFSHRPVQEKFVCLNCGFETHADEQAALNIARSWLFLRSQEYKKYQTNKTTGNTDKRAFVETWQSFYRKKLKEVWKPAV

SEQ ID NO: 35678 - protein, 978 aa, synthetic construct
  REGION 1..978: note = engineered CasX variant
QEIKRLNKIRRRLVKDSNTKKAGKTGPMKTLLVRVMTPDLRERLENLRKKPENIPQPISNTSRANLNKLLTDYTEMKKAILHVYWEEFQKDPVGLMSRVAQPASKKIDQNKLKPEMDEKGNLTTAGFACSQCGQPLFVYKLEQVSEKGKAYTNYFGRCNVAEHEKLILLAQLKPEKDSDEAVTYSLGKFGQRALDFYSIHVTKESTHPVKPLAQIAGNRYASVPVGKALSDACMGTIASFLSKYQDIIIEHQKVVKGNQKRLESLRELAGKENLEYPSVTLPPQPHTSEGVDAYNEVIARVRMWVNLNLWQKLKLSRDDAKPLLRLKGFPSFPLVERQANEVDWWDMVCNVKKLINEKKEDGKVFWQNLAGYKRQEALRPYLSSEEDRKKGKKFARYQLGDLLLHLEKKHGEDWGKVYDEAWERIDKKVEGLSKHIKLEEERRSEDAQSKAALTDWLRAKASFVIEGLKEADKDEFCRCELKLQKWYGDLRGKPFAIEAENSILDISGFSKQYNCAFIWQKDGVKKLNLYLIINYFKGGKLRFKKIKPEAFEANRFYTVINKKSGEIVPMEVNFNFDDPNLIILPLAFGKRQGREFIWNDLLSLETGSLKLANGRVIEKTLYNRRTRQDEPALFVALTFERREVLDSSNIKPMNLIGVDRGENIPAVIALTDPEGCPLSRFKDSLGNPTHILRIGESYKEKQRTIQAKKEVEQRRAGGYSRKYASKAKNLADDMVRNTARDLLYYAVTQDAMLIFENLSRGFGRQGKRTFMAERQYTRMEDWLTAKLAYEGLPSKTYLSKTLAQYTSKTCSNCGFTITSADYDRVLEKLKKTATGWMTTINGKELKVEGQITYYNRYKRQNVVKDLSVELDRLSEESVNNDISSWTKGRSGEALSLLKKRFSHRPVQEKFVCLNCGFETHADEQAALNIARSWLFLRSQEYKKYQTNKTTGNTDKRAFVETWQSFYRKKLKEVWKPAV

SEQ ID NO: 35679 - protein, 978 aa, synthetic construct
  REGION 1..978: note = engineered CasX variant
QEIKRLNKIRRRLVKDSNTKKAGKTGPMKTLLVRVMTPDLRERLENLRKKPENIPQPISNTSRANLNKLLTDYTEMKKAILHVYWEEFQKDPVGLMSRVAQPASKKIDQNKLKPEMDEKGNLTTAGFACSQCGQPLFVYKLEQVSEKGKAYTNYFGRCNVAEHEKLIKLAQLKPEKDSDEAVTYSLGKFGQRALDFYSIHVTKESTHPVKPLAQIAGNRYASGPVGKALSDACMGTIASFLSKYQDIIIEHQKVVKGNQKRLESLRELAGKENLEYPSVTLPPQPHTSEGVDAYNEVIARVRMWVNLNLWQKLKLSRDDAKPLLRLKGFPSFPLVERQANEVDWWDMVCNVKKLINEKKEDGKVFWQNLAGYKRQEALRPYLSSEEDRKKGKKFARYQLGDLLLHLEKKHGEDWGKVYDEAWERIDKKVEGLSKHIKLEEERRSEDAQSKAALTDWLRAKASFVIEGLKEADKDEFCRCELKLQKWYGDLRGKPFAIEAENSILDISGFSKQYNCAFIWQKDGVKKLNLYLIINYFKGGKLRFKKIKPEAFEANRFYTVINKKSGEIVPMEVNFNFDDPNLIILPLAFGKRQGREFIWNDLLSLETGSLKLANGRVIEKTLYNRRTRQDEPALFVALTFERREVLDSSNIKPMNLIGVDRGENIPAVIALTDPEGCPLSRFKDSLGNPTHILRIGESYKEKQRTIQAKKEVEQRRAGGYSRKYASKAKNLADDMVRNTARDLLYYAVTQDAMLIFENLSRGFGRQGKRTFMAERQYTRMEDWLTAKLAYEGLPSKTYLSKTLAQYTSKTCSNCGFTITSADYDRVLEKLKKTATGWMTTINGKELKVEGQITYYNRYKRQNVVKDLSVELDRLSEESVNNDISSWTKGRSGEALSLLKKRFSHRPVQEKFVCLNCGFETHADEQAALNIARSWLFLRSQEYKKYQTNKTTGNTDKRAFVETWQSFYRKKLKEVWKPAV

SEQ ID NO: 35680 - protein, 977 aa, synthetic construct
  REGION 1..977: note = engineered CasX variant
QEIKRLNKIRRRLVKDSNTKKAGKTGPMKTLLVRVMTPDLRERLENLRKKPENIPQPISNTSRANLNKLLTDYTEMKKAILHVYWEEFQKDPVGLMSRVAQPASKKIDQNKLKPEMDEKGNLTTAGFACSQCGQPLFVYKLEQVSEKGKAYTNYFGRCNVAEHEKLILLAQLKPEKDSDEAVTYSLGKFGQRALDFYSIHVTKESTHPVKPLAQIAGNRYASPVGKALSDACMGTIASFLSKYQDIIIEHQKVVKGNQKRLESLRELAGKENLEYPSVTLPPQPHTSEGVDAYNEVIARVRMWVNLNLWQKLKLSRDDAKPLLRLKGFPSFPLVERQANEVDWWDMVCNVKKLINEKKEDGKVFWQNLAGYKRQEALRPYLSSEEDRKKGKKFARYQLGDLLLHLEKKHGEDWGKVYDEAWERIDKKVEGLSKHIKLEEERRSEDAQSKAALTDWLRAKASFVIEGLKEADKDEFCRCELKLQKWYGDLRGKPFAIEAENSILDISGFSKQYNCAFIWQKDGVKKLNLYLIINYFKGGKLRFKKIKPEAFEANRFYTVINKKSGEIVPMEVNFNFDDPNLIILPLAFGKRQGREFIWNDLLSLETGSLKLANGRVIEKTLYNRRTRQDEPALFVALTFERREVLDSSNIKPMNLIGVDRGENIPAVIALTDPEGCPLSRFKDSLGNPTHILRIGESYKEKQRTIQAKKEVEQRRAGGYSRKYASKAKNLADDMVRNTARDLLYYAVTQDAMLIFENLSRGFGRQGKRTFMAERQYTRMEDWLTAKLAYEGLPSKTYLSKTLAQYTSKTCSNCGFTITSADYDRVLEKLKKTATGWMTTINGKELKVEGQITYYNRYKRQNVVKDLSVELDRLSEESVNNDISSWTKGRSGEALSLLKKRFSHRPVQEKFVCLNCGFETHADEQAALNIARSWLFLRSQEYKKYQTNKTTGNTDKRAFVETWQSFYRKKLKEVWKPAV

SEQ ID NO: 35681 - protein, 978 aa, synthetic construct
  REGION 1..978: note = engineered CasX variant
QEIKRINKIRRRLVKDSNTKKAGKTGPMKTLLVRVMTPDLRERLENLRKKPENIPQPISNTSRANLNKLLTDYTEMKKAILHVYWEEFQKDPVGLMSRVAQPASKKIDQNKLKPEMDEKGNLTTAGFACSQCGQPLFVYKLEQVSEKGKAYTNYVGRCNVAEHEKLILLAQLKPEKDSDEAVTYSLGKFGQRALDFYSIHVTKESTHPVKPLAQIAGNRYASYPVGKALSDACMGTIASFLSKYQDIIIEHQKVVKGNQKRLESLRELAGKENLEYPSVTLPPQPHTSEGVDAYNEVIARVRMWVNLNLWQKLKLSRDDAKPLLRLKGFPSFPLVERQANEVDWWDMVCNVKKLINEKKEDGKVFWQNLAGYKRQEALRPYLSSEEDRKKGKKFARYQLGDLLLHLEKKHGEDWGKVYDEAWERIDKKVEGLSKHIKLEEERRSEDAQSKAALTDWLRAKASFVIEGLKEADKDEFCRCELKLQKWYGDLRGKPFAIEAENSILDISGFSKQYNCAFIWQKDGVKKLNLYLIINYFKGGKLRFKKIKPEAFEANRFYTVINKKSGEIVPMEVNFNFDDPNLIILPLAFGKRQGREFIWNDLLSLETGSLKLANGRVIEKTLYNRRTRQDEPALFVALTFERREVLDSSNIKPMNLIGVDRGENIPAVIALTDPEGCPLSRFKDSLGNPTHILRIGESYKEKQRTIQAKKEVEQRRAGGYSRKYASKAKNLADDMVRNTARDLLYYAVTQDAMLIFENLSRGFGRQGKRTFMAERQYTRMEDWLTAKLAYEGLPSKTYLSKTLAQYTSKTCSNCGFTITSADYDRVLEKLKKTATGWMTTINGKELKVEGQITYYNRYKRQNVVKDLSVELDRLSEESVNNDISSWTKGRSGEALSLLKKRFSHRPVQEKFVCLNCGFETHADEQAALNIARSWLFLRSQEYKKYQTNKTTGNTDKRAFVETWQSFYRKKLKEVWKPAV

SEQ ID NO: 35682 - protein, 978 aa, synthetic construct
  REGION 1..978: note = engineered CasX variant
QEIKRINKIRRRLVKDSNTKKAGKTGPMKTLLVRVMTPDLRERLENLRKKPENIPQPISNTSRANLNKLLTDYTEMKKAILHVYWEEFQKDPVGLMSRVAQPASKKIDQNKLKPEMDEKGNLTTAGFACSQCGQPLFVYKLEQVSEKGKAYTNYVGRCNVAEHEKLILLAQLKPEKDSDEAVTYSLGKFGQRALDFYSIHVTKESTHPVKPLAQIAGNRYASHPVGKALSDACMGTIASFLSKYQDIIIEHQKVVKGNQKRLESLRELAGKENLEYPSVTLPPQPHTSEGVDAYNEVIARVRMWVNLNLWQKLKLSRDDAKPLLRLKGFPSFPLVERQANEVDWWDMVCNVKKLINEKKEDGKVFWQNLAGYKRQEALRPYLSSEEDRKKGKKFARYQLGDLLLHLEKKHGEDWGKVYDEAWERIDKKVEGLSKHIKLEEERRSEDAQSKAALTDWLRAKASFVIEGLKEADKDEFCRCELKLQKWYGDLRGKPFAIEAENSILDISGFSKQYNCAFIWQKDGVKKLNLYLIINYFKGGKLRFKKIKPEAFEANRFYTVINKKSGEIVPMEVNFNFDDPNLIILPLAFGKRQGREFIWNDLLSLETGSLKLANGRVIEKTLYNRRTRQDEPALFVALTFERREVLDSSNIKPMNLIGVDRGENIPAVIALTDPEGCPLSRFKDSLGNPTHILRIGESYKEKQRTIQAKKEVEQRRAGGYSRKYASKAKNLADDMVRNTARDLLYYAVTQDAMLIFENLSRGFGRQGKRTFMAERQYTRMEDWLTAKLAYEGLPSKTYLSKTLAQYTSKTCSNCGFTITSADYDRVLEKLKKTATGWMTTINGKELKVEGQITYYNRYKRQNVVKDLSVELDRLSEESVNNDISSWTKGRSGEALSLLKKRFSHRPVQEKFVCLNCGFETHADEQAALNIARSWLFLRSQEYKKYQTNKTTGNTDKRAFVETWQSFYRKKLKEVWKPAV

SEQ ID NO: 35683 - protein, 978 aa, synthetic construct
  REGION 1..978: note = engineered CasX variant
QEIKRINKIRRRLVKDSNTKKAGKTGPMKTLLVRVMTPDLRERLENLRKKPENIPQPISNTSRANLNKLLTDYTEMKKAILHVYWEEFQKDPVGLMSRVAQPASKKIDQNKLKPEMDEKGNLTTAGFACSQCGQPLFVYKLEQVSEKGKAYTNYVGRCNVAEHEKLILLAQLKPEKDSDEAVTYSLGKFGQRALDFYSIHVTKESTHPVKPLAQIAGNRYASSPVGKALSDACMGTIASFLSKYQDIIIEHQKVVKGNQKRLESLRELAGKENLEYPSVTLPPQPHTSEGVDAYNEVIARVRMWVNLNLWQKLKLSRDDAKPLLRLKGFPSFPLVERQANEVDWWDMVCNVKKLINEKKEDGKVFWQNLAGYKRQEALRPYLSSEEDRKKGKKFARYQLGDLLLHLEKKHGEDWGKVYDEAWERIDKKVEGLSKHIKLEEERRSEDAQSKAALTDWLRAKASFVIEGLKEADKDEFCRCELKLQKWYGDLRGKPFAIEAENSILDISGFSKQYNCAFIWQKDGVKKLNLYLIINYFKGGKLRFKKIKPEAFEANRFYTVINKKSGEIVPMEVNFNFDDPNLIILPLAFGKRQGREFIWNDLLSLETGSLKLANGRVIEKTLYNRRTRQDEPALFVALTFERREVLDSSNIKPMNLIGVDRGENIPAVIALTDPEGCPLSRFKDSLGNPTHILRIGESYKEKQRTIQAKKEVEQRRAGGYSRKYASKAKNLADDMVRNTARDLLYYAVTQDAMLIFENLSRGFGRQGKRTFMAERQYTRMEDWLTAKLAYEGLPSKTYLSKTLAQYTSKTCSNCGFTITSADYDRVLEKLKKTATGWMTTINGKELKVEGQITYYNRYKRQNVVKDLSVELDRLSEESVNNDISSWTKGRSGEALSLLKKRFSHRPVQEKFVCLNCGFETHADEQAALNIARSWLFLRSQEYKKYQTNKTTGNTDKRAFVETWQSFYRKKLKEVWKPAV

SEQ ID NO: 35684 - protein, 978 aa, synthetic construct
  REGION 1..978: note = engineered CasX variant
QEIKRINKIRRRLVKDSNTKKAGKTGPMKTLLVRVMTPDLRERLENLRKKPENIPQPISNTSRANLNKLLTDYTEMKKAILHVYWEEFQKDPVGLMSRVAQPASKKIDQNKLKPEMDEKGNLTTAGFACSQCGQPLFVYKLEQVSEKGKAYTNYVGRCNVAEHEKLILLAQLKPEKDSDEAVTYSLGKFGQRALDFYSIHVTKESTHPVKPLAQIAGNRYASTPVGKALSDACMGTIASFLSKYQDIIIEHQKVVKGNQKRLESLRELAGKENLEYPSVTLPPQPHTSEGVDAYNEVIARVRMWVNLNLWQKLKLSRDDAKPLLRLKGFPSFPLVERQANEVDWWDMVCNVKKLINEKKEDGKVFWQNLAGYKRQEALRPYLSSEEDRKKGKKFARYQLGDLLLHLEKKHGEDWGKVYDEAWERIDKKVEGLSKHIKLEEERRSEDAQSKAALTDWLRAKASFVIEGLKEADKDEFCRCELKLQKWYGDLRGKPFAIEAENSILDISGFSKQYNCAFIWQKDGVKKLNLYLIINYFKGGKLRFKKIKPEAFEANRFYTVINKKSGEIVPMEVNFNFDDPNLIILPLAFGKRQGREFIWNDLLSLETGSLKLANGRVIEKTLYNRRTRQDEPALFVALTFERREVLDSSNIKPMNLIGVDRGENIPAVIALTDPEGCPLSRFKDSLGNPTHILRIGESYKEKQRTIQAKKEVEQRRAGGYSRKYASKAKNLADDMVRNTARDLLYYAVTQDAMLIFENLSRGFGRQGKRTFMAERQYTRMEDWLTAKLAYEGLPSKTYLSKTLAQYTSKTCSNCGFTITSADYDRVLEKLKKTATGWMTTINGKELKVEGQITYYNRYKRQNVVKDLSVELDRLSEESVNNDISSWTKGRSGEALSLLKKRFSHRPVQEKFVCLNCGFETHADEQAALNIARSWLFLRSQEYKKYQTNKTTGNTDKRAFVETWQSFYRKKLKEVWKPAV

SEQ ID NO: 35685 - protein, 978 aa, synthetic construct
  REGION 1..978: note = engineered CasX variant
QEIKRINKIRRRLVKDSNTKKAGKTGPMKTLLVRVMTPDLRERLENLRKKPENIPQPISNTSRANLNKLLTDYTEMKKAILHVYWEEFQKDPVGLMSRVAQPASKKIDQNKLKPEMDEKGNLTTAGFACSQCGQPLFVYKLEQVSEKGKAYTNYVGRCNVAEHEKLILLAQLKPEKDSDEAVTYSLGKFGQRALDFYSIHVTKESTHPVKPLAQIAGNRYASAPVGKALSDACMGTIASFLSKYQDIIIEHQKVVKGNQKRLESLRELAGKENLEYPSVTLPPQPHTSEGVDAYNEVIARVRMWVNLNLWQKLKLSRDDAKPLLRLKGFPSFPLVERQANEVDWWDMVCNVKKLINEKKEDGKVFWQNLAGYKRQEALRPYLSSEEDRKKGKKFARYQLGDLLLHLEKKHGEDWGKVYDEAWERIDKKVEGLSKHIKLEEERRSEDAQSKAALTDWLRAKASFVIEGLKEADKDEFCRCELKLQKWYGDLRGKPFAIEAENSILDISGFSKQYNCAFIWQKDGVKKLNLYLIINYFKGGKLRFKKIKPEAFEANRFYTVINKKSGEIVPMEVNFNFDDPNLIILPLAFGKRQGREFIWNDLLSLETGSLKLANGRVIEKTLYNRRTRQDEPALFVALTFERREVLDSSNIKPMNLIGVDRGENIPAVIALTDPEGCPLSRFKDSLGNPTHILRIGESYKEKQRTIQAKKEVEQRRAGGYSRKYASKAKNLADDMVRNTARDLLYYAVTQDAMLIFENLSRGFGRQGKRTFMAERQYTRMEDWLTAKLAYEGLPSKTYLSKTLAQYTSKTCSNCGFTITSADYDRVLEKLKKTATGWMTTINGKELKVEGQITYYNRYKRQNVVKDLSVELDRLSEESVNNDISSWTKGRSGEALSLLKKRFSHRPVQEKFVCLNCGFETHADEQAALNIARSWLFLRSQEYKKYQTNKTTGNTDKRAFVETWQSFYRKKLKEVWKPAV

SEQ ID NO: 35686 - protein, 978 aa, synthetic construct
  REGION 1..978: note = engineered CasX variant
QEIKRINKIRRRLVKDSNTKKAGKTGPMKTLLVRVMTPDLRERLENLRKKPENIPQPISNTSRANLNKLLTDYTEMKKAILHVYWEEFQKDPVGLMSRVAQPASKKIDQNKLKPEMDEKGNLTTAGFACSQCGQPLFVYKLEQVSEKGKAYTNYVGRCNVAEHEKLILLAQLKPEKDSDEAVTYSLGKFGQRALDFYSIHVTKESTHPVKPLAQIAGNRYASVPVGKALSDACMGTIASFLSKYQDIIIEHQKVVKGNQKRLESLRELAGKENLEYPSVTLPPQPHTSEGVDAYNEVIARVRMWVNLNLWQKLKLSRDDAKPLLRLKGFPSFPLVERQANEVDWWDMVCNVKKLINEKKEDGKVFWQNLAGYKRQEALRPYLSSEEDRKKGKKFARYQLGDLLLHLEKKHGEDWGKVYDEAWERIDKKVEGLSKHIKLEEERRSEDAQSKAALTDWLRAKASFVIEGLKEADKDEFCRCELKLQKWYGDLRGKPFAIEAENSILDISGFSKQYNCAFIWQKDGVKKLNLYLIINYFKGGKLRFKKIKPEAFEANRFYTVINKKSGEIVPMEVNFNFDDPNLIILPLAFGKRQGREFIWNDLLSLETGSLKLANGRVIEKTLYNRRTRQDEPALFVALTFERREVLDSSNIKPMNLIGVDRGENIPAVIALTDPEGCPLSRFKDSLGNPTHILRIGESYKEKQRTIQAKKEVEQRRAGGYSRKYASKAKNLADDMVRNTARDLLYYAVTQDAMLIFENLSRGFGRQGKRTFMAERQYTRMEDWLTAKLAYEGLPSKTYLSKTLAQYTSKTCSNCGFTITSADYDRVLEKLKKTATGWMTTINGKELKVEGQITYYNRYKRQNVVKDLSVELDRLSEESVNNDISSWTKGRSGEALSLLKKRFSHRPVQEKFVCLNCGFETHADEQAALNIARSWLFLRSQEYKKYQTNKTTGNTDKRAFVETWQSFYRKKLKEVWKPAV

SEQ ID NO: 35687 - protein, 978 aa, synthetic construct
  REGION 1..978: note = engineered CasX variant
QEIKRINKIRRRLVKDSNTKKAGKTGPMKTLLVRVMTPDLRERLENLRKKPENIPQPISNTSRANLNKLLTDYTEMKKAILHVYWEEFQKDPVGLMSRVAQPASKKIDQNKLKPEMDEKGNLTTAGFACSQCGQPLFVYKLEQVSEKGKAYTNYVGRCNVAEHEKLIKLAQLKPEKDSDEAVTYSLGKFGQRALDFYSIHVTKESTHPVKPLAQIAGNRYASGPVGKALSDACMGTIASFLSKYQDIIIEHQKVVKGNQKRLESLRELAGKENLEYPSVTLPPQPHTSEGVDAYNEVIARVRMWVNLNLWQKLKLSRDDAKPLLRLKGFPSFPLVERQANEVDWWDMVCNVKKLINEKKEDGKVFWQNLAGYKRQEALRPYLSSEEDRKKGKKFARYQLGDLLLHLEKKHGEDWGKVYDEAWERIDKKVEGLSKHIKLEEERRSEDAQSKAALTDWLRAKASFVIEGLKEADKDEFCRCELKLQKWYGDLRGKPFAIEAENSILDISGFSKQYNCAFIWQKDGVKKLNLYLIINYFKGGKLRFKKIKPEAFEANRFYTVINKKSGEIVPMEVNFNFDDPNLIILPLAFGKRQGREFIWNDLLSLETGSLKLANGRVIEKTLYNRRTRQDEPALFVALTFERREVLDSSNIKPMNLIGVDRGENIPAVIALTDPEGCPLSRFKDSLGNPTHILRIGESYKEKQRTIQAKKEVEQRRAGGYSRKYASKAKNLADDMVRNTARDLLYYAVTQDAMLIFENLSRGFGRQGKRTFMAERQYTRMEDWLTAKLAYEGLPSKTYLSKTLAQYTSKTCSNCGFTITSADYDRVLEKLKKTATGWMTTINGKELKVEGQITYYNRYKRQNVVKDLSVELDRLSEESVNNDISSWTKGRSGEALSLLKKRFSHRPVQEKFVCLNCGFETHADEQAALNIARSWLFLRSQEYKKYQTNKTTGNTDKRAFVETWQSFYRKKLKEVWKPAV

SEQ ID NO: 35688 - protein, 977 aa, synthetic construct
  REGION 1..977: note = engineered CasX variant
QEIKRINKIRRRLVKDSNTKKAGKTGPMKTLLVRVMTPDLRERLENLRKKPENIPQPISNTSRANLNKLLTDYTEMKKAILHVYWEEFQKDPVGLMSRVAQPASKKIDQNKLKPEMDEKGNLTTAGFACSQCGQPLFVYKLEQVSEKGKAYTNYVGRCNVAEHEKLILLAQLKPEKDSDEAVTYSLGKFGQRALDFYSIHVTKESTHPVKPLAQIAGNRYASPVGKALSDACMGTIASFLSKYQDIIIEHQKVVKGNQKRLESLRELAGKENLEYPSVTLPPQPHTSEGVDAYNEVIARVRMWVNLNLWQKLKLSRDDAKPLLRLKGFPSFPLVERQANEVDWWDMVCNVKKLINEKKEDGKVFWQNLAGYKRQEALRPYLSSEEDRKKGKKFARYQLGDLLLHLEKKHGEDWGKVYDEAWERIDKKVEGLSKHIKLEEERRSEDAQSKAALTDWLRAKASFVIEGLKEADKDEFCRCELKLQKWYGDLRGKPFAIEAENSILDISGFSKQYNCAFIWQKDGVKKLNLYLIINYFKGGKLRFKKIKPEAFEANRFYTVINKKSGEIVPMEVNFNFDDPNLIILPLAFGKRQGREFIWNDLLSLETGSLKLANGRVIEKTLYNRRTRQDEPALFVALTFERREVLDSSNIKPMNLIGVDRGENIPAVIALTDPEGCPLSRFKDSLGNPTHILRIGESYKEKQRTIQAKKEVEQRRAGGYSRKYASKAKNLADDMVRNTARDLLYYAVTQDAMLIFENLSRGFGRQGKRTFMAERQYTRMEDWLTAKLAYEGLPSKTYLSKTLAQYTSKTCSNCGFTITSADYDRVLEKLKKTATGWMTTINGKELKVEGQITYYNRYKRQNVVKDLSVELDRLSEESVNNDISSWTKGRSGEALSLLKKRFSHRPVQEKFVCLNCGFETHADEQAALNIARSWLFLRSQEYKKYQTNKTTGNTDKRAFVETWQSFYRKKLKEVWKPAV

SEQ ID NO: 35689 - protein, 978 aa, synthetic construct
  REGION 1..978: note = engineered CasX variant
QEIKRINKIRRRLVKDSNTKKAGKTGPMKTLLVRVMTPDLRERLENLRKKPENIPQPISNTSRANLNKLLTDYTEMKKAILHVYWEEFQKDPVGLMSRVAQPASKKIDQNKLKPEMDEKGNLTTAGFACSQCGQPLFVYKLEQVSEKGKAYTNYFGRCNVAEHEKLILLAQLKPEKDSDEAVTYSLGKFGQRALDFYSIHVTKESTHPVKPLAQIAGNRYASYPVGKALSDACMGTIASFLSKYQDIIIEHQKVVKGNQKRLESLRELAGKENLEYPSVTLPPQPHTSEGVDAYNEVIARVRMWVNLNLWQKLKLSRDDAKPLLRLKGFPSFPLVERQANEVDWWDMVCNVKKLINEKKEDGKVFWQNLAGYKRQEALRPYLSSEEDRKKGKKFARYQLGDLLLHLEKKHGEDWGKVYDEAWERIDKKVEGLSKHIKLEEERRSEDAQSKAALTDWLRAKASFVIEGLKEADKDEFCRCELKLQKWYGDLRGKPFAIEAENSILDISGFSKQYNCAFIWQKDGVKKLNLYLIINYFKGGKLRFKKIKPEAFEANRFYTVINKKSGEIVPMEVNFNFDDPNLIILPLAFGKRQGREFIWNDLLSLETGSLKLANGRVIEKTLYNRRTRQDEPALFVALTFERREVLDSSNIKPMNLIGVDRGENIPAVIALTDPEGCPLSRFKDSLGNPTHILRIGESYKEKQRTIQAKKEVEQRRAGGYSRKYASKAKNLADDMVRNTARDLLYYAVTQDAMLIFENLSRGFGRQGKRTFMAERQYTRMEDWLTAKLAYEGLASKTYLSKTLAQYTSKTCSNCGFTITSADYDRVLEKLKKTATGWMTTINGKELKVEGQITYYNRYKRQNVVKDLSVELDRLSEESVNNDISSWTKGRSGEALSLLKKRFSHRPVQEKFVCLNCGFETHADEQAALNIARSWLFLRSQEYKKYQTNKTTGNTDKRAFVETWQSFYRKKLKEVWKPAV

SEQ ID NO: 35690 - protein, 978 aa, synthetic construct
  REGION 1..978: note = engineered CasX variant
QEIKRINKIRRRLVKDSNTKKAGKTGPMKTLLVRVMTPDLRERLENLRKKPENIPQPISNTSRANLNKLLTDYTEMKKAILHVYWEEFQKDPVGLMSRVAQPASKKIDQNKLKPEMDEKGNLTTAGFACSQCGQPLFVYKLEQVSEKGKAYTNYFGRCNVAEHEKLILLAQLKPEKDSDEAVTYSLGKFGQRALDFYSIHVTKESTHPVKPLAQIAGNRYASHPVGKALSDACMGTIASFLSKYQDIIIEHQKVVKGNQKRLESLRELAGKENLEYPSVTLPPQPHTSEGVDAYNEVIARVRMWVNLNLWQKLKLSRDDAKPLLRLKGFPSFPLVERQANEVDWWDMVCNVKKLINEKKEDGKVFWQNLAGYKRQEALRPYLSSEEDRKKGKKFARYQLGDLLLHLEKKHGEDWGKVYDEAWERIDKKVEGLSKHIKLEEERRSEDAQSKAALTDWLRAKASFVIEGLKEADKDEFCRCELKLQKWYGDLRGKPFAIEAENSILDISGFSKQYNCAFIWQKDGVKKLNLYLIINYFKGGKLRFKKIKPEAFEANRFYTVINKKSGEIVPMEVNFNFDDPNLIILPLAFGKRQGREFIWNDLLSLETGSLKLANGRVIEKTLYNRRTRQDEPALFVALTFERREVLDSSNIKPMNLIGVDRGENIPAVIALTDPEGCPLSRFKDSLGNPTHILRIGESYKEKQRTIQAKKEVEQRRAGGYSRKYASKAKNLADDMVRNTARDLLYYAVTQDAMLIFENLSRGFGRQGKRTFMAERQYTRMEDWLTAKLAYEGLASKTYLSKTLAQYTSKTCSNCGFTITSADYDRVLEKLKKTATGWMTTINGKELKVEGQITYYNRYKRQNVVKDLSVELDRLSEESVNNDISSWTKGRSGEALSLLKKRFSHRPVQEKFVCLNCGFETHADEQAALNIARSWLFLRSQEYKKYQTNKTTGNTDKRAFVETWQSFYRKKLKEVWKPAV

SEQ ID NO: 35691 - protein, 978 aa, synthetic construct
  REGION 1..978: note = engineered CasX variant
QEIKRINKIRRRLVKDSNTKKAGKTGPMKTLLVRVMTPDLRERLENLRKKPENIPQPISNTSRANLNKLLTDYTEMKKAILHVYWEEFQKDPVGLMSRVAQPASKKIDQNKLKPEMDEKGNLTTAGFACSQCGQPLFVYKLEQVSEKGKAYTNYFGRCNVAEHEKLILLAQLKPEKDSDEAVTYSLGKFGQRALDFYSIHVTKESTHPVKPLAQIAGNRYASSPVGKALSDACMGTIASFLSKYQDIIIEHQKVVKGNQKRLESLRELAGKENLEYPSVTLPPQPHTSEGVDAYNEVIARVRMWVNLNLWQKLKLSRDDAKPLLRLKGFPSFPLVERQANEVDWWDMVCNVKKLINEKKEDGKVFWQNLAGYKRQEALRPYLSSEEDRKKGKKFARYQLGDLLLHLEKKHGEDWGKVYDEAWERIDKKVEGLSKHIKLEEERRSEDAQSKAALTDWLRAKASFVIEGLKEADKDEFCRCELKLQKWYGDLRGKPFAIEAENSILDISGFSKQYNCAFIWQKDGVKKLNLYLIINYFKGGKLRFKKIKPEAFEANRFYTVINKKSGEIVPMEVNFNFDDPNLIILPLAFGKRQGREFIWNDLLSLETGSLKLANGRVIEKTLYNRRTRQDEPALFVALTFERREVLDSSNIKPMNLIGVDRGENIPAVIALTDPEGCPLSRFKDSLGNPTHILRIGESYKEKQRTIQAKKEVEQRRAGGYSRKYASKAKNLADDMVRNTARDLLYYAVTQDAMLIFENLSRGFGRQGKRTFMAERQYTRMEDWLTAKLAYEGLASKTYLSKTLAQYTSKTCSNCGFTITSADYDRVLEKLKKTATGWMTTINGKELKVEGQITYYNRYKRQNVVKDLSVELDRLSEESVNNDISSWTKGRSGEALSLLKKRFSHRPVQEKFVCLNCGFETHADEQAALNIARSWLFLRSQEYKKYQTNKTTGNTDKRAFVETWQSFYRKKLKEVWKPAV

SEQ ID NO: 35692 - protein, 978 aa, synthetic construct
  REGION 1..978: note = engineered CasX variant
QEIKRINKIRRRLVKDSNTKKAGKTGPMKTLLVRVMTPDLRERLENLRKKPENIPQPISNTSRANLNKLLTDYTEMKKAILHVYWEEFQKDPVGLMSRVAQPASKKIDQNKLKPEMDEKGNLTTAGFACSQCGQPLFVYKLEQVSEKGKAYTNYFGRCNVAEHEKLILLAQLKPEKDSDEAVTYSLGKFGQRALDFYSIHVTKESTHPVKPLAQIAGNRYASTPVGKALSDACMGTIASFLSKYQDIIIEHQKVVKGNQKRLESLRELAGKENLEYPSVTLPPQPHTSEGVDAYNEVIARVRMWVNLNLWQKLKLSRDDAKPLLRLKGFPSFPLVERQANEVDWWDMVCNVKKLINEKKEDGKVFWQNLAGYKRQEALRPYLSSEEDRKKGKKFARYQLGDLLLHLEKKHGEDWGKVYDEAWERIDKKVEGLSKHIKLEEERRSEDAQSKAALTDWLRAKASFVIEGLKEADKDEFCRCELKLQKWYGDLRGKPFAIEAENSILDISGFSKQYNCAFIWQKDGVKKLNLYLIINYFKGGKLRFKKIKPEAFEANRFYTVINKKSGEIVPMEVNFNFDDPNLIILPLAFGKRQGREFIWNDLLSLETGSLKLANGRVIEKTLYNRRTRQDEPALFVALTFERREVLDSSNIKPMNLIGVDRGENIPAVIALTDPEGCPLSRFKDSLGNPTHILRIGESYKEKQRTIQAKKEVEQRRAGGYSRKYASKAKNLADDMVRNTARDLLYYAVTQDAMLIFENLSRGFGRQGKRTFMAERQYTRMEDWLTAKLAYEGLASKTYLSKTLAQYTSKTCSNCGFTITSADYDRVLEKLKKTATGWMTTINGKELKVEGQITYYNRYKRQNVVKDLSVELDRLSEESVNNDISSWTKGRSGEALSLLKKRFSHRPVQEKFVCLNCGFETHADEQAALNIARSWLFLRSQEYKKYQTNKTTGNTDKRAFVETWQSFYRKKLKEVWKPAV

SEQ ID NO: 35693 - protein, 978 aa, synthetic construct
  REGION 1..978: note = engineered CasX variant
QEIKRINKIRRRLVKDSNTKKAGKTGPMKTLLVRVMTPDLRERLENLRKKPENIPQPISNTSRANLNKLLTDYTEMKKAILHVYWEEFQKDPVGLMSRVAQPASKKIDQNKLKPEMDEKGNLTTAGFACSQCGQPLFVYKLEQVSEKGKAYTNYFGRCNVAEHEKLILLAQLKPEKDSDEAVTYSLGKFGQRALDFYSIHVTKESTHPVKPLAQIAGNRYASAPVGKALSDACMGTIASFLSKYQDIIIEHQKVVKGNQKRLESLRELAGKENLEYPSVTLPPQPHTSEGVDAYNEVIARVRMWVNLNLWQKLKLSRDDAKPLLRLKGFPSFPLVERQANEVDWWDMVCNVKKLINEKKEDGKVFWQNLAGYKRQEALRPYLSSEEDRKKGKKFARYQLGDLLLHLEKKHGEDWGKVYDEAWERIDKKVEGLSKHIKLEEERRSEDAQSKAALTDWLRAKASFVIEGLKEADKDEFCRCELKLQKWYGDLRGKPFAIEAENSILDISGFSKQYNCAFIWQKDGVKKLNLYLIINYFKGGKLRFKKIKPEAFEANRFYTVINKKSGEIVPMEVNFNFDDPNLIILPLAFGKRQGREFIWNDLLSLETGSLKLANGRVIEKTLYNRRTRQDEPALFVALTFERREVLDSSNIKPMNLIGVDRGENIPAVIALTDPEGCPLSRFKDSLGNPTHILRIGESYKEKQRTIQAKKEVEQRRAGGYSRKYASKAKNLADDMVRNTARDLLYYAVTQDAMLIFENLSRGFGRQGKRTFMAERQYTRMEDWLTAKLAYEGLASKTYLSKTLAQYTSKTCSNCGFTITSADYDRVLEKLKKTATGWMTTINGKELKVEGQITYYNRYKRQNVVKDLSVELDRLSEESVNNDISSWTKGRSGEALSLLKKRFSHRPVQEKFVCLNCGFETHADEQAALNIARSWLFLRSQEYKKYQTNKTTGNTDKRAFVETWQSFYRKKLKEVWKPAV

SEQ ID NO: 35694 - protein, 978 aa, synthetic construct
  REGION 1..978: note = engineered CasX variant
QEIKRINKIRRRLVKDSNTKKAGKTGPMKTLLVRVMTPDLRERLENLRKKPENIPQPISNTSRANLNKLLTDYTEMKKAILHVYWEEFQKDPVGLMSRVAQPASKKIDQNKLKPEMDEKGNLTTAGFACSQCGQPLFVYKLEQVSEKGKAYTNYFGRCNVAEHEKLILLAQLKPEKDSDEAVTYSLGKFGQRALDFYSIHVTKESTHPVKPLAQIAGNRYASVPVGKALSDACMGTIASFLSKYQDIIIEHQKVVKGNQKRLESLRELAGKENLEYPSVTLPPQPHTSEGVDAYNEVIARVRMWVNLNLWQKLKLSRDDAKPLLRLKGFPSFPLVERQANEVDWWDMVCNVKKLINEKKEDGKVFWQNLAGYKRQEALRPYLSSEEDRKKGKKFARYQLGDLLLHLEKKHGEDWGKVYDEAWERIDKKVEGLSKHIKLEEERRSEDAQSKAALTDWLRAKASFVIEGLKEADKDEFCRCELKLQKWYGDLRGKPFAIEAENSILDISGFSKQYNCAFIWQKDGVKKLNLYLIINYFKGGKLRFKKIKPEAFEANRFYTVINKKSGEIVPMEVNFNFDDPNLIILPLAFGKRQGREFIWNDLLSLETGSLKLANGRVIEKTLYNRRTRQDEPALFVALTFERREVLDSSNIKPMNLIGVDRGENIPAVIALTDPEGCPLSRFKDSLGNPTHILRIGESYKEKQRTIQAKKEVEQRRAGGYSRKYASKAKNLADDMVRNTARDLLYYAVTQDAMLIFENLSRGFGRQGKRTFMAERQYTRMEDWLTAKLAYEGLASKTYLSKTLAQYTSKTCSNCGFTITSADYDRVLEKLKKTATGWMTTINGKELKVEGQITYYNRYKRQNVVKDLSVELDRLSEESVNNDISSWTKGRSGEALSLLKKRFSHRPVQEKFVCLNCGFETHADEQAALNIARSWLFLRSQEYKKYQTNKTTGNTDKRAFVETWQSFYRKKLKEVWKPAV

SEQ ID NO: 35695 - protein, 978 aa, synthetic construct
  REGION 1..978: note = engineered CasX variant
QEIKRINKIRRRLVKDSNTKKAGKTGPMKTLLVRVMTPDLRERLENLRKKPENIPQPISNTSRANLNKLLTDYTEMKKAILHVYWEEFQKDPVGLMSRVAQPASKKIDQNKLKPEMDEKGNLTTAGFACSQCGQPLFVYKLEQVSEKGKAYTNYFGRCNVAEHEKLIKLAQLKPEKDSDEAVTYSLGKFGQRALDFYSIHVTKESTHPVKPLAQIAGNRYASGPVGKALSDACMGTIASFLSKYQDIIIEHQKVVKGNQKRLESLRELAGKENLEYPSVTLPPQPHTSEGVDAYNEVIARVRMWVNLNLWQKLKLSRDDAKPLLRLKGFPSFPLVERQANEVDWWDMVCNVKKLINEKKEDGKVFWQNLAGYKRQEALRPYLSSEEDRKKGKKFARYQLGDLLLHLEKKHGEDWGKVYDEAWERIDKKVEGLSKHIKLEEERRSEDAQSKAALTDWLRAKASFVIEGLKEADKDEFCRCELKLQKWYGDLRGKPFAIEAENSILDISGFSKQYNCAFIWQKDGVKKLNLYLIINYFKGGKLRFKKIKPEAFEANRFYTVINKKSGEIVPMEVNFNFDDPNLIILPLAFGKRQGREFIWNDLLSLETGSLKLANGRVIEKTLYNRRTRQDEPALFVALTFERREVLDSSNIKPMNLIGVDRGENIPAVIALTDPEGCPLSRFKDSLGNPTHILRIGESYKEKQRTIQAKKEVEQRRAGGYSRKYASKAKNLADDMVRNTARDLLYYAVTQDAMLIFENLSRGFGRQGKRTFMAERQYTRMEDWLTAKLAYEGLASKTYLSKTLAQYTSKTCSNCGFTITSADYDRVLEKLKKTATGWMTTINGKELKVEGQITYYNRYKRQNVVKDLSVELDRLSEESVNNDISSWTKGRSGEALSLLKKRFSHRPVQEKFVCLNCGFETHADEQAALNIARSWLFLRSQEYKKYQTNKTTGNTDKRAFVETWQSFYRKKLKEVWKPAV

SEQ ID NO: 35696 - protein, 977 aa, synthetic construct
  REGION 1..977: note = engineered CasX variant
QEIKRINKIRRRLVKDSNTKKAGKTGPMKTLLVRVMTPDLRERLENLRKKPENIPQPISNTSRANLNKLLTDYTEMKKAILHVYWEEFQKDPVGLMSRVAQPASKKIDQNKLKPEMDEKGNLTTAGFACSQCGQPLFVYKLEQVSEKGKAYTNYFGRCNVAEHEKLILLAQLKPEKDSDEAVTYSLGKFGQRALDFYSIHVTKESTHPVKPLAQIAGNRYASPVGKALSDACMGTIASFLSKYQDIIIEHQKVVKGNQKRLESLRELAGKENLEYPSVTLPPQPHTSEGVDAYNEVIARVRMWVNLNLWQKLKLSRDDAKPLLRLKGFPSFPLVERQANEVDWWDMVCNVKKLINEKKEDGKVFWQNLAGYKRQEALRPYLSSEEDRKKGKKFARYQLGDLLLHLEKKHGEDWGKVYDEAWERIDKKVEGLSKHIKLEEERRSEDAQSKAALTDWLRAKASFVIEGLKEADKDEFCRCELKLQKWYGDLRGKPFAIEAENSILDISGFSKQYNCAFIWQKDGVKKLNLYLIINYFKGGKLRFKKIKPEAFEANRFYTVINKKSGEIVPMEVNFNFDDPNLIILPLAFGKRQGREFIWNDLLSLETGSLKLANGRVIEKTLYNRRTRQDEPALFVALTFERREVLDSSNIKPMNLIGVDRGENIPAVIALTDPEGCPLSRFKDSLGNPTHILRIGESYKEKQRTIQAKKEVEQRRAGGYSRKYASKAKNLADDMVRNTARDLLYYAVTQDAMLIFENLSRGFGRQGKRTFMAERQYTRMEDWLTAKLAYEGLASKTYLSKTLAQYTSKTCSNCGFTITSADYDRVLEKLKKTATGWMTTINGKELKVEGQITYYNRYKRQNVVKDLSVELDRLSEESVNNDISSWTKGRSGEALSLLKKRFSHRPVQEKFVCLNCGFETHADEQAALNIARSWLFLRSQEYKKYQTNKTTGNTDKRAFVETWQSFYRKKLKEVWKPAV

SEQ ID NO: 35697 - protein, 978 aa, synthetic construct
  REGION 1..978: note = engineered CasX variant
QEIKRINKIRRRLVKDSNTKKAGKTGPMKTLLVRVMTPDLRERLENLRKKPENIPQPISNTSRANLNKLLTDYTEMKKAILHVYWEEFQKDPVGLMSRVAQPASKKIDQNKLKPEMDEKGNLTTAGFACSQCGQPLFVYKLEQVSEKGKAYTNYFGRCNVAEHEKLILLAQLKPEKDSDEAVTYSLGKFGQRALDFYSIHVTKESTHPVKPLAQIAGNRYASYPVGKALSDACMGTIASFLSKYQDIIIEHQKVVKGNQKRLESLRELAGKENLEYPSVTLPPQPHTSEGVDAYNEVIARVRMWVNLNLWQKLKLSRDDAKPLLRLKGFPSFPLVERQANEVDWWDMVCNVKKLINEKKEDGKVFWQNLAGYKRQEALRPYLSSEEDRKKGKKFARYQLGDLLLHLEKKHGEDWGKVYDEAWERIDKKVEGLSKHIKLEEERRSEDAQSKAALTDWLRAKASFVIEGLKEADKDEFCRCELKLQKWYGDLRGKPFAIEAENSILDISGFSKQYNCAFIWQKDGVKKLNLYLIINYFKGGKLRFKKIKPEAFEANRFYTVINKKSGEIVPMEVNFNFDDPNLIILPLAFGKRQGREFIWNDLLSLETGSLKLANGRVIEKTLYNRRTRQDEPALFVALTFERREVLDSSNIKPMNLIGVDRGENIPAVIALTDPEGCPLSRFKDSLGNPTHILRIGESYKEKQRTIQAKKEVEQRRAGGYSRKYASKAKNLADDMVRNTARDLLYYAVTQDAMLIFENLSRGFGRQGKRTFMAERQYTRMEDWLTAKLAYEGLPSKVYLSKTLAQYTSKTCSNCGFTITSADYDRVLEKLKKTATGWMTTINGKELKVEGQITYYNRYKRQNVVKDLSVELDRLSEESVNNDISSWTKGRSGEALSLLKKRFSHRPVQEKFVCLNCGFETHADEQAALNIARSWLFLRSQEYKKYQTNKTTGNTDKRAFVETWQSFYRKKLKEVWKPAV

SEQ ID NO: 35698 - protein, 978 aa, synthetic construct
  REGION 1..978: note = engineered CasX variant
QEIKRINKIRRRLVKDSNTKKAGKTGPMKTLLVRVMTPDLRERLENLRKKPENIPQPISNTSRANLNKLLTDYTEMKKAILHVYWEEFQKDPVGLMSRVAQPASKKIDQNKLKPEMDEKGNLTTAGFACSQCGQPLFVYKLEQVSEKGKAYTNYFGRCNVAEHEKLILLAQLKPEKDSDEAVTYSLGKFGQRALDFYSIHVTKESTHPVKPLAQIAGNRYASHPVGKALSDACMGTIASFLSKYQDIIIEHQKVVKGNQKRLESLRELAGKENLEYPSVTLPPQPHTSEGVDAYNEVIARVRMWVNLNLWQKLKLSRDDAKPLLRLKGFPSFPLVERQANEVDWWDMVCNVKKLINEKKEDGKVFWQNLAGYKRQEALRPYLSSEEDRKKGKKFARYQLGDLLLHLEKKHGEDWGKVYDEAWERIDKKVEGLSKHIKLEEERRSEDAQSKAALTDWLRAKASFVIEGLKEADKDEFCRCELKLQKWYGDLRGKPFAIEAENSILDISGFSKQYNCAFIWQKDGVKKLNLYLIINYFKGGKLRFKKIKPEAFEANRFYTVINKKSGEIVPMEVNFNFDDPNLIILPLAFGKRQGREFIWNDLLSLETGSLKLANGRVIEKTLYNRRTRQDEPALFVALTFERREVLDSSNIKPMNLIGVDRGENIPAVIALTDPEGCPLSRFKDSLGNPTHILRIGESYKEKQRTIQAKKEVEQRRAGGYSRKYASKAKNLADDMVRNTARDLLYYAVTQDAMLIFENLSRGFGRQGKRTFMAERQYTRMEDWLTAKLAYEGLPSKVYLSKTLAQYTSKTCSNCGFTITSADYDRVLEKLKKTATGWMTTINGKELKVEGQITYYNRYKRQNVVKDLSVELDRLSEESVNNDISSWTKGRSGEALSLLKKRFSHRPVQEKFVCLNCGFETHADEQAALNIARSWLFLRSQEYKKYQTNKTTGNTDKRAFVETWQSFYRKKLKEVWKPAV

SEQ ID NO: 35699 - protein, 978 aa, synthetic construct
  REGION 1..978: note = engineered CasX variant
QEIKRINKIRRRLVKDSNTKKAGKTGPMKTLLVRVMTPDLRERLENLRKKPENIPQPISNTSRANLNKLLTDYTEMKKAILHVYWEEFQKDPVGLMSRVAQPASKKIDQNKLKPEMDEKGNLTTAGFACSQCGQPLFVYKLEQVSEKGKAYTNYFGRCNVAEHEKLILLAQLKPEKDSDEAVTYSLGKFGQRALDFYSIHVTKESTHPVKPLAQIAGNRYASSPVGKALSDACMGTIASFLSKYQDIIIEHQKVVKGNQKRLESLRELAGKENLEYPSVTLPPQPHTSEGVDAYNEVIARVRMWVNLNLWQKLKLSRDDAKPLLRLKGFPSFPLVERQANEVDWWDMVCNVKKLINEKKEDGKVFWQNLAGYKRQEALRPYLSSEEDRKKGKKFARYQLGDLLLHLEKKHGEDWGKVYDEAWERIDKKVEGLSKHIKLEEERRSEDAQSKAALTDWLRAKASFVIEGLKEADKDEFCRCELKLQKWYGDLRGKPFAIEAENSILDISGFSKQYNCAFIWQKDGVKKLNLYLIINYFKGGKLRFKKIKPEAFEANRFYTVINKKSGEIVPMEVNFNFDDPNLIILPLAFGKRQGREFIWNDLLSLETGSLKLANGRVIEKTLYNRRTRQDEPALFVALTFERREVLDSSNIKPMNLIGVDRGENIPAVIALTDPEGCPLSRFKDSLGNPTHILRIGESYKEKQRTIQAKKEVEQRRAGGYSRKYASKAKNLADDMVRNTARDLLYYAVTQDAMLIFENLSRGFGRQGKRTFMAERQYTRMEDWLTAKLAYEGLPSKVYLSKTLAQYTSKTCSNCGFTITSADYDRVLEKLKKTATGWMTTINGKELKVEGQITYYNRYKRQNVVKDLSVELDRLSEESVNNDISSWTKGRSGEALSLLKKRFSHRPVQEKFVCLNCGFETHADEQAALNIARSWLFLRSQEYKKYQTNKTTGNTDKRAFVETWQSFYRKKLKEVWKPAV

SEQ ID NO: 35700 - protein, 978 aa, synthetic construct
  REGION 1..978: note = engineered CasX variant
QEIKRINKIRRRLVKDSNTKKAGKTGPMKTLLVRVMTPDLRERLENLRKKPENIPQPISNTSRANLNKLLTDYTEMKKAILHVYWEEFQKDPVGLMSRVAQPASKKIDQNKLKPEMDEKGNLTTAGFACSQCGQPLFVYKLEQVSEKGKAYTNYFGRCNVAEHEKLILLAQLKPEKDSDEAVTYSLGKFGQRALDFYSIHVTKESTHPVKPLAQIAGNRYASTPVGKALSDACMGTIASFLSKYQDIIIEHQKVVKGNQKRLESLRELAGKENLEYPSVTLPPQPHTSEGVDAYNEVIARVRMWVNLNLWQKLKLSRDDAKPLLRLKGFPSFPLVERQANEVDWWDMVCNVKKLINEKKEDGKVFWQNLAGYKRQEALRPYLSSEEDRKKGKKFARYQLGDLLLHLEKKHGEDWGKVYDEAWERIDKKVEGLSKHIKLEEERRSEDAQSKAALTDWLRAKASFVIEGLKEADKDEFCRCELKLQKWYGDLRGKPFAIEAENSILDISGFSKQYNCAFIWQKDGVKKLNLYLIINYFKGGKLRFKKIKPEAFEANRFYTVINKKSGEIVPMEVNFNFDDPNLIILPLAFGKRQGREFIWNDLLSLETGSLKLANGRVIEKTLYNRRTRQDEPALFVALTFERREVLDSSNIKPMNLIGVDRGENIPAVIALTDPEGCPLSRFKDSLGNPTHILRIGESYKEKQRTIQAKKEVEQRRAGGYSRKYASKAKNLADDMVRNTARDLLYYAVTQDAMLIFENLSRGFGRQGKRTFMAERQYTRMEDWLTAKLAYEGLPSKVYLSKTLAQYTSKTCSNCGFTITSADYDRVLEKLKKTATGWMTTINGKELKVEGQITYYNRYKRQNVVKDLSVELDRLSEESVNNDISSWTKGRSGEALSLLKKRFSHRPVQEKFVCLNCGFETHADEQAALNIARSWLFLRSQEYKKYQTNKTTGNTDKRAFVETWQSFYRKKLKEVWKPAV

SEQ ID NO: 35701 - protein, 978 aa, synthetic construct
  REGION 1..978: note = engineered CasX variant
QEIKRINKIRRRLVKDSNTKKAGKTGPMKTLLVRVMTPDLRERLENLRKKPENIPQPISNTSRANLNKLLTDYTEMKKAILHVYWEEFQKDPVGLMSRVAQPASKKIDQNKLKPEMDEKGNLTTAGFACSQCGQPLFVYKLEQVSEKGKAYTNYFGRCNVAEHEKLILLAQLKPEKDSDEAVTYSLGKFGQRALDFYSIHVTKESTHPVKPLAQIAGNRYASAPVGKALSDACMGTIASFLSKYQDIIIEHQKVVKGNQKRLESLRELAGKENLEYPSVTLPPQPHTSEGVDAYNEVIARVRMWVNLNLWQKLKLSRDDAKPLLRLKGFPSFPLVERQANEVDWWDMVCNVKKLINEKKEDGKVFWQNLAGYKRQEALRPYLSSEEDRKKGKKFARYQLGDLLLHLEKKHGEDWGKVYDEAWERIDKKVEGLSKHIKLEEERRSEDAQSKAALTDWLRAKASFVIEGLKEADKDEFCRCELKLQKWYGDLRGKPFAIEAENSILDISGFSKQYNCAFIWQKDGVKKLNLYLIINYFKGGKLRFKKIKPEAFEANRFYTVINKKSGEIVPMEVNFNFDDPNLIILPLAFGKRQGREFIWNDLLSLETGSLKLANGRVIEKTLYNRRTRQDEPALFVALTFERREVLDSSNIKPMNLIGVDRGENIPAVIALTDPEGCPLSRFKDSLGNPTHILRIGESYKEKQRTIQAKKEVEQRRAGGYSRKYASKAKNLADDMVRNTARDLLYYAVTQDAMLIFENLSRGFGRQGKRTFMAERQYTRMEDWLTAKLAYEGLPSKVYLSKTLAQYTSKTCSNCGFTITSADYDRVLEKLKKTATGWMTTINGKELKVEGQITYYNRYKRQNVVKDLSVELDRLSEESVNNDISSWTKGRSGEALSLLKKRFSHRPVQEKFVCLNCGFETHADEQAALNIARSWLFLRSQEYKKYQTNKTTGNTDKRAFVETWQSFYRKKLKEVWKPAV

SEQ ID NO: 35702 - protein, 978 aa, synthetic construct
  REGION 1..978: note = engineered CasX variant
QEIKRINKIRRRLVKDSNTKKAGKTGPMKTLLVRVMTPDLRERLENLRKKPENIPQPISNTSRANLNKLLTDYTEMKKAILHVYWEEFQKDPVGLMSRVAQPASKKIDQNKLKPEMDEKGNLTTAGFACSQCGQPLFVYKLEQVSEKGKAYTNYFGRCNVAEHEKLILLAQLKPEKDSDEAVTYSLGKFGQRALDFYSIHVTKESTHPVKPLAQIAGNRYASVPVGKALSDACMGTIASFLSKYQDIIIEHQKVVKGNQKRLESLRELAGKENLEYPSVTLPPQPHTSEGVDAYNEVIARVRMWVNLNLWQKLKLSRDDAKPLLRLKGFPSFPLVERQANEVDWWDMVCNVKKLINEKKEDGKVFWQNLAGYKRQEALRPYLSSEEDRKKGKKFARYQLGDLLLHLEKKHGEDWGKVYDEAWERIDKKVEGLSKHIKLEEERRSEDAQSKAALTDWLRAKASFVIEGLKEADKDEFCRCELKLQKWYGDLRGKPFAIEAENSILDISGFSKQYNCAFIWQKDGVKKLNLYLIINYFKGGKLRFKKIKPEAFEANRFYTVINKKSGEIVPMEVNFNFDDPNLIILPLAFGKRQGREFIWNDLLSLETGSLKLANGRVIEKTLYNRRTRQDEPALFVALTFERREVLDSSNIKPMNLIGVDRGENIPAVIALTDPEGCPLSRFKDSLGNPTHILRIGESYKEKQRTIQAKKEVEQRRAGGYSRKYASKAKNLADDMVRNTARDLLYYAVTQDAMLIFENLSRGFGRQGKRTFMAERQYTRMEDWLTAKLAYEGLPSKVYLSKTLAQYTSKTCSNCGFTITSADYDRVLEKLKKTATGWMTTINGKELKVEGQITYYNRYKRQNVVKDLSVELDRLSEESVNNDISSWTKGRSGEALSLLKKRFSHRPVQEKFVCLNCGFETHADEQAALNIARSWLFLRSQEYKKYQTNKTTGNTDKRAFVETWQSFYRKKLKEVWKPAV

SEQ ID NO: 35703 - protein, 978 aa, synthetic construct
  REGION 1..978: note = engineered CasX variant
QEIKRINKIRRRLVKDSNTKKAGKTGPMKTLLVRVMTPDLRERLENLRKKPENIPQPISNTSRANLNKLLTDYTEMKKAILHVYWEEFQKDPVGLMSRVAQPASKKIDQNKLKPEMDEKGNLTTAGFACSQCGQPLFVYKLEQVSEKGKAYTNYFGRCNVAEHEKLIKLAQLKPEKDSDEAVTYSLGKFGQRALDFYSIHVTKESTHPVKPLAQIAGNRYASGPVGKALSDACMGTIASFLSKYQDIIIEHQKVVKGNQKRLESLRELAGKENLEYPSVTLPPQPHTSEGVDAYNEVIARVRMWVNLNLWQKLKLSRDDAKPLLRLKGFPSFPLVERQANEVDWWDMVCNVKKLINEKKEDGKVFWQNLAGYKRQEALRPYLSSEEDRKKGKKFARYQLGDLLLHLEKKHGEDWGKVYDEAWERIDKKVEGLSKHIKLEEERRSEDAQSKAALTDWLRAKASFVIEGLKEADKDEFCRCELKLQKWYGDLRGKPFAIEAENSILDISGFSKQYNCAFIWQKDGVKKLNLYLIINYFKGGKLRFKKIKPEAFEANRFYTVINKKSGEIVPMEVNFNFDDPNLIILPLAFGKRQGREFIWNDLLSLETGSLKLANGRVIEKTLYNRRTRQDEPALFVALTFERREVLDSSNIKPMNLIGVDRGENIPAVIALTDPEGCPLSRFKDSLGNPTHILRIGESYKEKQRTIQAKKEVEQRRAGGYSRKYASKAKNLADDMVRNTARDLLYYAVTQDAMLIFENLSRGFGRQGKRTFMAERQYTRMEDWLTAKLAYEGLPSKVYLSKTLAQYTSKTCSNCGFTITSADYDRVLEKLKKTATGWMTTINGKELKVEGQITYYNRYKRQNVVKDLSVELDRLSEESVNNDISSWTKGRSGEALSLLKKRFSHRPVQEKFVCLNCGFETHADEQAALNIARSWLFLRSQEYKKYQTNKTTGNTDKRAFVETWQSFYRKKLKEVWKPAV

SEQ ID NO: 35704 - protein, 977 aa, synthetic construct
  REGION 1..977: note = engineered CasX variant
QEIKRINKIRRRLVKDSNTKKAGKTGPMKTLLVRVMTPDLRERLENLRKKPENIPQPISNTSRANLNKLLTDYTEMKKAILHVYWEEFQKDPVGLMSRVAQPASKKIDQNKLKPEMDEKGNLTTAGFACSQCGQPLFVYKLEQVSEKGKAYTNYFGRCNVAEHEKLILLAQLKPEKDSDEAVTYSLGKFGQRALDFYSIHVTKESTHPVKPLAQIAGNRYASPVGKALSDACMGTIASFLSKYQDIIIEHQKVVKGNQKRLESLRELAGKENLEYPSVTLPPQPHTSEGVDAYNEVIARVRMWVNLNLWQKLKLSRDDAKPLLRLKGFPSFPLVERQANEVDWWDMVCNVKKLINEKKEDGKVFWQNLAGYKRQEALRPYLSSEEDRKKGKKFARYQLGDLLLHLEKKHGEDWGKVYDEAWERIDKKVEGLSKHIKLEEERRSEDAQSKAALTDWLRAKASFVIEGLKEADKDEFCRCELKLQKWYGDLRGKPFAIEAENSILDISGFSKQYNCAFIWQKDGVKKLNLYLIINYFKGGKLRFKKIKPEAFEANRFYTVINKKSGEIVPMEVNFNFDDPNLIILPLAFGKRQGREFIWNDLLSLETGSLKLANGRVIEKTLYNRRTRQDEPALFVALTFERREVLDSSNIKPMNLIGVDRGENIPAVIALTDPEGCPLSRFKDSLGNPTHILRIGESYKEKQRTIQAKKEVEQRRAGGYSRKYASKAKNLADDMVRNTARDLLYYAVTQDAMLIFENLSRGFGRQGKRTFMAERQYTRMEDWLTAKLAYEGLPSKVYLSKTLAQYTSKTCSNCGFTITSADYDRVLEKLKKTATGWMTTINGKELKVEGQITYYNRYKRQNVVKDLSVELDRLSEESVNNDISSWTKGRSGEALSLLKKRFSHRPVQEKFVCLNCGFETHADEQAALNIARSWLFLRSQEYKKYQTNKTTGNTDKRAFVETWQSFYRKKLKEVWKPAV

SEQ ID NO: 35705 - protein, 979 aa, synthetic construct
  REGION 1..979: note = engineered CasX variant
QEIKRINKIRRRLVKDSNTKKAGKTGPMKTLLVRVMTPDLRERLENLRKKPENIPQPISNTSRANLNKLLTDYTEMKKAILHVYWEEFQKDPVGLMSRVAQPASKKIDQNKLKPEMDEKGNLTTAGFACSQCGQPLFVYKLEQVSEKGKAYTNYFGRCNVAEHEKLILLAQLKPEKDSDEAVTYSLGKFGQRALDFYSIHVTKESTHPVKPLAQIAGNRYASYPVGKALSDACMGTIASFLSKYQDIIIEHQKVVKGNQKRLESLRELAGKENLEYPSVTLPPQPHTSEGVDAYNEVIARVRMWVNLNLWQKLKLSRDDAKPLLRLKGFPSFPLVERQANEVDWWDMVCNVKKLINEKKEDGKVFWQNLAGYKRQEALRPYLSSEEDRKKGKKFARYQLGDLLLHLEKKHGEDWGKVYDEAWERIDKKVEGLSKHIKLEEERRSEDAQSKAALTDWLRAKASFVIEGLKEADKDEFCRCELKLQKWYGDLRGKPFAIEAENSILDISGFSKQYNCAFIWQKDGVKKLNLYLIINYFKGGKLRFKKIKPEAFEANRFYTVINKKSGEIVPMEVNFNFDDPNLIILPLAFGKRQGREFIWNDLLSLETGSLKLANGRVIEKTLYNRRTRQDEPALFVALTFERREVLDSSNIKPMNLIGVDRGENIPAVIALTDPEGCPLSRFKDSLGNPTHILRIGESYKEKQRTIQAKKEVEQRRAGGYSRKYASKAKNLADDMVRNTARDLLYYAVTQDAMLIFENLSRGFGRQGKRTFMAERQYTRMEDWLTAKLAYEGPLPSKTYLSKTLAQYTSKTCSNCGFTITSADYDRVLEKLKKTATGWMTTINGKELKVEGQITYYNRYKRQNVVKDLSVELDRLSEESVNNDISSWTKGRSGEALSLLKKRFSHRPVQEKFVCLNCGFETHADEQAALNIARSWLFLRSQEYKKYQTNKTTGNTDKRAFVETWQSFYRKKLKEVWKPAV

SEQ ID NO: 35706 - protein, 979 aa, synthetic construct
  REGION 1..979: note = engineered CasX variant
QEIKRINKIRRRLVKDSNTKKAGKTGPMKTLLVRVMTPDLRERLENLRKKPENIPQPISNTSRANLNKLLTDYTEMKKAILHVYWEEFQKDPVGLMSRVAQPASKKIDQNKLKPEMDEKGNLTTAGFACSQCGQPLFVYKLEQVSEKGKAYTNYFGRCNVAEHEKLILLAQLKPEKDSDEAVTYSLGKFGQRALDFYSIHVTKESTHPVKPLAQIAGNRYASHPVGKALSDACMGTIASFLSKYQDIIIEHQKVVKGNQKRLESLRELAGKENLEYPSVTLPPQPHTSEGVDAYNEVIARVRMWVNLNLWQKLKLSRDDAKPLLRLKGFPSFPLVERQANEVDWWDMVCNVKKLINEKKEDGKVFWQNLAGYKRQEALRPYLSSEEDRKKGKKFARYQLGDLLLHLEKKHGEDWGKVYDEAWERIDKKVEGLSKHIKLEEERRSEDAQSKAALTDWLRAKASFVIEGLKEADKDEFCRCELKLQKWYGDLRGKPFAIEAENSILDISGFSKQYNCAFIWQKDGVKKLNLYLIINYFKGGKLRFKKIKPEAFEANRFYTVINKKSGEIVPMEVNFNFDDPNLIILPLAFGKRQGREFIWNDLLSLETGSLKLANGRVIEKTLYNRRTRQDEPALFVALTFERREVLDSSNIKPMNLIGVDRGENIPAVIALTDPEGCPLSRFKDSLGNPTHILRIGESYKEKQRTIQAKKEVEQRRAGGYSRKYASKAKNLADDMVRNTARDLLYYAVTQDAMLIFENLSRGFGRQGKRTFMAERQYTRMEDWLTAKLAYEGPLPSKTYLSKTLAQYTSKTCSNCGFTITSADYDRVLEKLKKTATGWMTTINGKELKVEGQITYYNRYKRQNVVKDLSVELDRLSEESVNNDISSWTKGRSGEALSLLKKRFSHRPVQEKFVCLNCGFETHADEQAALNIARSWLFLRSQEYKKYQTNKTTGNTDKRAFVETWQSFYRKKLKEVWKPAV

SEQ ID NO: 35707 - protein, 979 aa, synthetic construct
  REGION 1..979: note = engineered CasX variant
QEIKRINKIRRRLVKDSNTKKAGKTGPMKTLLVRVMTPDLRERLENLRKKPENIPQPISNTSRANLNKLLTDYTEMKKAILHVYWEEFQKDPVGLMSRVAQPASKKIDQNKLKPEMDEKGNLTTAGFACSQCGQPLFVYKLEQVSEKGKAYTNYFGRCNVAEHEKLILLAQLKPEKDSDEAVTYSLGKFGQRALDFYSIHVTKESTHPVKPLAQIAGNRYASSPVGKALSDACMGTIASFLSKYQDIIIEHQKVVKGNQKRLESLRELAGKENLEYPSVTLPPQPHTSEGVDAYNEVIARVRMWVNLNLWQKLKLSRDDAKPLLRLKGFPSFPLVERQANEVDWWDMVCNVKKLINEKKEDGKVFWQNLAGYKRQEALRPYLSSEEDRKKGKKFARYQLGDLLLHLEKKHGEDWGKVYDEAWERIDKKVEGLSKHIKLEEERRSEDAQSKAALTDWLRAKASFVIEGLKEADKDEFCRCELKLQKWYGDLRGKPFAIEAENSILDISGFSKQYNCAFIWQKDGVKKLNLYLIINYFKGGKLRFKKIKPEAFEANRFYTVINKKSGEIVPMEVNFNFDDPNLIILPLAFGKRQGREFIWNDLLSLETGSLKLANGRVIEKTLYNRRTRQDEPALFVALTFERREVLDSSNIKPMNLIGVDRGENIPAVIALTDPEGCPLSRFKDSLGNPTHILRIGESYKEKQRTIQAKKEVEQRRAGGYSRKYASKAKNLADDMVRNTARDLLYYAVTQDAMLIFENLSRGFGRQGKRTFMAERQYTRMEDWLTAKLAYEGPLPSKTYLSKTLAQYTSKTCSNCGFTITSADYDRVLEKLKKTATGWMTTINGKELKVEGQITYYNRYKRQNVVKDLSVELDRLSEESVNNDISSWTKGRSGEALSLLKKRFSHRPVQEKFVCLNCGFETHADEQAALNIARSWLFLRSQEYKKYQTNKTTGNTDKRAFVETWQSFYRKKLKEVWKPAV

SEQ ID NO: 35708 - protein, 979 aa, synthetic construct
  REGION 1..979: note = engineered CasX variant
QEIKRINKIRRRLVKDSNTKKAGKTGPMKTLLVRVMTPDLRERLENLRKKPENIPQPISNTSRANLNKLLTDYTEMKKAILHVYWEEFQKDPVGLMSRVAQPASKKIDQNKLKPEMDEKGNLTTAGFACSQCGQPLFVYKLEQVSEKGKAYTNYFGRCNVAEHEKLILLAQLKPEKDSDEAVTYSLGKFGQRALDFYSIHVTKESTHPVKPLAQIAGNRYASTPVGKALSDACMGTIASFLSKYQDIIIEHQKVVKGNQKRLESLRELAGKENLEYPSVTLPPQPHTSEGVDAYNEVIARVRMWVNLNLWQKLKLSRDDAKPLLRLKGFPSFPLVERQANEVDWWDMVCNVKKLINEKKEDGKVFWQNLAGYKRQEALRPYLSSEEDRKKGKKFARYQLGDLLLHLEKKHGEDWGKVYDEAWERIDKKVEGLSKHIKLEEERRSEDAQSKAALTDWLRAKASFVIEGLKEADKDEFCRCELKLQKWYGDLRGKPFAIEAENSILDISGFSKQYNCAFIWQKDGVKKLNLYLIINYFKGGKLRFKKIKPEAFEANRFYTVINKKSGEIVPMEVNFNFDDPNLIILPLAFGKRQGREFIWNDLLSLETGSLKLANGRVIEKTLYNRRTRQDEPALFVALTFERREVLDSSNIKPMNLIGVDRGENIPAVIALTDPEGCPLSRFKDSLGNPTHILRIGESYKEKQRTIQAKKEVEQRRAGGYSRKYASKAKNLADDMVRNTARDLLYYAVTQDAMLIFENLSRGFGRQGKRTFMAERQYTRMEDWLTAKLAYEGPLPSKTYLSKTLAQYTSKTCSNCGFTITSADYDRVLEKLKKTATGWMTTINGKELKVEGQITYYNRYKRQNVVKDLSVELDRLSEESVNNDISSWTKGRSGEALSLLKKRFSHRPVQEKFVCLNCGFETHADEQAALNIARSWLFLRSQEYKKYQTNKTTGNTDKRAFVETWQSFYRKKLKEVWKPAV

SEQ ID NO: 35709 - protein, 979 aa, synthetic construct
  REGION 1..979: note = engineered CasX variant
QEIKRINKIRRRLVKDSNTKKAGKTGPMKTLLVRVMTPDLRERLENLRKKPENIPQPISNTSRANLNKLLTDYTEMKKAILHVYWEEFQKDPVGLMSRVAQPASKKIDQNKLKPEMDEKGNLTTAGFACSQCGQPLFVYKLEQVSEKGKAYTNYFGRCNVAEHEKLILLAQLKPEKDSDEAVTYSLGKFGQRALDFYSIHVTKESTHPVKPLAQIAGNRYASAPVGKALSDACMGTIASFLSKYQDIIIEHQKVVKGNQKRLESLRELAGKENLEYPSVTLPPQPHTSEGVDAYNEVIARVRMWVNLNLWQKLKLSRDDAKPLLRLKGFPSFPLVERQANEVDWWDMVCNVKKLINEKKEDGKVFWQNLAGYKRQEALRPYLSSEEDRKKGKKFARYQLGDLLLHLEKKHGEDWGKVYDEAWERIDKKVEGLSKHIKLEEERRSEDAQSKAALTDWLRAKASFVIEGLKEADKDEFCRCELKLQKWYGDLRGKPFAIEAENSILDISGFSKQYNCAFIWQKDGVKKLNLYLIINYFKGGKLRFKKIKPEAFEANRFYTVINKKSGEIVPMEVNFNFDDPNLIILPLAFGKRQGREFIWNDLLSLETGSLKLANGRVIEKTLYNRRTRQDEPALFVALTFERREVLDSSNIKPMNLIGVDRGENIPAVIALTDPEGCPLSRFKDSLGNPTHILRIGESYKEKQRTIQAKKEVEQRRAGGYSRKYASKAKNLADDMVRNTARDLLYYAVTQDAMLIFENLSRGFGRQGKRTFMAERQYTRMEDWLTAKLAYEGPLPSKTYLSKTLAQYTSKTCSNCGFTITSADYDRVLEKLKKTATGWMTTINGKELKVEGQITYYNRYKRQNVVKDLSVELDRLSEESVNNDISSWTKGRSGEALSLLKKRFSHRPVQEKFVCLNCGFETHADEQAALNIARSWLFLRSQEYKKYQTNKTTGNTDKRAFVETWQSFYRKKLKEVWKPAV

SEQ ID NO: 35710 - protein, 979 aa, synthetic construct
  REGION 1..979: note = engineered CasX variant
QEIKRINKIRRRLVKDSNTKKAGKTGPMKTLLVRVMTPDLRERLENLRKKPENIPQPISNTSRANLNKLLTDYTEMKKAILHVYWEEFQKDPVGLMSRVAQPASKKIDQNKLKPEMDEKGNLTTAGFACSQCGQPLFVYKLEQVSEKGKAYTNYFGRCNVAEHEKLILLAQLKPEKDSDEAVTYSLGKFGQRALDFYSIHVTKESTHPVKPLAQIAGNRYASVPVGKALSDACMGTIASFLSKYQDIIIEHQKVVKGNQKRLESLRELAGKENLEYPSVTLPPQPHTSEGVDAYNEVIARVRMWVNLNLWQKLKLSRDDAKPLLRLKGFPSFPLVERQANEVDWWDMVCNVKKLINEKKEDGKVFWQNLAGYKRQEALRPYLSSEEDRKKGKKFARYQLGDLLLHLEKKHGEDWGKVYDEAWERIDKKVEGLSKHIKLEEERRSEDAQSKAALTDWLRAKASFVIEGLKEADKDEFCRCELKLQKWYGDLRGKPFAIEAENSILDISGFSKQYNCAFIWQKDGVKKLNLYLIINYFKGGKLRFKKIKPEAFEANRFYTVINKKSGEIVPMEVNFNFDDPNLIILPLAFGKRQGREFIWNDLLSLETGSLKLANGRVIEKTLYNRRTRQDEPALFVALTFERREVLDSSNIKPMNLIGVDRGENIPAVIALTDPEGCPLSRFKDSLGNPTHILRIGESYKEKQRTIQAKKEVEQRRAGGYSRKYASKAKNLADDMVRNTARDLLYYAVTQDAMLIFENLSRGFGRQGKRTFMAERQYTRMEDWLTAKLAYEGPLPSKTYLSKTLAQYTSKTCSNCGFTITSADYDRVLEKLKKTATGWMTTINGKELKVEGQITYYNRYKRQNVVKDLSVELDRLSEESVNNDISSWTKGRSGEALSLLKKRFSHRPVQEKFVCLNCGFETHADEQAALNIARSWLFLRSQEYKKYQTNKTTGNTDKRAFVETWQSFYRKKLKEVWKPAV

SEQ ID NO: 35711 - protein, 979 aa, synthetic construct
  REGION 1..979: note = engineered CasX variant
QEIKRINKIRRRLVKDSNTKKAGKTGPMKTLLVRVMTPDLRERLENLRKKPENIPQPISNTSRANLNKLLTDYTEMKKAILHVYWEEFQKDPVGLMSRVAQPASKKIDQNKLKPEMDEKGNLTTAGFACSQCGQPLFVYKLEQVSEKGKAYTNYFGRCNVAEHEKLIKLAQLKPEKDSDEAVTYSLGKFGQRALDFYSIHVTKESTHPVKPLAQIAGNRYASGPVGKALSDACMGTIASFLSKYQDIIIEHQKVVKGNQKRLESLRELAGKENLEYPSVTLPPQPHTSEGVDAYNEVIARVRMWVNLNLWQKLKLSRDDAKPLLRLKGFPSFPLVERQANEVDWWDMVCNVKKLINEKKEDGKVFWQNLAGYKRQEALRPYLSSEEDRKKGKKFARYQLGDLLLHLEKKHGEDWGKVYDEAWERIDKKVEGLSKHIKLEEERRSEDAQSKAALTDWLRAKASFVIEGLKEADKDEFCRCELKLQKWYGDLRGKPFAIEAENSILDISGFSKQYNCAFIWQKDGVKKLNLYLIINYFKGGKLRFKKIKPEAFEANRFYTVINKKSGEIVPMEVNFNFDDPNLIILPLAFGKRQGREFIWNDLLSLETGSLKLANGRVIEKTLYNRRTRQDEPALFVALTFERREVLDSSNIKPMNLIGVDRGENIPAVIALTDPEGCPLSRFKDSLGNPTHILRIGESYKEKQRTIQAKKEVEQRRAGGYSRKYASKAKNLADDMVRNTARDLLYYAVTQDAMLIFENLSRGFGRQGKRTFMAERQYTRMEDWLTAKLAYEGPLPSKTYLSKTLAQYTSKTCSNCGFTITSADYDRVLEKLKKTATGWMTTINGKELKVEGQITYYNRYKRQNVVKDLSVELDRLSEESVNNDISSWTKGRSGEALSLLKKRFSHRPVQEKFVCLNCGFETHADEQAALNIARSWLFLRSQEYKKYQTNKTTGNTDKRAFVETWQSFYRKKLKEVWKPAV

SEQ ID NO: 35712 - protein, 978 aa, synthetic construct
  REGION 1..978: note = engineered CasX variant
QEIKRINKIRRRLVKDSNTKKAGKTGPMKTLLVRVMTPDLRERLENLRKKPENIPQPISNTSRANLNKLLTDYTEMKKAILHVYWEEFQKDPVGLMSRVAQPASKKIDQNKLKPEMDEKGNLTTAGFACSQCGQPLFVYKLEQVSEKGKAYTNYFGRCNVAEHEKLILLAQLKPEKDSDEAVTYSLGKFGQRALDFYSIHVTKESTHPVKPLAQIAGNRYASPVGKALSDACMGTIASFLSKYQDIIIEHQKVVKGNQKRLESLRELAGKENLEYPSVTLPPQPHTSEGVDAYNEVIARVRMWVNLNLWQKLKLSRDDAKPLLRLKGFPSFPLVERQANEVDWWDMVCNVKKLINEKKEDGKVFWQNLAGYKRQEALRPYLSSEEDRKKGKKFARYQLGDLLLHLEKKHGEDWGKVYDEAWERIDKKVEGLSKHIKLEEERRSEDAQSKAALTDWLRAKASFVIEGLKEADKDEFCRCELKLQKWYGDLRGKPFAIEAENSILDISGFSKQYNCAFIWQKDGVKKLNLYLIINYFKGGKLRFKKIKPEAFEANRFYTVINKKSGEIVPMEVNFNFDDPNLIILPLAFGKRQGREFIWNDLLSLETGSLKLANGRVIEKTLYNRRTRQDEPALFVALTFERREVLDSSNIKPMNLIGVDRGENIPAVIALTDPEGCPLSRFKDSLGNPTHILRIGESYKEKQRTIQAKKEVEQRRAGGYSRKYASKAKNLADDMVRNTARDLLYYAVTQDAMLIFENLSRGFGRQGKRTFMAERQYTRMEDWLTAKLAYEGPLPSKTYLSKTLAQYTSKTCSNCGFTITSADYDRVLEKLKKTATGWMTTINGKELKVEGQITYYNRYKRQNVVKDLSVELDRLSEESVNNDISSWTKGRSGEALSLLKKRFSHRPVQEKFVCLNCGFETHADEQAALNIARSWLFLRSQEYKKYQTNKTTGNTDKRAFVETWQSFYRKKLKEVWKPAV

SEQ ID NO: 35713 - protein, 979 aa, synthetic construct
  REGION 1..979: note = engineered CasX variant
QEIKRINKIRRRLVKDSNTKKAGKTGPMKTLLVRVMTPDLRERLENLRKKPENIPQPISNTSRANLNKLLTDYTEMKKAILHVYWEEFQKDPVGLMSRVAQPASKKIDQNKLKPEMDEKGNLTTAGFACSQCGQPLFVYKLEQVSEKGKAYTNYFGRCNVAEHEKLILLAQLKPEKDSDEAVTYSLGKFGQRALDFYSIHVTKESTHPVKPLAQIAGNRYASYPVGKALSDACMGTIASFLSKYQDIIIEHQKVVKGNQKRLESLRELAGKENLEYPSVTLPPQPHTSEGVDAYNEVIARVRMWVNLNLWQKLKLSRDDAKPLLRLKGFPSFPLVERQANEVDWWDMVCNVKKLINEKKEDGKVFWQNLAGYKRQEALRPYLSSEEDVRKKGKKFARYQLGDLLLHLEKKHGEDWGKVYDEAWERIDKKVEGLSKHIKLEEERRSEDAQSKAALTDWLRAKASFVIEGLKEADKDEFCRCELKLQKWYGDLRGKPFAIEAENSILDISGFSKQYNCAFIWQKDGVKKLNLYLIINYFKGGKLRFKKIKPEAFEANRFYTVINKKSGEIVPMEVNFNFDDPNLIILPLAFGKRQGREFIWNDLLSLETGSLKLANGRVIEKTLYNRRTRQDEPALFVALTFERREVLDSSNIKPMNLIGVDRGENIPAVIALTDPEGCPLSRFKDSLGNPTHILRIGESYKEKQRTIQAKKEVEQRRAGGYSRKYASKAKNLADDMVRNTARDLLYYAVTQDAMLIFENLSRGFGRQGKRTFMAERQYTRMEDWLTAKLAYEGLPSKTYLSKTLAQYTSKTCSNCGFTITSADYDRVLEKLKKTATGWMTTINGKELKVEGQITYYNRYKRQNVVKDLSVELDRLSEESVNNDISSWTKGRSGEALSLLKKRFSHRPVQEKFVCLNCGFETHADEQAALNIARSWLFLRSQEYKKYQTNKTTGNTDKRAFVETWQSFYRKKLKEVWKPAV

SEQ ID NO: 35714 - protein, 979 aa, synthetic construct
  REGION 1..979: note = engineered CasX variant
QEIKRINKIRRRLVKDSNTKKAGKTGPMKTLLVRVMTPDLRERLENLRKKPENIPQPISNTSRANLNKLLTDYTEMKKAILHVYWEEFQKDPVGLMSRVAQPASKKIDQNKLKPEMDEKGNLTTAGFACSQCGQPLFVYKLEQVSEKGKAYTNYFGRCNVAEHEKLILLAQLKPEKDSDEAVTYSLGKFGQRALDFYSIHVTKESTHPVKPLAQIAGNRYASHPVGKALSDACMGTIASFLSKYQDIIIEHQKVVKGNQKRLESLRELAGKENLEYPSVTLPPQPHTSEGVDAYNEVIARVRMWVNLNLWQKLKLSRDDAKPLLRLKGFPSFPLVERQANEVDWWDMVCNVKKLINEKKEDGKVFWQNLAGYKRQEALRPYLSSEEDVRKKGKKFARYQLGDLLLHLEKKHGEDWGKVYDEAWERIDKKVEGLSKHIKLEEERRSEDAQSKAALTDWLRAKASFVIEGLKEADKDEFCRCELKLQKWYGDLRGKPFAIEAENSILDISGFSKQYNCAFIWQKDGVKKLNLYLIINYFKGGKLRFKKIKPEAFEANRFYTVINKKSGEIVPMEVNFNFDDPNLIILPLAFGKRQGREFIWNDLLSLETGSLKLANGRVIEKTLYNRRTRQDEPALFVALTFERREVLDSSNIKPMNLIGVDRGENIPAVIALTDPEGCPLSRFKDSLGNPTHILRIGESYKEKQRTIQAKKEVEQRRAGGYSRKYASKAKNLADDMVRNTARDLLYYAVTQDAMLIFENLSRGFGRQGKRTFMAERQYTRMEDWLTAKLAYEGLPSKTYLSKTLAQYTSKTCSNCGFTITSADYDRVLEKLKKTATGWMTTINGKELKVEGQITYYNRYKRQNVVKDLSVELDRLSEESVNNDISSWTKGRSGEALSLLKKRFSHRPVQEKFVCLNCGFETHADEQAALNIARSWLFLRSQEYKKYQTNKTTGNTDKRAFVETWQSFYRKKLKEVWKPAV

SEQ ID NO: 35715 - protein, 979 aa, synthetic construct
  REGION 1..979: note = engineered CasX variant
QEIKRINKIRRRLVKDSNTKKAGKTGPMKTLLVRVMTPDLRERLENLRKKPENIPQPISNTSRANLNKLLTDYTEMKKAILHVYWEEFQKDPVGLMSRVAQPASKKIDQNKLKPEMDEKGNLTTAGFACSQCGQPLFVYKLEQVSEKGKAYTNYFGRCNVAEHEKLILLAQLKPEKDSDEAVTYSLGKFGQRALDFYSIHVTKESTHPVKPLAQIAGNRYASSPVGKALSDACMGTIASFLSKYQDIIIEHQKVVKGNQKRLESLRELAGKENLEYPSVTLPPQPHTSEGVDAYNEVIARVRMWVNLNLWQKLKLSRDDAKPLLRLKGFPSFPLVERQANEVDWWDMVCNVKKLINEKKEDGKVFWQNLAGYKRQEALRPYLSSEEDVRKKGKKFARYQLGDLLLHLEKKHGEDWGKVYDEAWERIDKKVEGLSKHIKLEEERRSEDAQSKAALTDWLRAKASFVIEGLKEADKDEFCRCELKLQKWYGDLRGKPFAIEAENSILDISGFSKQYNCAFIWQKDGVKKLNLYLIINYFKGGKLRFKKIKPEAFEANRFYTVINKKSGEIVPMEVNFNFDDPNLIILPLAFGKRQGREFIWNDLLSLETGSLKLANGRVIEKTLYNRRTRQDEPALFVALTFERREVLDSSNIKPMNLIGVDRGENIPAVIALTDPEGCPLSRFKDSLGNPTHILRIGESYKEKQRTIQAKKEVEQRRAGGYSRKYASKAKNLADDMVRNTARDLLYYAVTQDAMLIFENLSRGFGRQGKRTFMAERQYTRMEDWLTAKLAYEGLPSKTYLSKTLAQYTSKTCSNCGFTITSADYDRVLEKLKKTATGWMTTINGKELKVEGQITYYNRYKRQNVVKDLSVELDRLSEESVNNDISSWTKGRSGEALSLLKKRFSHRPVQEKFVCLNCGFETHADEQAALNIARSWLFLRSQEYKKYQTNKTTGNTDKRAFVETWQSFYRKKLKEVWKPAV

SEQ ID NO: 35716 - protein, 979 aa, synthetic construct
  REGION 1..979: note = engineered CasX variant
QEIKRINKIRRRLVKDSNTKKAGKTGPMKTLLVRVMTPDLRERLENLRKKPENIPQPISNTSRANLNKLLTDYTEMKKAILHVYWEEFQKDPVGLMSRVAQPASKKIDQNKLKPEMDEKGNLTTAGFACSQCGQPLFVYKLEQVSEKGKAYTNYFGRCNVAEHEKLILLAQLKPEKDSDEAVTYSLGKFGQRALDFYSIHVTKESTHPVKPLAQIAGNRYASTPVGKALSDACMGTIASFLSKYQDIIIEHQKVVKGNQKRLESLRELAGKENLEYPSVTLPPQPHTSEGVDAYNEVIARVRMWVNLNLWQKLKLSRDDAKPLLRLKGFPSFPLVERQANEVDWWDMVCNVKKLINEKKEDGKVFWQNLAGYKRQEALRPYLSSEEDVRKKGKKFARYQLGDLLLHLEKKHGEDWGKVYDEAWERIDKKVEGLSKHIKLEEERRSEDAQSKAALTDWLRAKASFVIEGLKEADKDEFCRCELKLQKWYGDLRGKPFAIEAENSILDISGFSKQYNCAFIWQKDGVKKLNLYLIINYFKGGKLRFKKIKPEAFEANRFYTVINKKSGEIVPMEVNFNFDDPNLIILPLAFGKRQGREFIWNDLLSLETGSLKLANGRVIEKTLYNRRTRQDEPALFVALTFERREVLDSSNIKPMNLIGVDRGENIPAVIALTDPEGCPLSRFKDSLGNPTHILRIGESYKEKQRTIQAKKEVEQRRAGGYSRKYASKAKNLADDMVRNTARDLLYYAVTQDAMLIFENLSRGFGRQGKRTFMAERQYTRMEDWLTAKLAYEGLPSKTYLSKTLAQYTSKTCSNCGFTITSADYDRVLEKLKKTATGWMTTINGKELKVEGQITYYNRYKRQNVVKDLSVELDRLSEESVNNDISSWTKGRSGEALSLLKKRFSHRPVQEKFVCLNCGFETHADEQAALNIARSWLFLRSQEYKKYQTNKTTGNTDKRAFVETWQSFYRKKLKEVWKPAV

SEQ ID NO: 35717 - protein, 979 aa, synthetic construct
  REGION 1..979: note = engineered CasX variant
QEIKRINKIRRRLVKDSNTKKAGKTGPMKTLLVRVMTPDLRERLENLRKKPENIPQPISNTSRANLNKLLTDYTEMKKAILHVYWEEFQKDPVGLMSRVAQPASKKIDQNKLKPEMDEKGNLTTAGFACSQCGQPLFVYKLEQVSEKGKAYTNYFGRCNVAEHEKLILLAQLKPEKDSDEAVTYSLGKFGQRALDFYSIHVTKESTHPVKPLAQIAGNRYASAPVGKALSDACMGTIASFLSKYQDIIIEHQKVVKGNQKRLESLRELAGKENLEYPSVTLPPQPHTSEGVDAYNEVIARVRMWVNLNLWQKLKLSRDDAKPLLRLKGFPSFPLVERQANEVDWWDMVCNVKKLINEKKEDGKVFWQNLAGYKRQEALRPYLSSEEDVRKKGKKFARYQLGDLLLHLEKKHGEDWGKVYDEAWERIDKKVEGLSKHIKLEEERRSEDAQSKAALTDWLRAKASFVIEGLKEADKDEFCRCELKLQKWYGDLRGKPFAIEAENSILDISGFSKQYNCAFIWQKDGVKKLNLYLIINYFKGGKLRFKKIKPEAFEANRFYTVINKKSGEIVPMEVNFNFDDPNLIILPLAFGKRQGREFIWNDLLSLETGSLKLANGRVIEKTLYNRRTRQDEPALFVALTFERREVLDSSNIKPMNLIGVDRGENIPAVIALTDPEGCPLSRFKDSLGNPTHILRIGESYKEKQRTIQAKKEVEQRRAGGYSRKYASKAKNLADDMVRNTARDLLYYAVTQDAMLIFENLSRGFGRQGKRTFMAERQYTRMEDWLTAKLAYEGLPSKTYLSKTLAQYTSKTCSNCGFTITSADYDRVLEKLKKTATGWMTTINGKELKVEGQITYYNRYKRQNVVKDLSVELDRLSEESVNNDISSWTKGRSGEALSLLKKRFSHRPVQEKFVCLNCGFETHADEQAALNIARSWLFLRSQEYKKYQTNKTTGNTDKRAFVETWQSFYRKKLKEVWKPAV

SEQ ID NO: 35718 - protein, 979 aa, synthetic construct
  REGION 1..979: note = engineered CasX variant
QEIKRINKIRRRLVKDSNTKKAGKTGPMKTLLVRVMTPDLRERLENLRKKPENIPQPISNTSRANLNKLLTDYTEMKKAILHVYWEEFQKDPVGLMSRVAQPASKKIDQNKLKPEMDEKGNLTTAGFACSQCGQPLFVYKLEQVSEKGKAYTNYFGRCNVAEHEKLILLAQLKPEKDSDEAVTYSLGKFGQRALDFYSIHVTKESTHPVKPLAQIAGNRYASVPVGKALSDACMGTIASFLSKYQDIIIEHQKVVKGNQKRLESLRELAGKENLEYPSVTLPPQPHTSEGVDAYNEVIARVRMWVNLNLWQKLKLSRDDAKPLLRLKGFPSFPLVERQANEVDWWDMVCNVKKLINEKKEDGKVFWQNLAGYKRQEALRPYLSSEEDVRKKGKKFARYQLGDLLLHLEKKHGEDWGKVYDEAWERIDKKVEGLSKHIKLEEERRSEDAQSKAALTDWLRAKASFVIEGLKEADKDEFCRCELKLQKWYGDLRGKPFAIEAENSILDISGFSKQYNCAFIWQKDGVKKLNLYLIINYFKGGKLRFKKIKPEAFEANRFYTVINKKSGEIVPMEVNFNFDDPNLIILPLAFGKRQGREFIWNDLLSLETGSLKLANGRVIEKTLYNRRTRQDEPALFVALTFERREVLDSSNIKPMNLIGVDRGENIPAVIALTDPEGCPLSRFKDSLGNPTHILRIGESYKEKQRTIQAKKEVEQRRAGGYSRKYASKAKNLADDMVRNTARDLLYYAVTQDAMLIFENLSRGFGRQGKRTFMAERQYTRMEDWLTAKLAYEGLPSKTYLSKTLAQYTSKTCSNCGFTITSADYDRVLEKLKKTATGWMTTINGKELKVEGQITYYNRYKRQNVVKDLSVELDRLSEESVNNDISSWTKGRSGEALSLLKKRFSHRPVQEKFVCLNCGFETHADEQAALNIARSWLFLRSQEYKKYQTNKTTGNTDKRAFVETWQSFYRKKLKEVWKPAV

SEQ ID NO: 35719 - protein, 979 aa, synthetic construct
  REGION 1..979: note = engineered CasX variant
QEIKRINKIRRRLVKDSNTKKAGKTGPMKTLLVRVMTPDLRERLENLRKKPENIPQPISNTSRANLNKLLTDYTEMKKAILHVYWEEFQKDPVGLMSRVAQPASKKIDQNKLKPEMDEKGNLTTAGFACSQCGQPLFVYKLEQVSEKGKAYTNYFGRCNVAEHEKLIKLAQLKPEKDSDEAVTYSLGKFGQRALDFYSIHVTKESTHPVKPLAQIAGNRYASGPVGKALSDACMGTIASFLSKYQDIIIEHQKVVKGNQKRLESLRELAGKENLEYPSVTLPPQPHTSEGVDAYNEVIARVRMWVNLNLWQKLKLSRDDAKPLLRLKGFPSFPLVERQANEVDWWDMVCNVKKLINEKKEDGKVFWQNLAGYKRQEALRPYLSSEEDVRKKGKKFARYQLGDLLLHLEKKHGEDWGKVYDEAWERIDKKVEGLSKHIKLEEERRSEDAQSKAALTDWLRAKASFVIEGLKEADKDEFCRCELKLQKWYGDLRGKPFAIEAENSILDISGFSKQYNCAFIWQKDGVKKLNLYLIINYFKGGKLRFKKIKPEAFEANRFYTVINKKSGEIVPMEVNFNFDDPNLIILPLAFGKRQGREFIWNDLLSLETGSLKLANGRVIEKTLYNRRTRQDEPALFVALTFERREVLDSSNIKPMNLIGVDRGENIPAVIALTDPEGCPLSRFKDSLGNPTHILRIGESYKEKQRTIQAKKEVEQRRAGGYSRKYASKAKNLADDMVRNTARDLLYYAVTQDAMLIFENLSRGFGRQGKRTFMAERQYTRMEDWLTAKLAYEGLPSKTYLSKTLAQYTSKTCSNCGFTITSADYDRVLEKLKKTATGWMTTINGKELKVEGQITYYNRYKRQNVVKDLSVELDRLSEESVNNDISSWTKGRSGEALSLLKKRFSHRPVQEKFVCLNCGFETHADEQAALNIARSWLFLRSQEYKKYQTNKTTGNTDKRAFVETWQSFYRKKLKEVWKPAV

SEQ ID NO: 35720 - protein, 978 aa, synthetic construct
  REGION 1..978: note = engineered CasX variant
QEIKRINKIRRRLVKDSNTKKAGKTGPMKTLLVRVMTPDLRERLENLRKKPENIPQPISNTSRANLNKLLTDYTEMKKAILHVYWEEFQKDPVGLMSRVAQPASKKIDQNKLKPEMDEKGNLTTAGFACSQCGQPLFVYKLEQVSEKGKAYTNYFGRCNVAEHEKLILLAQLKPEKDSDEAVTYSLGKFGQRALDFYSIHVTKESTHPVKPLAQIAGNRYASPVGKALSDACMGTIASFLSKYQDIIIEHQKVVKGNQKRLESLRELAGKENLEYPSVTLPPQPHTSEGVDAYNEVIARVRMWVNLNLWQKLKLSRDDAKPLLRLKGFPSFPLVERQANEVDWWDMVCNVKKLINEKKEDGKVFWQNLAGYKRQEALRPYLSSEEDVRKKGKKFARYQLGDLLLHLEKKHGEDWGKVYDEAWERIDKKVEGLSKHIKLEEERRSEDAQSKAALTDWLRAKASFVIEGLKEADKDEFCRCELKLQKWYGDLRGKPFAIEAENSILDISGFSKQYNCAFIWQKDGVKKLNLYLIINYFKGGKLRFKKIKPEAFEANRFYTVINKKSGEIVPMEVNFNFDDPNLIILPLAFGKRQGREFIWNDLLSLETGSLKLANGRVIEKTLYNRRTRQDEPALFVALTFERREVLDSSNIKPMNLIGVDRGENIPAVIALTDPEGCPLSRFKDSLGNPTHILRIGESYKEKQRTIQAKKEVEQRRAGGYSRKYASKAKNLADDMVRNTARDLLYYAVTQDAMLIFENLSRGFGRQGKRTFMAERQYTRMEDWLTAKLAYEGLPSKTYLSKTLAQYTSKTCSNCGFTITSADYDRVLEKLKKTATGWMTTINGKELKVEGQITYYNRYKRQNVVKDLSVELDRLSEESVNNDISSWTKGRSGEALSLLKKRFSHRPVQEKFVCLNCGFETHADEQAALNIARSWLFLRSQEYKKYQTNKTTGNTDKRAFVETWQSFYRKKLKEVWKPAV

SEQ ID NO: 35721 - protein, 978 aa, synthetic construct
  REGION 1..978: note = engineered CasX variant
QEIKRINKIRRRLVKDSNTKKAGKTGPMKTLLVRVMTPDLRERLENLRKKPENIPQPISNTSRANLNKLLTDYTEMKKAILHVYWEEFQKDPVGLMSRVAQPASKKIDQNKLKPEMDEKGNLTTAGFACSQCGQPLFVYKLEQVSEKGKAYTNYFGRCNVAEHEKLILLAQLKPEKDSDEAVTYSLGKFGQRALDFYSIHVTKESTHPVKPLAQIAGNRYASYPVGKALSDACMGTIASFLSKYQDIIIEHQKVVKGNQKRLESLRELAGKENLEYPSVTLPPQPHTSEGVDAYNEVIARVRMWVNLNLWQKLKLSRDDAKPLLRLKGFPSFPLVERQANEVDWWDMVCNVKKLINEKKEDGKVFWQNLAGYKRQEALRPYLSSEEDRKKGKKFARYQLGDLLLHLEKKHGEDWGKVYDEAWERIDKKVEGLSKHIKLEEERRSEDAQSKAALTDWLRAKASFVIEGLKEADKDEFCRCELKLQKWYGDLRGKPFAIEAENSILDISGFSKQYNCAFIWQKDGVKKLNLYLIINYFKGGKLRFKKIKPEAFEANRFYTVINKKSGEIVPMEVNFNFDDPNLIILPLAFGKRQGREFIWNDLLSLETGSLKLANGRVIEKTLYNRRTRQDEPALFVALTFERREVLDSSNIKPMNLIGVDRGENIPAVIALTDPEGCPLSRFKDSLGNPTHILRIGESYKEKQRTIQAKKEVEQRRAGGYSRKYASKAKNLADDMVRNTARDLLYYAVTQDAMLIFENLSRGFGRQGKRTFMAERQYTRMEDWLTAKLAYEGLPSKTYLSKTLAQYTSKTCSNCGFTITSADYDRMLEKLKKTATGWMTTINGKELKVEGQITYYNRYKRQNVVKDLSVELDRLSEESVNNDISSWTKGRSGEALSLLKKRFSHRPVQEKFVCLNCGFETHADEQAALNIARSWLFLRSQEYKKYQTNKTTGNTDKRAFVETWQSFYRKKLKEVWKPAV

SEQ ID NO: 35722 - protein, 978 aa, synthetic construct
  REGION 1..978: note = engineered CasX variant
QEIKRINKIRRRLVKDSNTKKAGKTGPMKTLLVRVMTPDLRERLENLRKKPENIPQPISNTSRANLNKLLTDYTEMKKAILHVYWEEFQKDPVGLMSRVAQPASKKIDQNKLKPEMDEKGNLTTAGFACSQCGQPLFVYKLEQVSEKGKAYTNYFGRCNVAEHEKLILLAQLKPEKDSDEAVTYSLGKFGQRALDFYSIHVTKESTHPVKPLAQIAGNRYASHPVGKALSDACMGTIASFLSKYQDIIIEHQKVVKGNQKRLESLRELAGKENLEYPSVTLPPQPHTSEGVDAYNEVIARVRMWVNLNLWQKLKLSRDDAKPLLRLKGFPSFPLVERQANEVDWWDMVCNVKKLINEKKEDGKVFWQNLAGYKRQEALRPYLSSEEDRKKGKKFARYQLGDLLLHLEKKHGEDWGKVYDEAWERIDKKVEGLSKHIKLEEERRSEDAQSKAALTDWLRAKASFVIEGLKEADKDEFCRCELKLQKWYGDLRGKPFAIEAENSILDISGFSKQYNCAFIWQKDGVKKLNLYLIINYFKGGKLRFKKIKPEAFEANRFYTVINKKSGEIVPMEVNFNFDDPNLIILPLAFGKRQGREFIWNDLLSLETGSLKLANGRVIEKTLYNRRTRQDEPALFVALTFERREVLDSSNIKPMNLIGVDRGENIPAVIALTDPEGCPLSRFKDSLGNPTHILRIGESYKEKQRTIQAKKEVEQRRAGGYSRKYASKAKNLADDMVRNTARDLLYYAVTQDAMLIFENLSRGFGRQGKRTFMAERQYTRMEDWLTAKLAYEGLPSKTYLSKTLAQYTSKTCSNCGFTITSADYDRMLEKLKKTATGWMTTINGKELKVEGQITYYNRYKRQNVVKDLSVELDRLSEESVNNDISSWTKGRSGEALSLLKKRFSHRPVQEKFVCLNCGFETHADEQAALNIARSWLFLRSQEYKKYQTNKTTGNTDKRAFVETWQSFYRKKLKEVWKPAV

SEQ ID NO: 35723 - protein, 978 aa, synthetic construct
  REGION 1..978: note = engineered CasX variant
QEIKRINKIRRRLVKDSNTKKAGKTGPMKTLLVRVMTPDLRERLENLRKKPENIPQPISNTSRANLNKLLTDYTEMKKAILHVYWEEFQKDPVGLMSRVAQPASKKIDQNKLKPEMDEKGNLTTAGFACSQCGQPLFVYKLEQVSEKGKAYTNYFGRCNVAEHEKLILLAQLKPEKDSDEAVTYSLGKFGQRALDFYSIHVTKESTHPVKPLAQIAGNRYASSPVGKALSDACMGTIASFLSKYQDIIIEHQKVVKGNQKRLESLRELAGKENLEYPSVTLPPQPHTSEGVDAYNEVIARVRMWVNLNLWQKLKLSRDDAKPLLRLKGFPSFPLVERQANEVDWWDMVCNVKKLINEKKEDGKVFWQNLAGYKRQEALRPYLSSEEDRKKGKKFARYQLGDLLLHLEKKHGEDWGKVYDEAWERIDKKVEGLSKHIKLEEERRSEDAQSKAALTDWLRAKASFVIEGLKEADKDEFCRCELKLQKWYGDLRGKPFAIEAENSILDISGFSKQYNCAFIWQKDGVKKLNLYLIINYFKGGKLRFKKIKPEAFEANRFYTVINKKSGEIVPMEVNFNFDDPNLIILPLAFGKRQGREFIWNDLLSLETGSLKLANGRVIEKTLYNRRTRQDEPALFVALTFERREVLDSSNIKPMNLIGVDRGENIPAVIALTDPEGCPLSRFKDSLGNPTHILRIGESYKEKQRTIQAKKEVEQRRAGGYSRKYASKAKNLADDMVRNTARDLLYYAVTQDAMLIFENLSRGFGRQGKRTFMAERQYTRMEDWLTAKLAYEGLPSKTYLSKTLAQYTSKTCSNCGFTITSADYDRMLEKLKKTATGWMTTINGKELKVEGQITYYNRYKRQNVVKDLSVELDRLSEESVNNDISSWTKGRSGEALSLLKKRFSHRPVQEKFVCLNCGFETHADEQAALNIARSWLFLRSQEYKKYQTNKTTGNTDKRAFVETWQSFYRKKLKEVWKPAV

SEQ ID NO: 35724 - protein, 978 aa, synthetic construct
  REGION 1..978: note = engineered CasX variant
QEIKRINKIRRRLVKDSNTKKAGKTGPMKTLLVRVMTPDLRERLENLRKKPENIPQPISNTSRANLNKLLTDYTEMKKAILHVYWEEFQKDPVGLMSRVAQPASKKIDQNKLKPEMDEKGNLTTAGFACSQCGQPLFVYKLEQVSEKGKAYTNYFGRCNVAEHEKLILLAQLKPEKDSDEAVTYSLGKFGQRALDFYSIHVTKESTHPVKPLAQIAGNRYASTPVGKALSDACMGTIASFLSKYQDIIIEHQKVVKGNQKRLESLRELAGKENLEYPSVTLPPQPHTSEGVDAYNEVIARVRMWVNLNLWQKLKLSRDDAKPLLRLKGFPSFPLVERQANEVDWWDMVCNVKKLINEKKEDGKVFWQNLAGYKRQEALRPYLSSEEDRKKGKKFARYQLGDLLLHLEKKHGEDWGKVYDEAWERIDKKVEGLSKHIKLEEERRSEDAQSKAALTDWLRAKASFVIEGLKEADKDEFCRCELKLQKWYGDLRGKPFAIEAENSILDISGFSKQYNCAFIWQKDGVKKLNLYLIINYFKGGKLRFKKIKPEAFEANRFYTVINKKSGEIVPMEVNFNFDDPNLIILPLAFGKRQGREFIWNDLLSLETGSLKLANGRVIEKTLYNRRTRQDEPALFVALTFERREVLDSSNIKPMNLIGVDRGENIPAVIALTDPEGCPLSRFKDSLGNPTHILRIGESYKEKQRTIQAKKEVEQRRAGGYSRKYASKAKNLADDMVRNTARDLLYYAVTQDAMLIFENLSRGFGRQGKRTFMAERQYTRMEDWLTAKLAYEGLPSKTYLSKTLAQYTSKTCSNCGFTITSADYDRMLEKLKKTATGWMTTINGKELKVEGQITYYNRYKRQNVVKDLSVELDRLSEESVNNDISSWTKGRSGEALSLLKKRFSHRPVQEKFVCLNCGFETHADEQAALNIARSWLFLRSQEYKKYQTNKTTGNTDKRAFVETWQSFYRKKLKEVWKPAV

SEQ ID NO: 35725 - protein, 978 aa, synthetic construct
  REGION 1..978: note = engineered CasX variant
QEIKRINKIRRRLVKDSNTKKAGKTGPMKTLLVRVMTPDLRERLENLRKKPENIPQPISNTSRANLNKLLTDYTEMKKAILHVYWEEFQKDPVGLMSRVAQPASKKIDQNKLKPEMDEKGNLTTAGFACSQCGQPLFVYKLEQVSEKGKAYTNYFGRCNVAEHEKLILLAQLKPEKDSDEAVTYSLGKFGQRALDFYSIHVTKESTHPVKPLAQIAGNRYASAPVGKALSDACMGTIASFLSKYQDIIIEHQKVVKGNQKRLESLRELAGKENLEYPSVTLPPQPHTSEGVDAYNEVIARVRMWVNLNLWQKLKLSRDDAKPLLRLKGFPSFPLVERQANEVDWWDMVCNVKKLINEKKEDGKVFWQNLAGYKRQEALRPYLSSEEDRKKGKKFARYQLGDLLLHLEKKHGEDWGKVYDEAWERIDKKVEGLSKHIKLEEERRSEDAQSKAALTDWLRAKASFVIEGLKEADKDEFCRCELKLQKWYGDLRGKPFAIEAENSILDISGFSKQYNCAFIWQKDGVKKLNLYLIINYFKGGKLRFKKIKPEAFEANRFYTVINKKSGEIVPMEVNFNFDDPNLIILPLAFGKRQGREFIWNDLLSLETGSLKLANGRVIEKTLYNRRTRQDEPALFVALTFERREVLDSSNIKPMNLIGVDRGENIPAVIALTDPEGCPLSRFKDSLGNPTHILRIGESYKEKQRTIQAKKEVEQRRAGGYSRKYASKAKNLADDMVRNTARDLLYYAVTQDAMLIFENLSRGFGRQGKRTFMAERQYTRMEDWLTAKLAYEGLPSKTYLSKTLAQYTSKTCSNCGFTITSADYDRMLEKLKKTATGWMTTINGKELKVEGQITYYNRYKRQNVVKDLSVELDRLSEESVNNDISSWTKGRSGEALSLLKKRFSHRPVQEKFVCLNCGFETHADEQAALNIARSWLFLRSQEYKKYQTNKTTGNTDKRAFVETWQSFYRKKLKEVWKPAV

SEQ ID NO: 35726 - protein, 978 aa, synthetic construct
  REGION 1..978: note = engineered CasX variant
QEIKRINKIRRRLVKDSNTKKAGKTGPMKTLLVRVMTPDLRERLENLRKKPENIPQPISNTSRANLNKLLTDYTEMKKAILHVYWEEFQKDPVGLMSRVAQPASKKIDQNKLKPEMDEKGNLTTAGFACSQCGQPLFVYKLEQVSEKGKAYTNYFGRCNVAEHEKLILLAQLKPEKDSDEAVTYSLGKFGQRALDFYSIHVTKESTHPVKPLAQIAGNRYASVPVGKALSDACMGTIASFLSKYQDIIIEHQKVVKGNQKRLESLRELAGKENLEYPSVTLPPQPHTSEGVDAYNEVIARVRMWVNLNLWQKLKLSRDDAKPLLRLKGFPSFPLVERQANEVDWWDMVCNVKKLINEKKEDGKVFWQNLAGYKRQEALRPYLSSEEDRKKGKKFARYQLGDLLLHLEKKHGEDWGKVYDEAWERIDKKVEGLSKHIKLEEERRSEDAQSKAALTDWLRAKASFVIEGLKEADKDEFCRCELKLQKWYGDLRGKPFAIEAENSILDISGFSKQYNCAFIWQKDGVKKLNLYLIINYFKGGKLRFKKIKPEAFEANRFYTVINKKSGEIVPMEVNFNFDDPNLIILPLAFGKRQGREFIWNDLLSLETGSLKLANGRVIEKTLYNRRTRQDEPALFVALTFERREVLDSSNIKPMNLIGVDRGENIPAVIALTDPEGCPLSRFKDSLGNPTHILRIGESYKEKQRTIQAKKEVEQRRAGGYSRKYASKAKNLADDMVRNTARDLLYYAVTQDAMLIFENLSRGFGRQGKRTFMAERQYTRMEDWLTAKLAYEGLPSKTYLSKTLAQYTSKTCSNCGFTITSADYDRMLEKLKKTATGWMTTINGKELKVEGQITYYNRYKRQNVVKDLSVELDRLSEESVNNDISSWTKGRSGEALSLLKKRFSHRPVQEKFVCLNCGFETHADEQAALNIARSWLFLRSQEYKKYQTNKTTGNTDKRAFVETWQSFYRKKLKEVWKPAV

SEQ ID NO: 35727 - protein, 978 aa, synthetic construct
  REGION 1..978: note = engineered CasX variant
QEIKRINKIRRRLVKDSNTKKAGKTGPMKTLLVRVMTPDLRERLENLRKKPENIPQPISNTSRANLNKLLTDYTEMKKAILHVYWEEFQKDPVGLMSRVAQPASKKIDQNKLKPEMDEKGNLTTAGFACSQCGQPLFVYKLEQVSEKGKAYTNYFGRCNVAEHEKLIKLAQLKPEKDSDEAVTYSLGKFGQRALDFYSIHVTKESTHPVKPLAQIAGNRYASGPVGKALSDACMGTIASFLSKYQDIIIEHQKVVKGNQKRLESLRELAGKENLEYPSVTLPPQPHTSEGVDAYNEVIARVRMWVNLNLWQKLKLSRDDAKPLLRLKGFPSFPLVERQANEVDWWDMVCNVKKLINEKKEDGKVFWQNLAGYKRQEALRPYLSSEEDRKKGKKFARYQLGDLLLHLEKKHGEDWGKVYDEAWERIDKKVEGLSKHIKLEEERRSEDAQSKAALTDWLRAKASFVIEGLKEADKDEFCRCELKLQKWYGDLRGKPFAIEAENSILDISGFSKQYNCAFIWQKDGVKKLNLYLIINYFKGGKLRFKKIKPEAFEANRFYTVINKKSGEIVPMEVNFNFDDPNLIILPLAFGKRQGREFIWNDLLSLETGSLKLANGRVIEKTLYNRRTRQDEPALFVALTFERREVLDSSNIKPMNLIGVDRGENIPAVIALTDPEGCPLSRFKDSLGNPTHILRIGESYKEKQRTIQAKKEVEQRRAGGYSRKYASKAKNLADDMVRNTARDLLYYAVTQDAMLIFENLSRGFGRQGKRTFMAERQYTRMEDWLTAKLAYEGLPSKTYLSKTLAQYTSKTCSNCGFTITSADYDRMLEKLKKTATGWMTTINGKELKVEGQITYYNRYKRQNVVKDLSVELDRLSEESVNNDISSWTKGRSGEALSLLKKRFSHRPVQEKFVCLNCGFETHADEQAALNIARSWLFLRSQEYKKYQTNKTTGNTDKRAFVETWQSFYRKKLKEVWKPAV

SEQ ID NO: 35728 - protein, 977 aa, synthetic construct
  REGION 1..977: note = engineered CasX variant
QEIKRINKIRRRLVKDSNTKKAGKTGPMKTLLVRVMTPDLRERLENLRKKPENIPQPISNTSRANLNKLLTDYTEMKKAILHVYWEEFQKDPVGLMSRVAQPASKKIDQNKLKPEMDEKGNLTTAGFACSQCGQPLFVYKLEQVSEKGKAYTNYFGRCNVAEHEKLILLAQLKPEKDSDEAVTYSLGKFGQRALDFYSIHVTKESTHPVKPLAQIAGNRYASPVGKALSDACMGTIASFLSKYQDIIIEHQKVVKGNQKRLESLRELAGKENLEYPSVTLPPQPHTSEGVDAYNEVIARVRMWVNLNLWQKLKLSRDDAKPLLRLKGFPSFPLVERQANEVDWWDMVCNVKKLINEKKEDGKVFWQNLAGYKRQEALRPYLSSEEDRKKGKKFARYQLGDLLLHLEKKHGEDWGKVYDEAWERIDKKVEGLSKHIKLEEERRSEDAQSKAALTDWLRAKASFVIEGLKEADKDEFCRCELKLQKWYGDLRGKPFAIEAENSILDISGFSKQYNCAFIWQKDGVKKLNLYLIINYFKGGKLRFKKIKPEAFEANRFYTVINKKSGEIVPMEVNFNFDDPNLIILPLAFGKRQGREFIWNDLLSLETGSLKLANGRVIEKTLYNRRTRQDEPALFVALTFERREVLDSSNIKPMNLIGVDRGENIPAVIALTDPEGCPLSRFKDSLGNPTHILRIGESYKEKQRTIQAKKEVEQRRAGGYSRKYASKAKNLADDMVRNTARDLLYYAVTQDAMLIFENLSRGFGRQGKRTFMAERQYTRMEDWLTAKLAYEGLPSKTYLSKTLAQYTSKTCSNCGFTITSADYDRMLEKLKKTATGWMTTINGKELKVEGQITYYNRYKRQNVVKDLSVELDRLSEESVNNDISSWTKGRSGEALSLLKKRFSHRPVQEKFVCLNCGFETHADEQAALNIARSWLFLRSQEYKKYQTNKTTGNTDKRAFVETWQSFYRKKLKEVWKPAV

SEQ ID NO: 35729 - protein, 978 aa, synthetic construct
  REGION 1..978: note = engineered CasX variant
QEIKRINKIRRRLVKDSNTKKAGKTGPMKTLLVRVMTPDLRERLENLRKKPENIPQPISNTSRANLNKLLTDYTEMKKAILHVYWEEFQKDPVGLMSRVAQPASKKIDQNKLKPEMDEKGNLTTAGFACSQCGQPLFVYKLEQVSEKGKAYTNYFGRCNVAEHEKLILLAQLKPEKDSDEAVTYSLGKFGQRALDFYSIHVTKESTHPVKPLAQIAGNRYASYPVGKALSDACMGTIASFLSKYQDIIIEHQKVVKGNQKRLESLRELAGKENLEYPSVTLPPQPHTSEGVDAYNEVIARVRMWVNLNLWQKLKLSRDDAKPLLRLKGFPSFPLVERQANEVDWWDMVCNVKKLINEKKEDGKVFWQNLAGYKRQEALRPYLSSEEDRKKGKKFARYQLGDLLLHLEKKHGEDWGKVYDEAWERIDKKVEGLSKHIKLEEERRSEDAQSKAALTDWLRAKASFVIEGLKEADKDEFCRCELKLQKWYGDLRGKPFAIEAENSILDISGFSKQYNCAFIWQKDGVKKLNLYLIINYFKGGKLRFKKIKPEAFEANRFYTVINKKSGEIVPMEVNFNFDDPNLIILPLAFGKRQGREFIWNDLLSLETGSLKLANGRVIEKTLYNRRTRQDEPALFVALTFERREVLDSSNIKPMNLIGVDRGENIPAVIALTDPEGCPLSRFKDSLGNPTHILRIGESYKEKQRTIQAKKEVEQRRAGGYSRKYASKAKNLADDMVRNTARDLLYYAVTQDAMLIFENLSRGFGRQGKRTFMAERQYTRMEDWLTAKLAYEGLPSKTYLSKTLAQYTSKTCSNCGFTITSADYDRVLEKLKKTATGWMTTINGKELKVEGQITYYNRYKRQNVVKDLSVELDRLSEESVNNDISSWTKGRQGEALSLLKKRFSHRPVQEKFVCLNCGFETHADEQAALNIARSWLFLRSQEYKKYQTNKTTGNTDKRAFVETWQSFYRKKLKEVWKPAV

SEQ ID NO: 35730 - protein, 978 aa, synthetic construct
  REGION 1..978: note = engineered CasX variant
QEIKRINKIRRRLVKDSNTKKAGKTGPMKTLLVRVMTPDLRERLENLRKKPENIPQPISNTSRANLNKLLTDYTEMKKAILHVYWEEFQKDPVGLMSRVAQPASKKIDQNKLKPEMDEKGNLTTAGFACSQCGQPLFVYKLEQVSEKGKAYTNYFGRCNVAEHEKLILLAQLKPEKDSDEAVTYSLGKFGQRALDFYSIHVTKESTHPVKPLAQIAGNRYASHPVGKALSDACMGTIASFLSKYQDIIIEHQKVVKGNQKRLESLRELAGKENLEYPSVTLPPQPHTSEGVDAYNEVIARVRMWVNLNLWQKLKLSRDDAKPLLRLKGFPSFPLVERQANEVDWWDMVCNVKKLINEKKEDGKVFWQNLAGYKRQEALRPYLSSEEDRKKGKKFARYQLGDLLLHLEKKHGEDWGKVYDEAWERIDKKVEGLSKHIKLEEERRSEDAQSKAALTDWLRAKASFVIEGLKEADKDEFCRCELKLQKWYGDLRGKPFAIEAENSILDISGFSKQYNCAFIWQKDGVKKLNLYLIINYFKGGKLRFKKIKPEAFEANRFYTVINKKSGEIVPMEVNFNFDDPNLIILPLAFGKRQGREFIWNDLLSLETGSLKLANGRVIEKTLYNRRTRQDEPALFVALTFERREVLDSSNIKPMNLIGVDRGENIPAVIALTDPEGCPLSRFKDSLGNPTHILRIGESYKEKQRTIQAKKEVEQRRAGGYSRKYASKAKNLADDMVRNTARDLLYYAVTQDAMLIFENLSRGFGRQGKRTFMAERQYTRMEDWLTAKLAYEGLPSKTYLSKTLAQYTSKTCSNCGFTITSADYDRVLEKLKKTATGWMTTINGKELKVEGQITYYNRYKRQNVVKDLSVELDRLSEESVNNDISSWTKGRQGEALSLLKKRFSHRPVQEKFVCLNCGFETHADEQAALNIARSWLFLRSQEYKKYQTNKTTGNTDKRAFVETWQSFYRKKLKEVWKPAV

SEQ ID NO: 35731 - protein, 978 aa, synthetic construct
  REGION 1..978: note = engineered CasX variant
QEIKRINKIRRRLVKDSNTKKAGKTGPMKTLLVRVMTPDLRERLENLRKKPENIPQPISNTSRANLNKLLTDYTEMKKAILHVYWEEFQKDPVGLMSRVAQPASKKIDQNKLKPEMDEKGNLTTAGFACSQCGQPLFVYKLEQVSEKGKAYTNYFGRCNVAEHEKLILLAQLKPEKDSDEAVTYSLGKFGQRALDFYSIHVTKESTHPVKPLAQIAGNRYASSPVGKALSDACMGTIASFLSKYQDIIIEHQKVVKGNQKRLESLRELAGKENLEYPSVTLPPQPHTSEGVDAYNEVIARVRMWVNLNLWQKLKLSRDDAKPLLRLKGFPSFPLVERQANEVDWWDMVCNVKKLINEKKEDGKVFWQNLAGYKRQEALRPYLSSEEDRKKGKKFARYQLGDLLLHLEKKHGEDWGKVYDEAWERIDKKVEGLSKHIKLEEERRSEDAQSKAALTDWLRAKASFVIEGLKEADKDEFCRCELKLQKWYGDLRGKPFAIEAENSILDISGFSKQYNCAFIWQKDGVKKLNLYLIINYFKGGKLRFKKIKPEAFEANRFYTVINKKSGEIVPMEVNFNFDDPNLIILPLAFGKRQGREFIWNDLLSLETGSLKLANGRVIEKTLYNRRTRQDEPALFVALTFERREVLDSSNIKPMNLIGVDRGENIPAVIALTDPEGCPLSRFKDSLGNPTHILRIGESYKEKQRTIQAKKEVEQRRAGGYSRKYASKAKNLADDMVRNTARDLLYYAVTQDAMLIFENLSRGFGRQGKRTFMAERQYTRMEDWLTAKLAYEGLPSKTYLSKTLAQYTSKTCSNCGFTITSADYDRVLEKLKKTATGWMTTINGKELKVEGQITYYNRYKRQNVVKDLSVELDRLSEESVNNDISSWTKGRQGEALSLLKKRFSHRPVQEKFVCLNCGFETHADEQAALNIARSWLFLRSQEYKKYQTNKTTGNTDKRAFVETWQSFYRKKLKEVWKPAV

SEQ ID NO: 35732 - protein, 978 aa, synthetic construct
  REGION 1..978: note = engineered CasX variant
QEIKRINKIRRRLVKDSNTKKAGKTGPMKTLLVRVMTPDLRERLENLRKKPENIPQPISNTSRANLNKLLTDYTEMKKAILHVYWEEFQKDPVGLMSRVAQPASKKIDQNKLKPEMDEKGNLTTAGFACSQCGQPLFVYKLEQVSEKGKAYTNYFGRCNVAEHEKLILLAQLKPEKDSDEAVTYSLGKFGQRALDFYSIHVTKESTHPVKPLAQIAGNRYASTPVGKALSDACMGTIASFLSKYQDIIIEHQKVVKGNQKRLESLRELAGKENLEYPSVTLPPQPHTSEGVDAYNEVIARVRMWVNLNLWQKLKLSRDDAKPLLRLKGFPSFPLVERQANEVDWWDMVCNVKKLINEKKEDGKVFWQNLAGYKRQEALRPYLSSEEDRKKGKKFARYQLGDLLLHLEKKHGEDWGKVYDEAWERIDKKVEGLSKHIKLEEERRSEDAQSKAALTDWLRAKASFVIEGLKEADKDEFCRCELKLQKWYGDLRGKPFAIEAENSILDISGFSKQYNCAFIWQKDGVKKLNLYLIINYFKGGKLRFKKIKPEAFEANRFYTVINKKSGEIVPMEVNFNFDDPNLIILPLAFGKRQGREFIWNDLLSLETGSLKLANGRVIEKTLYNRRTRQDEPALFVALTFERREVLDSSNIKPMNLIGVDRGENIPAVIALTDPEGCPLSRFKDSLGNPTHILRIGESYKEKQRTIQAKKEVEQRRAGGYSRKYASKAKNLADDMVRNTARDLLYYAVTQDAMLIFENLSRGFGRQGKRTFMAERQYTRMEDWLTAKLAYEGLPSKTYLSKTLAQYTSKTCSNCGFTITSADYDRVLEKLKKTATGWMTTINGKELKVEGQITYYNRYKRQNVVKDLSVELDRLSEESVNNDISSWTKGRQGEALSLLKKRFSHRPVQEKFVCLNCGFETHADEQAALNIARSWLFLRSQEYKKYQTNKTTGNTDKRAFVETWQSFYRKKLKEVWKPAV

SEQ ID NO: 35733 - protein, 978 aa, synthetic construct
  REGION 1..978: note = engineered CasX variant
QEIKRINKIRRRLVKDSNTKKAGKTGPMKTLLVRVMTPDLRERLENLRKKPENIPQPISNTSRANLNKLLTDYTEMKKAILHVYWEEFQKDPVGLMSRVAQPASKKIDQNKLKPEMDEKGNLTTAGFACSQCGQPLFVYKLEQVSEKGKAYTNYFGRCNVAEHEKLILLAQLKPEKDSDEAVTYSLGKFGQRALDFYSIHVTKESTHPVKPLAQIAGNRYASAPVGKALSDACMGTIASFLSKYQDIIIEHQKVVKGNQKRLESLRELAGKENLEYPSVTLPPQPHTSEGVDAYNEVIARVRMWVNLNLWQKLKLSRDDAKPLLRLKGFPSFPLVERQANEVDWWDMVCNVKKLINEKKEDGKVFWQNLAGYKRQEALRPYLSSEEDRKKGKKFARYQLGDLLLHLEKKHGEDWGKVYDEAWERIDKKVEGLSKHIKLEEERRSEDAQSKAALTDWLRAKASFVIEGLKEADKDEFCRCELKLQKWYGDLRGKPFAIEAENSILDISGFSKQYNCAFIWQKDGVKKLNLYLIINYFKGGKLRFKKIKPEAFEANRFYTVINKKSGEIVPMEVNFNFDDPNLIILPLAFGKRQGREFIWNDLLSLETGSLKLANGRVIEKTLYNRRTRQDEPALFVALTFERREVLDSSNIKPMNLIGVDRGENIPAVIALTDPEGCPLSRFKDSLGNPTHILRIGESYKEKQRTIQAKKEVEQRRAGGYSRKYASKAKNLADDMVRNTARDLLYYAVTQDAMLIFENLSRGFGRQGKRTFMAERQYTRMEDWLTAKLAYEGLPSKTYLSKTLAQYTSKTCSNCGFTITSADYDRVLEKLKKTATGWMTTINGKELKVEGQITYYNRYKRQNVVKDLSVELDRLSEESVNNDISSWTKGRQGEALSLLKKRFSHRPVQEKFVCLNCGFETHADEQAALNIARSWLFLRSQEYKKYQTNKTTGNTDKRAFVETWQSFYRKKLKEVWKPAV

SEQ ID NO: 35734 - protein, 978 aa, synthetic construct
  REGION 1..978: note = engineered CasX variant
QEIKRINKIRRRLVKDSNTKKAGKTGPMKTLLVRVMTPDLRERLENLRKKPENIPQPISNTSRANLNKLLTDYTEMKKAILHVYWEEFQKDPVGLMSRVAQPASKKIDQNKLKPEMDEKGNLTTAGFACSQCGQPLFVYKLEQVSEKGKAYTNYFGRCNVAEHEKLILLAQLKPEKDSDEAVTYSLGKFGQRALDFYSIHVTKESTHPVKPLAQIAGNRYASVPVGKALSDACMGTIASFLSKYQDIIIEHQKVVKGNQKRLESLRELAGKENLEYPSVTLPPQPHTSEGVDAYNEVIARVRMWVNLNLWQKLKLSRDDAKPLLRLKGFPSFPLVERQANEVDWWDMVCNVKKLINEKKEDGKVFWQNLAGYKRQEALRPYLSSEEDRKKGKKFARYQLGDLLLHLEKKHGEDWGKVYDEAWERIDKKVEGLSKHIKLEEERRSEDAQSKAALTDWLRAKASFVIEGLKEADKDEFCRCELKLQKWYGDLRGKPFAIEAENSILDISGFSKQYNCAFIWQKDGVKKLNLYLIINYFKGGKLRFKKIKPEAFEANRFYTVINKKSGEIVPMEVNFNFDDPNLIILPLAFGKRQGREFIWNDLLSLETGSLKLANGRVIEKTLYNRRTRQDEPALFVALTFERREVLDSSNIKPMNLIGVDRGENIPAVIALTDPEGCPLSRFKDSLGNPTHILRIGESYKEKQRTIQAKKEVEQRRAGGYSRKYASKAKNLADDMVRNTARDLLYYAVTQDAMLIFENLSRGFGRQGKRTFMAERQYTRMEDWLTAKLAYEGLPSKTYLSKTLAQYTSKTCSNCGFTITSADYDRVLEKLKKTATGWMTTINGKELKVEGQITYYNRYKRQNVVKDLSVELDRLSEESVNNDISSWTKGRQGEALSLLKKRFSHRPVQEKFVCLNCGFETHADEQAALNIARSWLFLRSQEYKKYQTNKTTGNTDKRAFVETWQSFYRKKLKEVWKPAV

SEQ ID NO: 35735 - protein, 978 aa, synthetic construct
  REGION 1..978: note = engineered CasX variant
QEIKRINKIRRRLVKDSNTKKAGKTGPMKTLLVRVMTPDLRERLENLRKKPENIPQPISNTSRANLNKLLTDYTEMKKAILHVYWEEFQKDPVGLMSRVAQPASKKIDQNKLKPEMDEKGNLTTAGFACSQCGQPLFVYKLEQVSEKGKAYTNYFGRCNVAEHEKLIKLAQLKPEKDSDEAVTYSLGKFGQRALDFYSIHVTKESTHPVKPLAQIAGNRYASGPVGKALSDACMGTIASFLSKYQDIIIEHQKVVKGNQKRLESLRELAGKENLEYPSVTLPPQPHTSEGVDAYNEVIARVRMWVNLNLWQKLKLSRDDAKPLLRLKGFPSFPLVERQANEVDWWDMVCNVKKLINEKKEDGKVFWQNLAGYKRQEALRPYLSSEEDRKKGKKFARYQLGDLLLHLEKKHGEDWGKVYDEAWERIDKKVEGLSKHIKLEEERRSEDAQSKAALTDWLRAKASFVIEGLKEADKDEFCRCELKLQKWYGDLRGKPFAIEAENSILDISGFSKQYNCAFIWQKDGVKKLNLYLIINYFKGGKLRFKKIKPEAFEANRFYTVINKKSGEIVPMEVNFNFDDPNLIILPLAFGKRQGREFIWNDLLSLETGSLKLANGRVIEKTLYNRRTRQDEPALFVALTFERREVLDSSNIKPMNLIGVDRGENIPAVIALTDPEGCPLSRFKDSLGNPTHILRIGESYKEKQRTIQAKKEVEQRRAGGYSRKYASKAKNLADDMVRNTARDLLYYAVTQDAMLIFENLSRGFGRQGKRTFMAERQYTRMEDWLTAKLAYEGLPSKTYLSKTLAQYTSKTCSNCGFTITSADYDRVLEKLKKTATGWMTTINGKELKVEGQITYYNRYKRQNVVKDLSVELDRLSEESVNNDISSWTKGRQGEALSLLKKRFSHRPVQEKFVCLNCGFETHADEQAALNIARSWLFLRSQEYKKYQTNKTTGNTDKRAFVETWQSFYRKKLKEVWKPAV

SEQ ID NO: 35736 - protein, 977 aa, synthetic construct
  REGION 1..977: note = engineered CasX variant
QEIKRINKIRRRLVKDSNTKKAGKTGPMKTLLVRVMTPDLRERLENLRKKPENIPQPISNTSRANLNKLLTDYTEMKKAILHVYWEEFQKDPVGLMSRVAQPASKKIDQNKLKPEMDEKGNLTTAGFACSQCGQPLFVYKLEQVSEKGKAYTNYFGRCNVAEHEKLILLAQLKPEKDSDEAVTYSLGKFGQRALDFYSIHVTKESTHPVKPLAQIAGNRYASPVGKALSDACMGTIASFLSKYQDIIIEHQKVVKGNQKRLESLRELAGKENLEYPSVTLPPQPHTSEGVDAYNEVIARVRMWVNLNLWQKLKLSRDDAKPLLRLKGFPSFPLVERQANEVDWWDMVCNVKKLINEKKEDGKVFWQNLAGYKRQEALRPYLSSEEDRKKGKKFARYQLGDLLLHLEKKHGEDWGKVYDEAWERIDKKVEGLSKHIKLEEERRSEDAQSKAALTDWLRAKASFVIEGLKEADKDEFCRCELKLQKWYGDLRGKPFAIEAENSILDISGFSKQYNCAFIWQKDGVKKLNLYLIINYFKGGKLRFKKIKPEAFEANRFYTVINKKSGEIVPMEVNFNFDDPNLIILPLAFGKRQGREFIWNDLLSLETGSLKLANGRVIEKTLYNRRTRQDEPALFVALTFERREVLDSSNIKPMNLIGVDRGENIPAVIALTDPEGCPLSRFKDSLGNPTHILRIGESYKEKQRTIQAKKEVEQRRAGGYSRKYASKAKNLADDMVRNTARDLLYYAVTQDAMLIFENLSRGFGRQGKRTFMAERQYTRMEDWLTAKLAYEGLPSKTYLSKTLAQYTSKTCSNCGFTITSADYDRVLEKLKKTATGWMTTINGKELKVEGQITYYNRYKRQNVVKDLSVELDRLSEESVNNDISSWTKGRQGEALSLLKKRFSHRPVQEKFVCLNCGFETHADEQAALNIARSWLFLRSQEYKKYQTNKTTGNTDKRAFVETWQSFYRKKLKEVWKPAV

SEQ ID NO: 35737 - protein, 978 aa, synthetic construct
  REGION 1..978: note = engineered CasX variant
QEIKRINKIRRRLVKDSNTKKAGKTGPMKTLLVRVMTPDLRERLENLRKKPENIPQPISNTSRANLNKLLTDYTEMKKAILHVYWEEFQKDPVGLMSRVAQPASKKIDQNKLKPEMDEKGNLTTAGFACSQCGQPLFVYKLEQVSEKGKAYTNYFGRCNVAEHEKLILLAQLKPEKDSDEAVTYSLGKFGQRALDFYSIHVTKESTHPVKPLAQIAGNRYASYPVGKALSDACMGTIASFLSKYQDIIIEHQKVVKGNQKRLESLRELAGKENLEYPSVTLPPQPHTSEGVDAYNEVIARVRMWVNLNLWQKLKLSRDDAKPLLRLKGFPSFPLVERQANEVDWWDMVCNVKKLINEKKEDGKVFWQNLAGYKRQEALRPYLSSEEDRKKGKKFARYQLGDLLLHLEKKHGEDWGKVYDEAWERIDKKVEGLSKHIKLEEERRSEDAQSKAALTDWLRAKASFVIEGLKEADKDEFCRCELKLQKWYGDLRGKPFAIEAENSILDISGFSKQYNCAFIWQKDGVKKLNLYLIINYFKGGKLRFKKIKPEAFEANRFYTVINKKSGEIVPMEVNFNFDDPNLIILPLAFGKRQGREFIWNDLLSLETGSLKLANGRVIEKTLYNRRTRQDEPALFVALTFERREVLDSSNIKPMNLIGVDRGENIPAVIALTDPEGCPLSRFKDSLGNPTHILRIGESYKEKQRTIQAKKEVEQRRAGGYSRKYASKAKNLADDMVRNTARDLLYYAVTQDAMLIFENLSRGFGRQGKRTFMAERQYTRMEDWLTAKLAYEGLPSKTYLSKTLAQYTSKTCSNCGFTITSADYDRVLEKLKKTATGWMTTINGKELKVEGQITYYNRYKRQNVVKDLSVELDRLSEESVNNDISSWTKGRSGEALSLLKKRFSHRPVQEKFVCLNCEFETHADEQAALNIARSWLFLRSQEYKKYQTNKTTGNTDKRAFVETWQSFYRKKLKEVWKPAV

SEQ ID NO: 35738 - protein, 978 aa, synthetic construct
  REGION 1..978: note = engineered CasX variant
QEIKRINKIRRRLVKDSNTKKAGKTGPMKTLLVRVMTPDLRERLENLRKKPENIPQPISNTSRANLNKLLTDYTEMKKAILHVYWEEFQKDPVGLMSRVAQPASKKIDQNKLKPEMDEKGNLTTAGFACSQCGQPLFVYKLEQVSEKGKAYTNYFGRCNVAEHEKLILLAQLKPEKDSDEAVTYSLGKFGQRALDFYSIHVTKESTHPVKPLAQIAGNRYASHPVGKALSDACMGTIASFLSKYQDIIIEHQKVVKGNQKRLESLRELAGKENLEYPSVTLPPQPHTSEGVDAYNEVIARVRMWVNLNLWQKLKLSRDDAKPLLRLKGFPSFPLVERQANEVDWWDMVCNVKKLINEKKEDGKVFWQNLAGYKRQEALRPYLSSEEDRKKGKKFARYQLGDLLLHLEKKHGEDWGKVYDEAWERIDKKVEGLSKHIKLEEERRSEDAQSKAALTDWLRAKASFVIEGLKEADKDEFCRCELKLQKWYGDLRGKPFAIEAENSILDISGFSKQYNCAFIWQKDGVKKLNLYLIINYFKGGKLRFKKIKPEAFEANRFYTVINKKSGEIVPMEVNFNFDDPNLIILPLAFGKRQGREFIWNDLLSLETGSLKLANGRVIEKTLYNRRTRQDEPALFVALTFERREVLDSSNIKPMNLIGVDRGENIPAVIALTDPEGCPLSRFKDSLGNPTHILRIGESYKEKQRTIQAKKEVEQRRAGGYSRKYASKAKNLADDMVRNTARDLLYYAVTQDAMLIFENLSRGFGRQGKRTFMAERQYTRMEDWLTAKLAYEGLPSKTYLSKTLAQYTSKTCSNCGFTITSADYDRVLEKLKKTATGWMTTINGKELKVEGQITYYNRYKRQNVVKDLSVELDRLSEESVNNDISSWTKGRSGEALSLLKKRFSHRPVQEKFVCLNCEFETHADEQAALNIARSWLFLRSQEYKKYQTNKTTGNTDKRAFVETWQSFYRKKLKEVWKPAV

SEQ ID NO: 35739 - protein, 978 aa, synthetic construct
  REGION 1..978: note = engineered CasX variant
QEIKRINKIRRRLVKDSNTKKAGKTGPMKTLLVRVMTPDLRERLENLRKKPENIPQPISNTSRANLNKLLTDYTEMKKAILHVYWEEFQKDPVGLMSRVAQPASKKIDQNKLKPEMDEKGNLTTAGFACSQCGQPLFVYKLEQVSEKGKAYTNYFGRCNVAEHEKLILLAQLKPEKDSDEAVTYSLGKFGQRALDFYSIHVTKESTHPVKPLAQIAGNRYASSPVGKALSDACMGTIASFLSKYQDIIIEHQKVVKGNQKRLESLRELAGKENLEYPSVTLPPQPHTSEGVDAYNEVIARVRMWVNLNLWQKLKLSRDDAKPLLRLKGFPSFPLVERQANEVDWWDMVCNVKKLINEKKEDGKVFWQNLAGYKRQEALRPYLSSEEDRKKGKKFARYQLGDLLLHLEKKHGEDWGKVYDEAWERIDKKVEGLSKHIKLEEERRSEDAQSKAALTDWLRAKASFVIEGLKEADKDEFCRCELKLQKWYGDLRGKPFAIEAENSILDISGFSKQYNCAFIWQKDGVKKLNLYLIINYFKGGKLRFKKIKPEAFEANRFYTVINKKSGEIVPMEVNFNFDDPNLIILPLAFGKRQGREFIWNDLLSLETGSLKLANGRVIEKTLYNRRTRQDEPALFVALTFERREVLDSSNIKPMNLIGVDRGENIPAVIALTDPEGCPLSRFKDSLGNPTHILRIGESYKEKQRTIQAKKEVEQRRAGGYSRKYASKAKNLADDMVRNTARDLLYYAVTQDAMLIFENLSRGFGRQGKRTFMAERQYTRMEDWLTAKLAYEGLPSKTYLSKTLAQYTSKTCSNCGFTITSADYDRVLEKLKKTATGWMTTINGKELKVEGQITYYNRYKRQNVVKDLSVELDRLSEESVNNDISSWTKGRSGEALSLLKKRFSHRPVQEKFVCLNCEFETHADEQAALNIARSWLFLRSQEYKKYQTNKTTGNTDKRAFVETWQSFYRKKLKEVWKPAV

SEQ ID NO: 35740 - protein, 978 aa, synthetic construct
  REGION 1..978: note = engineered CasX variant
QEIKRINKIRRRLVKDSNTKKAGKTGPMKTLLVRVMTPDLRERLENLRKKPENIPQPISNTSRANLNKLLTDYTEMKKAILHVYWEEFQKDPVGLMSRVAQPASKKIDQNKLKPEMDEKGNLTTAGFACSQCGQPLFVYKLEQVSEKGKAYTNYFGRCNVAEHEKLILLAQLKPEKDSDEAVTYSLGKFGQRALDFYSIHVTKESTHPVKPLAQIAGNRYASTPVGKALSDACMGTIASFLSKYQDIIIEHQKVVKGNQKRLESLRELAGKENLEYPSVTLPPQPHTSEGVDAYNEVIARVRMWVNLNLWQKLKLSRDDAKPLLRLKGFPSFPLVERQANEVDWWDMVCNVKKLINEKKEDGKVFWQNLAGYKRQEALRPYLSSEEDRKKGKKFARYQLGDLLLHLEKKHGEDWGKVYDEAWERIDKKVEGLSKHIKLEEERRSEDAQSKAALTDWLRAKASFVIEGLKEADKDEFCRCELKLQKWYGDLRGKPFAIEAENSILDISGFSKQYNCAFIWQKDGVKKLNLYLIINYFKGGKLRFKKIKPEAFEANRFYTVINKKSGEIVPMEVNFNFDDPNLIILPLAFGKRQGREFIWNDLLSLETGSLKLANGRVIEKTLYNRRTRQDEPALFVALTFERREVLDSSNIKPMNLIGVDRGENIPAVIALTDPEGCPLSRFKDSLGNPTHILRIGESYKEKQRTIQAKKEVEQRRAGGYSRKYASKAKNLADDMVRNTARDLLYYAVTQDAMLIFENLSRGFGRQGKRTFMAERQYTRMEDWLTAKLAYEGLPSKTYLSKTLAQYTSKTCSNCGFTITSADYDRVLEKLKKTATGWMTTINGKELKVEGQITYYNRYKRQNVVKDLSVELDRLSEESVNNDISSWTKGRSGEALSLLKKRFSHRPVQEKFVCLNCEFETHADEQAALNIARSWLFLRSQEYKKYQTNKTTGNTDKRAFVETWQSFYRKKLKEVWKPAV

SEQ ID NO: 35741 - protein, 978 aa, synthetic construct
  REGION 1..978: note = engineered CasX variant
QEIKRINKIRRRLVKDSNTKKAGKTGPMKTLLVRVMTPDLRERLENLRKKPENIPQPISNTSRANLNKLLTDYTEMKKAILHVYWEEFQKDPVGLMSRVAQPASKKIDQNKLKPEMDEKGNLTTAGFACSQCGQPLFVYKLEQVSEKGKAYTNYFGRCNVAEHEKLILLAQLKPEKDSDEAVTYSLGKFGQRALDFYSIHVTKESTHPVKPLAQIAGNRYASAPVGKALSDACMGTIASFLSKYQDIIIEHQKVVKGNQKRLESLRELAGKENLEYPSVTLPPQPHTSEGVDAYNEVIARVRMWVNLNLWQKLKLSRDDAKPLLRLKGFPSFPLVERQANEVDWWDMVCNVKKLINEKKEDGKVFWQNLAGYKRQEALRPYLSSEEDRKKGKKFARYQLGDLLLHLEKKHGEDWGKVYDEAWERIDKKVEGLSKHIKLEEERRSEDAQSKAALTDWLRAKASFVIEGLKEADKDEFCRCELKLQKWYGDLRGKPFAIEAENSILDISGFSKQYNCAFIWQKDGVKKLNLYLIINYFKGGKLRFKKIKPEAFEANRFYTVINKKSGEIVPMEVNFNFDDPNLIILPLAFGKRQGREFIWNDLLSLETGSLKLANGRVIEKTLYNRRTRQDEPALFVALTFERREVLDSSNIKPMNLIGVDRGENIPAVIALTDPEGCPLSRFKDSLGNPTHILRIGESYKEKQRTIQAKKEVEQRRAGGYSRKYASKAKNLADDMVRNTARDLLYYAVTQDAMLIFENLSRGFGRQGKRTFMAERQYTRMEDWLTAKLAYEGLPSKTYLSKTLAQYTSKTCSNCGFTITSADYDRVLEKLKKTATGWMTTINGKELKVEGQITYYNRYKRQNVVKDLSVELDRLSEESVNNDISSWTKGRSGEALSLLKKRFSHRPVQEKFVCLNCEFETHADEQAALNIARSWLFLRSQEYKKYQTNKTTGNTDKRAFVETWQSFYRKKLKEVWKPAV

SEQ ID NO: 35742 - protein, 978 aa, synthetic construct
  REGION 1..978: note = engineered CasX variant
QEIKRINKIRRRLVKDSNTKKAGKTGPMKTLLVRVMTPDLRERLENLRKKPENIPQPISNTSRANLNKLLTDYTEMKKAILHVYWEEFQKDPVGLMSRVAQPASKKIDQNKLKPEMDEKGNLTTAGFACSQCGQPLFVYKLEQVSEKGKAYTNYFGRCNVAEHEKLILLAQLKPEKDSDEAVTYSLGKFGQRALDFYSIHVTKESTHPVKPLAQIAGNRYASVPVGKALSDACMGTIASFLSKYQDIIIEHQKVVKGNQKRLESLRELAGKENLEYPSVTLPPQPHTSEGVDAYNEVIARVRMWVNLNLWQKLKLSRDDAKPLLRLKGFPSFPLVERQANEVDWWDMVCNVKKLINEKKEDGKVFWQNLAGYKRQEALRPYLSSEEDRKKGKKFARYQLGDLLLHLEKKHGEDWGKVYDEAWERIDKKVEGLSKHIKLEEERRSEDAQSKAALTDWLRAKASFVIEGLKEADKDEFCRCELKLQKWYGDLRGKPFAIEAENSILDISGFSKQYNCAFIWQKDGVKKLNLYLIINYFKGGKLRFKKIKPEAFEANRFYTVINKKSGEIVPMEVNFNFDDPNLIILPLAFGKRQGREFIWNDLLSLETGSLKLANGRVIEKTLYNRRTRQDEPALFVALTFERREVLDSSNIKPMNLIGVDRGENIPAVIALTDPEGCPLSRFKDSLGNPTHILRIGESYKEKQRTIQAKKEVEQRRAGGYSRKYASKAKNLADDMVRNTARDLLYYAVTQDAMLIFENLSRGFGRQGKRTFMAERQYTRMEDWLTAKLAYEGLPSKTYLSKTLAQYTSKTCSNCGFTITSADYDRVLEKLKKTATGWMTTINGKELKVEGQITYYNRYKRQNVVKDLSVELDRLSEESVNNDISSWTKGRSGEALSLLKKRFSHRPVQEKFVCLNCEFETHADEQAALNIARSWLFLRSQEYKKYQTNKTTGNTDKRAFVETWQSFYRKKLKEVWKPAV

SEQ ID NO: 35743 - protein, 978 aa, synthetic construct
  REGION 1..978: note = engineered CasX variant
QEIKRINKIRRRLVKDSNTKKAGKTGPMKTLLVRVMTPDLRERLENLRKKPENIPQPISNTSRANLNKLLTDYTEMKKAILHVYWEEFQKDPVGLMSRVAQPASKKIDQNKLKPEMDEKGNLTTAGFACSQCGQPLFVYKLEQVSEKGKAYTNYFGRCNVAEHEKLIKLAQLKPEKDSDEAVTYSLGKFGQRALDFYSIHVTKESTHPVKPLAQIAGNRYASGPVGKALSDACMGTIASFLSKYQDIIIEHQKVVKGNQKRLESLRELAGKENLEYPSVTLPPQPHTSEGVDAYNEVIARVRMWVNLNLWQKLKLSRDDAKPLLRLKGFPSFPLVERQANEVDWWDMVCNVKKLINEKKEDGKVFWQNLAGYKRQEALRPYLSSEEDRKKGKKFARYQLGDLLLHLEKKHGEDWGKVYDEAWERIDKKVEGLSKHIKLEEERRSEDAQSKAALTDWLRAKASFVIEGLKEADKDEFCRCELKLQKWYGDLRGKPFAIEAENSILDISGFSKQYNCAFIWQKDGVKKLNLYLIINYFKGGKLRFKKIKPEAFEANRFYTVINKKSGEIVPMEVNFNFDDPNLIILPLAFGKRQGREFIWNDLLSLETGSLKLANGRVIEKTLYNRRTRQDEPALFVALTFERREVLDSSNIKPMNLIGVDRGENIPAVIALTDPEGCPLSRFKDSLGNPTHILRIGESYKEKQRTIQAKKEVEQRRAGGYSRKYASKAKNLADDMVRNTARDLLYYAVTQDAMLIFENLSRGFGRQGKRTFMAERQYTRMEDWLTAKLAYEGLPSKTYLSKTLAQYTSKTCSNCGFTITSADYDRVLEKLKKTATGWMTTINGKELKVEGQITYYNRYKRQNVVKDLSVELDRLSEESVNNDISSWTKGRSGEALSLLKKRFSHRPVQEKFVCLNCEFETHADEQAALNIARSWLFLRSQEYKKYQTNKTTGNTDKRAFVETWQSFYRKKLKEVWKPAV

SEQ ID NO: 35744 - protein, 977 aa, synthetic construct
  REGION 1..977: note = engineered CasX variant
QEIKRINKIRRRLVKDSNTKKAGKTGPMKTLLVRVMTPDLRERLENLRKKPENIPQPISNTSRANLNKLLTDYTEMKKAILHVYWEEFQKDPVGLMSRVAQPASKKIDQNKLKPEMDEKGNLTTAGFACSQCGQPLFVYKLEQVSEKGKAYTNYFGRCNVAEHEKLILLAQLKPEKDSDEAVTYSLGKFGQRALDFYSIHVTKESTHPVKPLAQIAGNRYASPVGKALSDACMGTIASFLSKYQDIIIEHQKVVKGNQKRLESLRELAGKENLEYPSVTLPPQPHTSEGVDAYNEVIARVRMWVNLNLWQKLKLSRDDAKPLLRLKGFPSFPLVERQANEVDWWDMVCNVKKLINEKKEDGKVFWQNLAGYKRQEALRPYLSSEEDRKKGKKFARYQLGDLLLHLEKKHGEDWGKVYDEAWERIDKKVEGLSKHIKLEEERRSEDAQSKAALTDWLRAKASFVIEGLKEADKDEFCRCELKLQKWYGDLRGKPFAIEAENSILDISGFSKQYNCAFIWQKDGVKKLNLYLIINYFKGGKLRFKKIKPEAFEANRFYTVINKKSGEIVPMEVNFNFDDPNLIILPLAFGKRQGREFIWNDLLSLETGSLKLANGRVIEKTLYNRRTRQDEPALFVALTFERREVLDSSNIKPMNLIGVDRGENIPAVIALTDPEGCPLSRFKDSLGNPTHILRIGESYKEKQRTIQAKKEVEQRRAGGYSRKYASKAKNLADDMVRNTARDLLYYAVTQDAMLIFENLSRGFGRQGKRTFMAERQYTRMEDWLTAKLAYEGLPSKTYLSKTLAQYTSKTCSNCGFTITSADYDRVLEKLKKTATGWMTTINGKELKVEGQITYYNRYKRQNVVKDLSVELDRLSEESVNNDISSWTKGRSGEALSLLKKRFSHRPVQEKFVCLNCEFETHADEQAALNIARSWLFLRSQEYKKYQTNKTTGNTDKRAFVETWQSFYRKKLKEVWKPAV

SEQ ID NO: 35745 - protein, 979 aa, synthetic construct
  REGION 1..979: note = engineered CasX variant
QEIKRINKIRRRLVKDSNTKKAGKTGPMKTLLVRVMTPDLRERLENLRKKPENIPQPISNTSRANLNKLLTDYTEMKKAILHVYWEEFQKDPVGLMSRVAQPASKKIDQNKLKPEMDEKGNLTTAGFACSQCGQPLFVYKLEQVSEKGKAYTNYFGRCNVAEHEKLILLAQLKPEKDSDEAVTYSLGKFGQRALDFYSIHVTKESTHPVKPLAQIAGNRYASYPVGKALSDACMGTIASFLSKYQDIIIEHQKVVKGNQKRLESLRELAGKENLEYPSVTLPPQPHTSEGVDAYNEVIARVRMWVNLNLWQKLKLSRDDAKPLLRLKGFPSFPLVERQANEVDWWDMVCNVKKLINEKKEDGKVFWQNLAGYKRQEALRPYLSSEEDRKKGKKFARYQLGDLLLHLEKKHGEDWGKVYDEAWERIDKKVEGLSKHIKLEEERRSEDAQSKAALTDWLRAKASFVIEGLKEADKDEFCRCELKLQKWYGDLRGKPFAIEAENSILDISGFSKQYNCAFIWQKDGVKKLNLYLIINYFKGGKLRFKKIKPEAFEANRFYTVINKKSGEIVPMEVNFNFDDPNLIILPLAFGKRQGREFIWNDLLSLETGSLKLANGRVIEKTLYNRRTRQDEPALFVALTFERREVLDSSNIKPMNLIGVDRGENIPAVIALTDPEGCPLSRFKDSLGNPTHILRIGESYKEKQRTIQAKKEVEQRRAGGYSRKYASKAKNLADDMVRNTARDLLYYAVTQDAMLIFENLSRGFGRQGKRTFMAERQYTRMEDWLTAKLAYEGLPSKTYLSKTLAQYTSKTCSNCGFTITSADYDRVLEKLKKTATGWMTTINGKELKVEGQITYYNRYKRQNVVKDLSVELDRLSEESVNNDISSWTKGRSGEALSLLKKRFSHRPVQEKFVCLNCGFETHADEQAALNIARSWLFLRSQEYKKYQTNKTSTGNTDKRAFVETWQSFYRKKLKEVWKPAV

SEQ ID NO: 35746 - protein, 979 aa, synthetic construct
  REGION 1..979: note = engineered CasX variant
QEIKRINKIRRRLVKDSNTKKAGKTGPMKTLLVRVMTPDLRERLENLRKKPENIPQPISNTSRANLNKLLTDYTEMKKAILHVYWEEFQKDPVGLMSRVAQPASKKIDQNKLKPEMDEKGNLTTAGFACSQCGQPLFVYKLEQVSEKGKAYTNYFGRCNVAEHEKLILLAQLKPEKDSDEAVTYSLGKFGQRALDFYSIHVTKESTHPVKPLAQIAGNRYASHPVGKALSDACMGTIASFLSKYQDIIIEHQKVVKGNQKRLESLRELAGKENLEYPSVTLPPQPHTSEGVDAYNEVIARVRMWVNLNLWQKLKLSRDDAKPLLRLKGFPSFPLVERQANEVDWWDMVCNVKKLINEKKEDGKVFWQNLAGYKRQEALRPYLSSEEDRKKGKKFARYQLGDLLLHLEKKHGEDWGKVYDEAWERIDKKVEGLSKHIKLEEERRSEDAQSKAALTDWLRAKASFVIEGLKEADKDEFCRCELKLQKWYGDLRGKPFAIEAENSILDISGFSKQYNCAFIWQKDGVKKLNLYLIINYFKGGKLRFKKIKPEAFEANRFYTVINKKSGEIVPMEVNFNFDDPNLIILPLAFGKRQGREFIWNDLLSLETGSLKLANGRVIEKTLYNRRTRQDEPALFVALTFERREVLDSSNIKPMNLIGVDRGENIPAVIALTDPEGCPLSRFKDSLGNPTHILRIGESYKEKQRTIQAKKEVEQRRAGGYSRKYASKAKNLADDMVRNTARDLLYYAVTQDAMLIFENLSRGFGRQGKRTFMAERQYTRMEDWLTAKLAYEGLPSKTYLSKTLAQYTSKTCSNCGFTITSADYDRVLEKLKKTATGWMTTINGKELKVEGQITYYNRYKRQNVVKDLSVELDRLSEESVNNDISSWTKGRSGEALSLLKKRFSHRPVQEKFVCLNCGFETHADEQAALNIARSWLFLRSQEYKKYQTNKTSTGNTDKRAFVETWQSFYRKKLKEVWKPAV

SEQ ID NO: 35747 - protein, 979 aa, synthetic construct
  REGION 1..979: note = engineered CasX variant
QEIKRINKIRRRLVKDSNTKKAGKTGPMKTLLVRVMTPDLRERLENLRKKPENIPQPISNTSRANLNKLLTDYTEMKKAILHVYWEEFQKDPVGLMSRVAQPASKKIDQNKLKPEMDEKGNLTTAGFACSQCGQPLFVYKLEQVSEKGKAYTNYFGRCNVAEHEKLILLAQLKPEKDSDEAVTYSLGKFGQRALDFYSIHVTKESTHPVKPLAQIAGNRYASSPVGKALSDACMGTIASFLSKYQDIIIEHQKVVKGNQKRLESLRELAGKENLEYPSVTLPPQPHTSEGVDAYNEVIARVRMWVNLNLWQKLKLSRDDAKPLLRLKGFPSFPLVERQANEVDWWDMVCNVKKLINEKKEDGKVFWQNLAGYKRQEALRPYLSSEEDRKKGKKFARYQLGDLLLHLEKKHGEDWGKVYDEAWERIDKKVEGLSKHIKLEEERRSEDAQSKAALTDWLRAKASFVIEGLKEADKDEFCRCELKLQKWYGDLRGKPFAIEAENSILDISGFSKQYNCAFIWQKDGVKKLNLYLIINYFKGGKLRFKKIKPEAFEANRFYTVINKKSGEIVPMEVNFNFDDPNLIILPLAFGKRQGREFIWNDLLSLETGSLKLANGRVIEKTLYNRRTRQDEPALFVALTFERREVLDSSNIKPMNLIGVDRGENIPAVIALTDPEGCPLSRFKDSLGNPTHILRIGESYKEKQRTIQAKKEVEQRRAGGYSRKYASKAKNLADDMVRNTARDLLYYAVTQDAMLIFENLSRGFGRQGKRTFMAERQYTRMEDWLTAKLAYEGLPSKTYLSKTLAQYTSKTCSNCGFTITSADYDRVLEKLKKTATGWMTTINGKELKVEGQITYYNRYKRQNVVKDLSVELDRLSEESVNNDISSWTKGRSGEALSLLKKRFSHRPVQEKFVCLNCGFETHADEQAALNIARSWLFLRSQEYKKYQTNKTSTGNTDKRAFVETWQSFYRKKLKEVWKPAV

SEQ ID NO: 35748 - protein, 979 aa, synthetic construct
  REGION 1..979: note = engineered CasX variant
QEIKRINKIRRRLVKDSNTKKAGKTGPMKTLLVRVMTPDLRERLENLRKKPENIPQPISNTSRANLNKLLTDYTEMKKAILHVYWEEFQKDPVGLMSRVAQPASKKIDQNKLKPEMDEKGNLTTAGFACSQCGQPLFVYKLEQVSEKGKAYTNYFGRCNVAEHEKLILLAQLKPEKDSDEAVTYSLGKFGQRALDFYSIHVTKESTHPVKPLAQIAGNRYASTPVGKALSDACMGTIASFLSKYQDIIIEHQKVVKGNQKRLESLRELAGKENLEYPSVTLPPQPHTSEGVDAYNEVIARVRMWVNLNLWQKLKLSRDDAKPLLRLKGFPSFPLVERQANEVDWWDMVCNVKKLINEKKEDGKVFWQNLAGYKRQEALRPYLSSEEDRKKGKKFARYQLGDLLLHLEKKHGEDWGKVYDEAWERIDKKVEGLSKHIKLEEERRSEDAQSKAALTDWLRAKASFVIEGLKEADKDEFCRCELKLQKWYGDLRGKPFAIEAENSILDISGFSKQYNCAFIWQKDGVKKLNLYLIINYFKGGKLRFKKIKPEAFEANRFYTVINKKSGEIVPMEVNFNFDDPNLIILPLAFGKRQGREFIWNDLLSLETGSLKLANGRVIEKTLYNRRTRQDEPALFVALTFERREVLDSSNIKPMNLIGVDRGENIPAVIALTDPEGCPLSRFKDSLGNPTHILRIGESYKEKQRTIQAKKEVEQRRAGGYSRKYASKAKNLADDMVRNTARDLLYYAVTQDAMLIFENLSRGFGRQGKRTFMAERQYTRMEDWLTAKLAYEGLPSKTYLSKTLAQYTSKTCSNCGFTITSADYDRVLEKLKKTATGWMTTINGKELKVEGQITYYNRYKRQNVVKDLSVELDRLSEESVNNDISSWTKGRSGEALSLLKKRFSHRPVQEKFVCLNCGFETHADEQAALNIARSWLFLRSQEYKKYQTNKTSTGNTDKRAFVETWQSFYRKKLKEVWKPAV

SEQ ID NO: 35749 - protein, 979 aa, synthetic construct
  REGION 1..979: note = engineered CasX variant
QEIKRINKIRRRLVKDSNTKKAGKTGPMKTLLVRVMTPDLRERLENLRKKPENIPQPISNTSRANLNKLLTDYTEMKKAILHVYWEEFQKDPVGLMSRVAQPASKKIDQNKLKPEMDEKGNLTTAGFACSQCGQPLFVYKLEQVSEKGKAYTNYFGRCNVAEHEKLILLAQLKPEKDSDEAVTYSLGKFGQRALDFYSIHVTKESTHPVKPLAQIAGNRYASAPVGKALSDACMGTIASFLSKYQDIIIEHQKVVKGNQKRLESLRELAGKENLEYPSVTLPPQPHTSEGVDAYNEVIARVRMWVNLNLWQKLKLSRDDAKPLLRLKGFPSFPLVERQANEVDWWDMVCNVKKLINEKKEDGKVFWQNLAGYKRQEALRPYLSSEEDRKKGKKFARYQLGDLLLHLEKKHGEDWGKVYDEAWERIDKKVEGLSKHIKLEEERRSEDAQSKAALTDWLRAKASFVIEGLKEADKDEFCRCELKLQKWYGDLRGKPFAIEAENSILDISGFSKQYNCAFIWQKDGVKKLNLYLIINYFKGGKLRFKKIKPEAFEANRFYTVINKKSGEIVPMEVNFNFDDPNLIILPLAFGKRQGREFIWNDLLSLETGSLKLANGRVIEKTLYNRRTRQDEPALFVALTFERREVLDSSNIKPMNLIGVDRGENIPAVIALTDPEGCPLSRFKDSLGNPTHILRIGESYKEKQRTIQAKKEVEQRRAGGYSRKYASKAKNLADDMVRNTARDLLYYAVTQDAMLIFENLSRGFGRQGKRTFMAERQYTRMEDWLTAKLAYEGLPSKTYLSKTLAQYTSKTCSNCGFTITSADYDRVLEKLKKTATGWMTTINGKELKVEGQITYYNRYKRQNVVKDLSVELDRLSEESVNNDISSWTKGRSGEALSLLKKRFSHRPVQEKFVCLNCGFETHADEQAALNIARSWLFLRSQEYKKYQTNKTSTGNTDKRAFVETWQSFYRKKLKEVWKPAV

SEQ ID NO: 35750 - protein, 979 aa, synthetic construct
  REGION 1..979: note = engineered CasX variant
QEIKRINKIRRRLVKDSNTKKAGKTGPMKTLLVRVMTPDLRERLENLRKKPENIPQPISNTSRANLNKLLTDYTEMKKAILHVYWEEFQKDPVGLMSRVAQPASKKIDQNKLKPEMDEKGNLTTAGFACSQCGQPLFVYKLEQVSEKGKAYTNYFGRCNVAEHEKLILLAQLKPEKDSDEAVTYSLGKFGQRALDFYSIHVTKESTHPVKPLAQIAGNRYASVPVGKALSDACMGTIASFLSKYQDIIIEHQKVVKGNQKRLESLRELAGKENLEYPSVTLPPQPHTSEGVDAYNEVIARVRMWVNLNLWQKLKLSRDDAKPLLRLKGFPSFPLVERQANEVDWWDMVCNVKKLINEKKEDGKVFWQNLAGYKRQEALRPYLSSEEDRKKGKKFARYQLGDLLLHLEKKHGEDWGKVYDEAWERIDKKVEGLSKHIKLEEERRSEDAQSKAALTDWLRAKASFVIEGLKEADKDEFCRCELKLQKWYGDLRGKPFAIEAENSILDISGFSKQYNCAFIWQKDGVKKLNLYLIINYFKGGKLRFKKIKPEAFEANRFYTVINKKSGEIVPMEVNFNFDDPNLIILPLAFGKRQGREFIWNDLLSLETGSLKLANGRVIEKTLYNRRTRQDEPALFVALTFERREVLDSSNIKPMNLIGVDRGENIPAVIALTDPEGCPLSRFKDSLGNPTHILRIGESYKEKQRTIQAKKEVEQRRAGGYSRKYASKAKNLADDMVRNTARDLLYYAVTQDAMLIFENLSRGFGRQGKRTFMAERQYTRMEDWLTAKLAYEGLPSKTYLSKTLAQYTSKTCSNCGFTITSADYDRVLEKLKKTATGWMTTINGKELKVEGQITYYNRYKRQNVVKDLSVELDRLSEESVNNDISSWTKGRSGEALSLLKKRFSHRPVQEKFVCLNCGFETHADEQAALNIARSWLFLRSQEYKKYQTNKTSTGNTDKRAFVETWQSFYRKKLKEVWKPAV

SEQ ID NO: 35751 - protein, 979 aa, synthetic construct
  REGION 1..979: note = engineered CasX variant
QEIKRINKIRRRLVKDSNTKKAGKTGPMKTLLVRVMTPDLRERLENLRKKPENIPQPISNTSRANLNKLLTDYTEMKKAILHVYWEEFQKDPVGLMSRVAQPASKKIDQNKLKPEMDEKGNLTTAGFACSQCGQPLFVYKLEQVSEKGKAYTNYFGRCNVAEHEKLIKLAQLKPEKDSDEAVTYSLGKFGQRALDFYSIHVTKESTHPVKPLAQIAGNRYASGPVGKALSDACMGTIASFLSKYQDIIIEHQKVVKGNQKRLESLRELAGKENLEYPSVTLPPQPHTSEGVDAYNEVIARVRMWVNLNLWQKLKLSRDDAKPLLRLKGFPSFPLVERQANEVDWWDMVCNVKKLINEKKEDGKVFWQNLAGYKRQEALRPYLSSEEDRKKGKKFARYQLGDLLLHLEKKHGEDWGKVYDEAWERIDKKVEGLSKHIKLEEERRSEDAQSKAALTDWLRAKASFVIEGLKEADKDEFCRCELKLQKWYGDLRGKPFAIEAENSILDISGFSKQYNCAFIWQKDGVKKLNLYLIINYFKGGKLRFKKIKPEAFEANRFYTVINKKSGEIVPMEVNFNFDDPNLIILPLAFGKRQGREFIWNDLLSLETGSLKLANGRVIEKTLYNRRTRQDEPALFVALTFERREVLDSSNIKPMNLIGVDRGENIPAVIALTDPEGCPLSRFKDSLGNPTHILRIGESYKEKQRTIQAKKEVEQRRAGGYSRKYASKAKNLADDMVRNTARDLLYYAVTQDAMLIFENLSRGFGRQGKRTFMAERQYTRMEDWLTAKLAYEGLPSKTYLSKTLAQYTSKTCSNCGFTITSADYDRVLEKLKKTATGWMTTINGKELKVEGQITYYNRYKRQNVVKDLSVELDRLSEESVNNDISSWTKGRSGEALSLLKKRFSHRPVQEKFVCLNCGFETHADEQAALNIARSWLFLRSQEYKKYQTNKTSTGNTDKRAFVETWQSFYRKKLKEVWKPAV

SEQ ID NO: 35752 - protein, 978 aa, synthetic construct
  REGION 1..978: note = engineered CasX variant
QEIKRINKIRRRLVKDSNTKKAGKTGPMKTLLVRVMTPDLRERLENLRKKPENIPQPISNTSRANLNKLLTDYTEMKKAILHVYWEEFQKDPVGLMSRVAQPASKKIDQNKLKPEMDEKGNLTTAGFACSQCGQPLFVYKLEQVSEKGKAYTNYFGRCNVAEHEKLILLAQLKPEKDSDEAVTYSLGKFGQRALDFYSIHVTKESTHPVKPLAQIAGNRYASPVGKALSDACMGTIASFLSKYQDIIIEHQKVVKGNQKRLESLRELAGKENLEYPSVTLPPQPHTSEGVDAYNEVIARVRMWVNLNLWQKLKLSRDDAKPLLRLKGFPSFPLVERQANEVDWWDMVCNVKKLINEKKEDGKVFWQNLAGYKRQEALRPYLSSEEDRKKGKKFARYQLGDLLLHLEKKHGEDWGKVYDEAWERIDKKVEGLSKHIKLEEERRSEDAQSKAALTDWLRAKASFVIEGLKEADKDEFCRCELKLQKWYGDLRGKPFAIEAENSILDISGFSKQYNCAFIWQKDGVKKLNLYLIINYFKGGKLRFKKIKPEAFEANRFYTVINKKSGEIVPMEVNFNFDDPNLIILPLAFGKRQGREFIWNDLLSLETGSLKLANGRVIEKTLYNRRTRQDEPALFVALTFERREVLDSSNIKPMNLIGVDRGENIPAVIALTDPEGCPLSRFKDSLGNPTHILRIGESYKEKQRTIQAKKEVEQRRAGGYSRKYASKAKNLADDMVRNTARDLLYYAVTQDAMLIFENLSRGFGRQGKRTFMAERQYTRMEDWLTAKLAYEGLPSKTYLSKTLAQYTSKTCSNCGFTITSADYDRVLEKLKKTATGWMTTINGKELKVEGQITYYNRYKRQNVVKDLSVELDRLSEESVNNDISSWTKGRSGEALSLLKKRFSHRPVQEKFVCLNCGFETHADEQAALNIARSWLFLRSQEYKKYQTNKTSTGNTDKRAFVETWQSFYRKKLKEVWKPAV

SEQ ID NO: 35753 - protein, 979 aa, synthetic construct
  REGION 1..979: note = engineered CasX variant
QEIKRINKIRRRLVKDSNTKKAGKTGPMKTLLVRVMTPDLRERLENLRKKPENIPQPISNTSRANLNKLLTDYTEMKKAILHVYWEEFQKDPVGLMSRVAQPASKKIDQNKLKPEMDEKGNLTTAGFACSQCGQPLFVYKLEQVSEKGKAYTNYFGRCNVAEHEKLILLAQLKPEKDSDEAVTYSLGKFGQRALDFYSIHVTKESTHPVKPLAQIAGNRYASYPVGKALSDACMGTIASFLSKYQDIIIEHQKVVKGNQKRLESLRELAGKENLEYPSVTLPPQPHTSEGVDAYNEVIARVRMWVNLNLWQKLKLSRDDAKPLLRLKGFPSFPLVERQANEVDWWDMVCNVKKLINEKKEDGKVFWQNLAGYKRQEALRPYLSSEEDRKKGKKFARYQLGDLLLHLEKKHGEDWGKVYDEAWERIDKKVEGLSKHIKLEEERRSEDAQSKAALTDWLRAKASFVIEGLKEADKDEFCRCELKLQKWYGDLRGKPFAIEAENSILDISGFSKQYNCAFIWQKDGVKKLNLYLIINYFKGGKLRFKKIKPEAFEANRFYTVINKKSGEIVPMEVNFNFDDPNLIILPLAFGKRQGREFIWNDLLSLETGSLKLANGRVIEKTLYNRRTRQDEPALFVALTFERREVLDSSNIKPMNLIGVDRGENIPAVIALTDPEGCPLSRFKDSLGNPTHILRIGESYKEKQRTIQAKKEVEQRRAGGYSRKYASKAKNLADDMVRNTARDLLYYAVTQDAMLIFENLSRGFGRQGKRTFMAERQYTRMEDWLTAKLAYEGLPSKTYLSKTLAQYTSKTCSNCGFTITSADYDRVLEKLKKTATGWMTTINGKELKVEGQITYYNRYKRQNVVKDLSVELDRLSEESVNNDISSWTKGRSGEALSLLKKRFSHRPVQEKFVCLNCGFETHADEQAALNIARSWLFLRSQEYKKYQTNKTTGKNTDKRAFVETWQSFYRKKLKEVWKPAV

SEQ ID NO: 35754 - protein, 979 aa, synthetic construct
  REGION 1..979: note = engineered CasX variant
QEIKRINKIRRRLVKDSNTKKAGKTGPMKTLLVRVMTPDLRERLENLRKKPENIPQPISNTSRANLNKLLTDYTEMKKAILHVYWEEFQKDPVGLMSRVAQPASKKIDQNKLKPEMDEKGNLTTAGFACSQCGQPLFVYKLEQVSEKGKAYTNYFGRCNVAEHEKLILLAQLKPEKDSDEAVTYSLGKFGQRALDFYSIHVTKESTHPVKPLAQIAGNRYASHPVGKALSDACMGTIASFLSKYQDIIIEHQKVVKGNQKRLESLRELAGKENLEYPSVTLPPQPHTSEGVDAYNEVIARVRMWVNLNLWQKLKLSRDDAKPLLRLKGFPSFPLVERQANEVDWWDMVCNVKKLINEKKEDGKVFWQNLAGYKRQEALRPYLSSEEDRKKGKKFARYQLGDLLLHLEKKHGEDWGKVYDEAWERIDKKVEGLSKHIKLEEERRSEDAQSKAALTDWLRAKASFVIEGLKEADKDEFCRCELKLQKWYGDLRGKPFAIEAENSILDISGFSKQYNCAFIWQKDGVKKLNLYLIINYFKGGKLRFKKIKPEAFEANRFYTVINKKSGEIVPMEVNFNFDDPNLIILPLAFGKRQGREFIWNDLLSLETGSLKLANGRVIEKTLYNRRTRQDEPALFVALTFERREVLDSSNIKPMNLIGVDRGENIPAVIALTDPEGCPLSRFKDSLGNPTHILRIGESYKEKQRTIQAKKEVEQRRAGGYSRKYASKAKNLADDMVRNTARDLLYYAVTQDAMLIFENLSRGFGRQGKRTFMAERQYTRMEDWLTAKLAYEGLPSKTYLSKTLAQYTSKTCSNCGFTITSADYDRVLEKLKKTATGWMTTINGKELKVEGQITYYNRYKRQNVVKDLSVELDRLSEESVNNDISSWTKGRSGEALSLLKKRFSHRPVQEKFVCLNCGFETHADEQAALNIARSWLFLRSQEYKKYQTNKTTGKNTDKRAFVETWQSFYRKKLKEVWKPAV

SEQ ID NO: 35755 - protein, 979 aa, synthetic construct
  REGION 1..979: note = engineered CasX variant
QEIKRINKIRRRLVKDSNTKKAGKTGPMKTLLVRVMTPDLRERLENLRKKPENIPQPISNTSRANLNKLLTDYTEMKKAILHVYWEEFQKDPVGLMSRVAQPASKKIDQNKLKPEMDEKGNLTTAGFACSQCGQPLFVYKLEQVSEKGKAYTNYFGRCNVAEHEKLILLAQLKPEKDSDEAVTYSLGKFGQRALDFYSIHVTKESTHPVKPLAQIAGNRYASSPVGKALSDACMGTIASFLSKYQDIIIEHQKVVKGNQKRLESLRELAGKENLEYPSVTLPPQPHTSEGVDAYNEVIARVRMWVNLNLWQKLKLSRDDAKPLLRLKGFPSFPLVERQANEVDWWDMVCNVKKLINEKKEDGKVFWQNLAGYKRQEALRPYLSSEEDRKKGKKFARYQLGDLLLHLEKKHGEDWGKVYDEAWERIDKKVEGLSKHIKLEEERRSEDAQSKAALTDWLRAKASFVIEGLKEADKDEFCRCELKLQKWYGDLRGKPFAIEAENSILDISGFSKQYNCAFIWQKDGVKKLNLYLIINYFKGGKLRFKKIKPEAFEANRFYTVINKKSGEIVPMEVNFNFDDPNLIILPLAFGKRQGREFIWNDLLSLETGSLKLANGRVIEKTLYNRRTRQDEPALFVALTFERREVLDSSNIKPMNLIGVDRGENIPAVIALTDPEGCPLSRFKDSLGNPTHILRIGESYKEKQRTIQAKKEVEQRRAGGYSRKYASKAKNLADDMVRNTARDLLYYAVTQDAMLIFENLSRGFGRQGKRTFMAERQYTRMEDWLTAKLAYEGLPSKTYLSKTLAQYTSKTCSNCGFTITSADYDRVLEKLKKTATGWMTTINGKELKVEGQITYYNRYKRQNVVKDLSVELDRLSEESVNNDISSWTKGRSGEALSLLKKRFSHRPVQEKFVCLNCGFETHADEQAALNIARSWLFLRSQEYKKYQTNKTTGKNTDKRAFVETWQSFYRKKLKEVWKPAV

SEQ ID NO: 35756 - protein, 979 aa, synthetic construct
  REGION 1..979: note = engineered CasX variant
QEIKRINKIRRRLVKDSNTKKAGKTGPMKTLLVRVMTPDLRERLENLRKKPENIPQPISNTSRANLNKLLTDYTEMKKAILHVYWEEFQKDPVGLMSRVAQPASKKIDQNKLKPEMDEKGNLTTAGFACSQCGQPLFVYKLEQVSEKGKAYTNYFGRCNVAEHEKLILLAQLKPEKDSDEAVTYSLGKFGQRALDFYSIHVTKESTHPVKPLAQIAGNRYASTPVGKALSDACMGTIASFLSKYQDIIIEHQKVVKGNQKRLESLRELAGKENLEYPSVTLPPQPHTSEGVDAYNEVIARVRMWVNLNLWQKLKLSRDDAKPLLRLKGFPSFPLVERQANEVDWWDMVCNVKKLINEKKEDGKVFWQNLAGYKRQEALRPYLSSEEDRKKGKKFARYQLGDLLLHLEKKHGEDWGKVYDEAWERIDKKVEGLSKHIKLEEERRSEDAQSKAALTDWLRAKASFVIEGLKEADKDEFCRCELKLQKWYGDLRGKPFAIEAENSILDISGFSKQYNCAFIWQKDGVKKLNLYLIINYFKGGKLRFKKIKPEAFEANRFYTVINKKSGEIVPMEVNFNFDDPNLIILPLAFGKRQGREFIWNDLLSLETGSLKLANGRVIEKTLYNRRTRQDEPALFVALTFERREVLDSSNIKPMNLIGVDRGENIPAVIALTDPEGCPLSRFKDSLGNPTHILRIGESYKEKQRTIQAKKEVEQRRAGGYSRKYASKAKNLADDMVRNTARDLLYYAVTQDAMLIFENLSRGFGRQGKRTFMAERQYTRMEDWLTAKLAYEGLPSKTYLSKTLAQYTSKTCSNCGFTITSADYDRVLEKLKKTATGWMTTINGKELKVEGQITYYNRYKRQNVVKDLSVELDRLSEESVNNDISSWTKGRSGEALSLLKKRFSHRPVQEKFVCLNCGFETHADEQAALNIARSWLFLRSQEYKKYQTNKTTGKNTDKRAFVETWQSFYRKKLKEVWKPAV

SEQ ID NO: 35757 - protein, 979 aa, synthetic construct
  REGION 1..979: note = engineered CasX variant
QEIKRINKIRRRLVKDSNTKKAGKTGPMKTLLVRVMTPDLRERLENLRKKPENIPQPISNTSRANLNKLLTDYTEMKKAILHVYWEEFQKDPVGLMSRVAQPASKKIDQNKLKPEMDEKGNLTTAGFACSQCGQPLFVYKLEQVSEKGKAYTNYFGRCNVAEHEKLILLAQLKPEKDSDEAVTYSLGKFGQRALDFYSIHVTKESTHPVKPLAQIAGNRYASAPVGKALSDACMGTIASFLSKYQDIIIEHQKVVKGNQKRLESLRELAGKENLEYPSVTLPPQPHTSEGVDAYNEVIARVRMWVNLNLWQKLKLSRDDAKPLLRLKGFPSFPLVERQANEVDWWDMVCNVKKLINEKKEDGKVFWQNLAGYKRQEALRPYLSSEEDRKKGKKFARYQLGDLLLHLEKKHGEDWGKVYDEAWERIDKKVEGLSKHIKLEEERRSEDAQSKAALTDWLRAKASFVIEGLKEADKDEFCRCELKLQKWYGDLRGKPFAIEAENSILDISGFSKQYNCAFIWQKDGVKKLNLYLIINYFKGGKLRFKKIKPEAFEANRFYTVINKKSGEIVPMEVNFNFDDPNLIILPLAFGKRQGREFIWNDLLSLETGSLKLANGRVIEKTLYNRRTRQDEPALFVALTFERREVLDSSNIKPMNLIGVDRGENIPAVIALTDPEGCPLSRFKDSLGNPTHILRIGESYKEKQRTIQAKKEVEQRRAGGYSRKYASKAKNLADDMVRNTARDLLYYAVTQDAMLIFENLSRGFGRQGKRTFMAERQYTRMEDWLTAKLAYEGLPSKTYLSKTLAQYTSKTCSNCGFTITSADYDRVLEKLKKTATGWMTTINGKELKVEGQITYYNRYKRQNVVKDLSVELDRLSEESVNNDISSWTKGRSGEALSLLKKRFSHRPVQEKFVCLNCGFETHADEQAALNIARSWLFLRSQEYKKYQTNKTTGKNTDKRAFVETWQSFYRKKLKEVWKPAV

SEQ ID NO: 35758 - protein, 979 aa, synthetic construct
  REGION 1..979: note = engineered CasX variant
QEIKRINKIRRRLVKDSNTKKAGKTGPMKTLLVRVMTPDLRERLENLRKKPENIPQPISNTSRANLNKLLTDYTEMKKAILHVYWEEFQKDPVGLMSRVAQPASKKIDQNKLKPEMDEKGNLTTAGFACSQCGQPLFVYKLEQVSEKGKAYTNYFGRCNVAEHEKLILLAQLKPEKDSDEAVTYSLGKFGQRALDFYSIHVTKESTHPVKPLAQIAGNRYASVPVGKALSDACMGTIASFLSKYQDIIIEHQKVVKGNQKRLESLRELAGKENLEYPSVTLPPQPHTSEGVDAYNEVIARVRMWVNLNLWQKLKLSRDDAKPLLRLKGFPSFPLVERQANEVDWWDMVCNVKKLINEKKEDGKVFWQNLAGYKRQEALRPYLSSEEDRKKGKKFARYQLGDLLLHLEKKHGEDWGKVYDEAWERIDKKVEGLSKHIKLEEERRSEDAQSKAALTDWLRAKASFVIEGLKEADKDEFCRCELKLQKWYGDLRGKPFAIEAENSILDISGFSKQYNCAFIWQKDGVKKLNLYLIINYFKGGKLRFKKIKPEAFEANRFYTVINKKSGEIVPMEVNFNFDDPNLIILPLAFGKRQGREFIWNDLLSLETGSLKLANGRVIEKTLYNRRTRQDEPALFVALTFERREVLDSSNIKPMNLIGVDRGENIPAVIALTDPEGCPLSRFKDSLGNPTHILRIGESYKEKQRTIQAKKEVEQRRAGGYSRKYASKAKNLADDMVRNTARDLLYYAVTQDAMLIFENLSRGFGRQGKRTFMAERQYTRMEDWLTAKLAYEGLPSKTYLSKTLAQYTSKTCSNCGFTITSADYDRVLEKLKKTATGWMTTINGKELKVEGQITYYNRYKRQNVVKDLSVELDRLSEESVNNDISSWTKGRSGEALSLLKKRFSHRPVQEKFVCLNCGFETHADEQAALNIARSWLFLRSQEYKKYQTNKTTGKNTDKRAFVETWQSFYRKKLKEVWKPAV

SEQ ID NO: 35759 - protein, 979 aa, synthetic construct
  REGION 1..979: note = engineered CasX variant
QEIKRINKIRRRLVKDSNTKKAGKTGPMKTLLVRVMTPDLRERLENLRKKPENIPQPISNTSRANLNKLLTDYTEMKKAILHVYWEEFQKDPVGLMSRVAQPASKKIDQNKLKPEMDEKGNLTTAGFACSQCGQPLFVYKLEQVSEKGKAYTNYFGRCNVAEHEKLIKLAQLKPEKDSDEAVTYSLGKFGQRALDFYSIHVTKESTHPVKPLAQIAGNRYASGPVGKALSDACMGTIASFLSKYQDIIIEHQKVVKGNQKRLESLRELAGKENLEYPSVTLPPQPHTSEGVDAYNEVIARVRMWVNLNLWQKLKLSRDDAKPLLRLKGFPSFPLVERQANEVDWWDMVCNVKKLINEKKEDGKVFWQNLAGYKRQEALRPYLSSEEDRKKGKKFARYQLGDLLLHLEKKHGEDWGKVYDEAWERIDKKVEGLSKHIKLEEERRSEDAQSKAALTDWLRAKASFVIEGLKEADKDEFCRCELKLQKWYGDLRGKPFAIEAENSILDISGFSKQYNCAFIWQKDGVKKLNLYLIINYFKGGKLRFKKIKPEAFEANRFYTVINKKSGEIVPMEVNFNFDDPNLIILPLAFGKRQGREFIWNDLLSLETGSLKLANGRVIEKTLYNRRTRQDEPALFVALTFERREVLDSSNIKPMNLIGVDRGENIPAVIALTDPEGCPLSRFKDSLGNPTHILRIGESYKEKQRTIQAKKEVEQRRAGGYSRKYASKAKNLADDMVRNTARDLLYYAVTQDAMLIFENLSRGFGRQGKRTFMAERQYTRMEDWLTAKLAYEGLPSKTYLSKTLAQYTSKTCSNCGFTITSADYDRVLEKLKKTATGWMTTINGKELKVEGQITYYNRYKRQNVVKDLSVELDRLSEESVNNDISSWTKGRSGEALSLLKKRFSHRPVQEKFVCLNCGFETHADEQAALNIARSWLFLRSQEYKKYQTNKTTGKNTDKRAFVETWQSFYRKKLKEVWKPAV

SEQ ID NO: 35760 - protein, 978 aa, synthetic construct
  REGION 1..978: note = engineered CasX variant
QEIKRINKIRRRLVKDSNTKKAGKTGPMKTLLVRVMTPDLRERLENLRKKPENIPQPISNTSRANLNKLLTDYTEMKKAILHVYWEEFQKDPVGLMSRVAQPASKKIDQNKLKPEMDEKGNLTTAGFACSQCGQPLFVYKLEQVSEKGKAYTNYFGRCNVAEHEKLILLAQLKPEKDSDEAVTYSLGKFGQRALDFYSIHVTKESTHPVKPLAQIAGNRYASPVGKALSDACMGTIASFLSKYQDIIIEHQKVVKGNQKRLESLRELAGKENLEYPSVTLPPQPHTSEGVDAYNEVIARVRMWVNLNLWQKLKLSRDDAKPLLRLKGFPSFPLVERQANEVDWWDMVCNVKKLINEKKEDGKVFWQNLAGYKRQEALRPYLSSEEDRKKGKKFARYQLGDLLLHLEKKHGEDWGKVYDEAWERIDKKVEGLSKHIKLEEERRSEDAQSKAALTDWLRAKASFVIEGLKEADKDEFCRCELKLQKWYGDLRGKPFAIEAENSILDISGFSKQYNCAFIWQKDGVKKLNLYLIINYFKGGKLRFKKIKPEAFEANRFYTVINKKSGEIVPMEVNFNFDDPNLIILPLAFGKRQGREFIWNDLLSLETGSLKLANGRVIEKTLYNRRTRQDEPALFVALTFERREVLDSSNIKPMNLIGVDRGENIPAVIALTDPEGCPLSRFKDSLGNPTHILRIGESYKEKQRTIQAKKEVEQRRAGGYSRKYASKAKNLADDMVRNTARDLLYYAVTQDAMLIFENLSRGFGRQGKRTFMAERQYTRMEDWLTAKLAYEGLPSKTYLSKTLAQYTSKTCSNCGFTITSADYDRVLEKLKKTATGWMTTINGKELKVEGQITYYNRYKRQNVVKDLSVELDRLSEESVNNDISSWTKGRSGEALSLLKKRFSHRPVQEKFVCLNCGFETHADEQAALNIARSWLFLRSQEYKKYQTNKTTGKNTDKRAFVETWQSFYRKKLKEVWKPAV

SEQ ID NO: 35761 - protein, 978 aa, synthetic construct
  REGION 1..978: note = engineered CasX variant
QEIKRINKIRRRLVKDSNTKKAGKTGPMKTLLVRVMTPDLRERLENLRKKPENIPQPISNTSRANLNKLLTDYTEMKKAILHVYWEEFQKDPVGLMSRVAQPASKKIDQNKLKPEMDEKGNLTTAGFACSQCGQPLFVYKLEQVSEKGKAYTNYFGRCNVAEHEKLILLAQLKPEKDSDEAVTYSLGKFGQRALDFYSIHVTKESTHPVKPLAQIAGNRYASYPVGKALSDACMGTIASFLSKYQDIIIEHQKVVKGNQKRLESLRELAGKENLEYPSVTLPPQPHTSEGVDAYNEVIARVRMWVNLNLWQKLKLSRDDAKPLLRLKKFPSFPLVERQANEVDWWDMVCNVKKLINEKKEDGKVFWQNLAGYKRQEALRPYLSSEEDRKKGKKFARYQLGDLLLHLEKKHGEDWGKVYDEAWERIDKKVEGLSKHIKLEEERRSEDAQSKAALTDWLRAKASFVIEGLKEADKDEFCRCELKLQKWYGDLRGKPFAIEAENSILDISGFSKQYNCAFIWQKDGVKKLNLYLIINYFKGGKLRFKKIKPEAFEANRFYTVINKKSGEIVPMEVNFNFDDPNLIILPLAFGKRQGREFIWNDLLSLETGSLKLANGRVIEKTLYNRRTRQDEPALFVALTFERREVLDSSNIKPMNLIGVDRGENIPAVIALTDPEGCPLSRFKDSLGNPTHILRIGESYKEKQRTIQAKKEVEQRRAGGYSRKYASKAKNLADDMVRNTARDLLYYAVTQDAMLIFENLSRGFGRQGKRTFMAERQYTRMEDWLTAKLAYEGLPSKTYLSKTLAQYTSKTCSNCGFTITSADYDRVLEKLKKTATGWMTTINGKELKVEGQITYYNRYKRQNVVKDLSVELDRLSEESVNNDISSWTKGRSGEALSLLKKRFSHRPVQEKFVCLNCGFETHADEQAALNIARSWLFLRSQEYKKYQTNKTTGNTDKRAFVETWQSFYRKKLKEVWKPAV

SEQ ID NO: 35762 - protein, 978 aa, synthetic construct
  REGION 1..978: note = engineered CasX variant
QEIKRINKIRRRLVKDSNTKKAGKTGPMKTLLVRVMTPDLRERLENLRKKPENIPQPISNTSRANLNKLLTDYTEMKKAILHVYWEEFQKDPVGLMSRVAQPASKKIDQNKLKPEMDEKGNLTTAGFACSQCGQPLFVYKLEQVSEKGKAYTNYFGRCNVAEHEKLILLAQLKPEKDSDEAVTYSLGKFGQRALDFYSIHVTKESTHPVKPLAQIAGNRYASHPVGKALSDACMGTIASFLSKYQDIIIEHQKVVKGNQKRLESLRELAGKENLEYPSVTLPPQPHTSEGVDAYNEVIARVRMWVNLNLWQKLKLSRDDAKPLLRLKKFPSFPLVERQANEVDWWDMVCNVKKLINEKKEDGKVFWQNLAGYKRQEALRPYLSSEEDRKKGKKFARYQLGDLLLHLEKKHGEDWGKVYDEAWERIDKKVEGLSKHIKLEEERRSEDAQSKAALTDWLRAKASFVIEGLKEADKDEFCRCELKLQKWYGDLRGKPFAIEAENSILDISGFSKQYNCAFIWQKDGVKKLNLYLIINYFKGGKLRFKKIKPEAFEANRFYTVINKKSGEIVPMEVNFNFDDPNLIILPLAFGKRQGREFIWNDLLSLETGSLKLANGRVIEKTLYNRRTRQDEPALFVALTFERREVLDSSNIKPMNLIGVDRGENIPAVIALTDPEGCPLSRFKDSLGNPTHILRIGESYKEKQRTIQAKKEVEQRRAGGYSRKYASKAKNLADDMVRNTARDLLYYAVTQDAMLIFENLSRGFGRQGKRTFMAERQYTRMEDWLTAKLAYEGLPSKTYLSKTLAQYTSKTCSNCGFTITSADYDRVLEKLKKTATGWMTTINGKELKVEGQITYYNRYKRQNVVKDLSVELDRLSEESVNNDISSWTKGRSGEALSLLKKRFSHRPVQEKFVCLNCGFETHADEQAALNIARSWLFLRSQEYKKYQTNKTTGNTDKRAFVETWQSFYRKKLKEVWKPAV

SEQ ID NO: 35763 - protein, 978 aa, synthetic construct
  REGION 1..978: note = engineered CasX variant
QEIKRINKIRRRLVKDSNTKKAGKTGPMKTLLVRVMTPDLRERLENLRKKPENIPQPISNTSRANLNKLLTDYTEMKKAILHVYWEEFQKDPVGLMSRVAQPASKKIDQNKLKPEMDEKGNLTTAGFACSQCGQPLFVYKLEQVSEKGKAYTNYFGRCNVAEHEKLILLAQLKPEKDSDEAVTYSLGKFGQRALDFYSIHVTKESTHPVKPLAQIAGNRYASSPVGKALSDACMGTIASFLSKYQDIIIEHQKVVKGNQKRLESLRELAGKENLEYPSVTLPPQPHTSEGVDAYNEVIARVRMWVNLNLWQKLKLSRDDAKPLLRLKKFPSFPLVERQANEVDWWDMVCNVKKLINEKKEDGKVFWQNLAGYKRQEALRPYLSSEEDRKKGKKFARYQLGDLLLHLEKKHGEDWGKVYDEAWERIDKKVEGLSKHIKLEEERRSEDAQSKAALTDWLRAKASFVIEGLKEADKDEFCRCELKLQKWYGDLRGKPFAIEAENSILDISGFSKQYNCAFIWQKDGVKKLNLYLIINYFKGGKLRFKKIKPEAFEANRFYTVINKKSGEIVPMEVNFNFDDPNLIILPLAFGKRQGREFIWNDLLSLETGSLKLANGRVIEKTLYNRRTRQDEPALFVALTFERREVLDSSNIKPMNLIGVDRGENIPAVIALTDPEGCPLSRFKDSLGNPTHILRIGESYKEKQRTIQAKKEVEQRRAGGYSRKYASKAKNLADDMVRNTARDLLYYAVTQDAMLIFENLSRGFGRQGKRTFMAERQYTRMEDWLTAKLAYEGLPSKTYLSKTLAQYTSKTCSNCGFTITSADYDRVLEKLKKTATGWMTTINGKELKVEGQITYYNRYKRQNVVKDLSVELDRLSEESVNNDISSWTKGRSGEALSLLKKRFSHRPVQEKFVCLNCGFETHADEQAALNIARSWLFLRSQEYKKYQTNKTTGNTDKRAFVETWQSFYRKKLKEVWKPAV

SEQ ID NO: 35764 - protein, 978 aa, synthetic construct
  REGION 1..978: note = engineered CasX variant
QEIKRINKIRRRLVKDSNTKKAGKTGPMKTLLVRVMTPDLRERLENLRKKPENIPQPISNTSRANLNKLLTDYTEMKKAILHVYWEEFQKDPVGLMSRVAQPASKKIDQNKLKPEMDEKGNLTTAGFACSQCGQPLFVYKLEQVSEKGKAYTNYFGRCNVAEHEKLILLAQLKPEKDSDEAVTYSLGKFGQRALDFYSIHVTKESTHPVKPLAQIAGNRYASTPVGKALSDACMGTIASFLSKYQDIIIEHQKVVKGNQKRLESLRELAGKENLEYPSVTLPPQPHTSEGVDAYNEVIARVRMWVNLNLWQKLKLSRDDAKPLLRLKKFPSFPLVERQANEVDWWDMVCNVKKLINEKKEDGKVFWQNLAGYKRQEALRPYLSSEEDRKKGKKFARYQLGDLLLHLEKKHGEDWGKVYDEAWERIDKKVEGLSKHIKLEEERRSEDAQSKAALTDWLRAKASFVIEGLKEADKDEFCRCELKLQKWYGDLRGKPFAIEAENSILDISGFSKQYNCAFIWQKDGVKKLNLYLIINYFKGGKLRFKKIKPEAFEANRFYTVINKKSGEIVPMEVNFNFDDPNLIILPLAFGKRQGREFIWNDLLSLETGSLKLANGRVIEKTLYNRRTRQDEPALFVALTFERREVLDSSNIKPMNLIGVDRGENIPAVIALTDPEGCPLSRFKDSLGNPTHILRIGESYKEKQRTIQAKKEVEQRRAGGYSRKYASKAKNLADDMVRNTARDLLYYAVTQDAMLIFENLSRGFGRQGKRTFMAERQYTRMEDWLTAKLAYEGLPSKTYLSKTLAQYTSKTCSNCGFTITSADYDRVLEKLKKTATGWMTTINGKELKVEGQITYYNRYKRQNVVKDLSVELDRLSEESVNNDISSWTKGRSGEALSLLKKRFSHRPVQEKFVCLNCGFETHADEQAALNIARSWLFLRSQEYKKYQTNKTTGNTDKRAFVETWQSFYRKKLKEVWKPAV

SEQ ID NO: 35765 - protein, 978 aa, synthetic construct
  REGION 1..978: note = engineered CasX variant
QEIKRINKIRRRLVKDSNTKKAGKTGPMKTLLVRVMTPDLRERLENLRKKPENIPQPISNTSRANLNKLLTDYTEMKKAILHVYWEEFQKDPVGLMSRVAQPASKKIDQNKLKPEMDEKGNLTTAGFACSQCGQPLFVYKLEQVSEKGKAYTNYFGRCNVAEHEKLILLAQLKPEKDSDEAVTYSLGKFGQRALDFYSIHVTKESTHPVKPLAQIAGNRYASAPVGKALSDACMGTIASFLSKYQDIIIEHQKVVKGNQKRLESLRELAGKENLEYPSVTLPPQPHTSEGVDAYNEVIARVRMWVNLNLWQKLKLSRDDAKPLLRLKKFPSFPLVERQANEVDWWDMVCNVKKLINEKKEDGKVFWQNLAGYKRQEALRPYLSSEEDRKKGKKFARYQLGDLLLHLEKKHGEDWGKVYDEAWERIDKKVEGLSKHIKLEEERRSEDAQSKAALTDWLRAKASFVIEGLKEADKDEFCRCELKLQKWYGDLRGKPFAIEAENSILDISGFSKQYNCAFIWQKDGVKKLNLYLIINYFKGGKLRFKKIKPEAFEANRFYTVINKKSGEIVPMEVNFNFDDPNLIILPLAFGKRQGREFIWNDLLSLETGSLKLANGRVIEKTLYNRRTRQDEPALFVALTFERREVLDSSNIKPMNLIGVDRGENIPAVIALTDPEGCPLSRFKDSLGNPTHILRIGESYKEKQRTIQAKKEVEQRRAGGYSRKYASKAKNLADDMVRNTARDLLYYAVTQDAMLIFENLSRGFGRQGKRTFMAERQYTRMEDWLTAKLAYEGLPSKTYLSKTLAQYTSKTCSNCGFTITSADYDRVLEKLKKTATGWMTTINGKELKVEGQITYYNRYKRQNVVKDLSVELDRLSEESVNNDISSWTKGRSGEALSLLKKRFSHRPVQEKFVCLNCGFETHADEQAALNIARSWLFLRSQEYKKYQTNKTTGNTDKRAFVETWQSFYRKKLKEVWKPAV

SEQ ID NO: 35766 - protein, 978 aa, synthetic construct
  REGION 1..978: note = engineered CasX variant
QEIKRINKIRRRLVKDSNTKKAGKTGPMKTLLVRVMTPDLRERLENLRKKPENIPQPISNTSRANLNKLLTDYTEMKKAILHVYWEEFQKDPVGLMSRVAQPASKKIDQNKLKPEMDEKGNLTTAGFACSQCGQPLFVYKLEQVSEKGKAYTNYFGRCNVAEHEKLILLAQLKPEKDSDEAVTYSLGKFGQRALDFYSIHVTKESTHPVKPLAQIAGNRYASVPVGKALSDACMGTIASFLSKYQDIIIEHQKVVKGNQKRLESLRELAGKENLEYPSVTLPPQPHTSEGVDAYNEVIARVRMWVNLNLWQKLKLSRDDAKPLLRLKKFPSFPLVERQANEVDWWDMVCNVKKLINEKKEDGKVFWQNLAGYKRQEALRPYLSSEEDRKKGKKFARYQLGDLLLHLEKKHGEDWGKVYDEAWERIDKKVEGLSKHIKLEEERRSEDAQSKAALTDWLRAKASFVIEGLKEADKDEFCRCELKLQKWYGDLRGKPFAIEAENSILDISGFSKQYNCAFIWQKDGVKKLNLYLIINYFKGGKLRFKKIKPEAFEANRFYTVINKKSGEIVPMEVNFNFDDPNLIILPLAFGKRQGREFIWNDLLSLETGSLKLANGRVIEKTLYNRRTRQDEPALFVALTFERREVLDSSNIKPMNLIGVDRGENIPAVIALTDPEGCPLSRFKDSLGNPTHILRIGESYKEKQRTIQAKKEVEQRRAGGYSRKYASKAKNLADDMVRNTARDLLYYAVTQDAMLIFENLSRGFGRQGKRTFMAERQYTRMEDWLTAKLAYEGLPSKTYLSKTLAQYTSKTCSNCGFTITSADYDRVLEKLKKTATGWMTTINGKELKVEGQITYYNRYKRQNVVKDLSVELDRLSEESVNNDISSWTKGRSGEALSLLKKRFSHRPVQEKFVCLNCGFETHADEQAALNIARSWLFLRSQEYKKYQTNKTTGNTDKRAFVETWQSFYRKKLKEVWKPAV

SEQ ID NO: 35767 - protein, 978 aa, synthetic construct
  REGION 1..978: note = engineered CasX variant
QEIKRINKIRRRLVKDSNTKKAGKTGPMKTLLVRVMTPDLRERLENLRKKPENIPQPISNTSRANLNKLLTDYTEMKKAILHVYWEEFQKDPVGLMSRVAQPASKKIDQNKLKPEMDEKGNLTTAGFACSQCGQPLFVYKLEQVSEKGKAYTNYFGRCNVAEHEKLIKLAQLKPEKDSDEAVTYSLGKFGQRALDFYSIHVTKESTHPVKPLAQIAGNRYASGPVGKALSDACMGTIASFLSKYQDIIIEHQKVVKGNQKRLESLRELAGKENLEYPSVTLPPQPHTSEGVDAYNEVIARVRMWVNLNLWQKLKLSRDDAKPLLRLKKFPSFPLVERQANEVDWWDMVCNVKKLINEKKEDGKVFWQNLAGYKRQEALRPYLSSEEDRKKGKKFARYQLGDLLLHLEKKHGEDWGKVYDEAWERIDKKVEGLSKHIKLEEERRSEDAQSKAALTDWLRAKASFVIEGLKEADKDEFCRCELKLQKWYGDLRGKPFAIEAENSILDISGFSKQYNCAFIWQKDGVKKLNLYLIINYFKGGKLRFKKIKPEAFEANRFYTVINKKSGEIVPMEVNFNFDDPNLIILPLAFGKRQGREFIWNDLLSLETGSLKLANGRVIEKTLYNRRTRQDEPALFVALTFERREVLDSSNIKPMNLIGVDRGENIPAVIALTDPEGCPLSRFKDSLGNPTHILRIGESYKEKQRTIQAKKEVEQRRAGGYSRKYASKAKNLADDMVRNTARDLLYYAVTQDAMLIFENLSRGFGRQGKRTFMAERQYTRMEDWLTAKLAYEGLPSKTYLSKTLAQYTSKTCSNCGFTITSADYDRVLEKLKKTATGWMTTINGKELKVEGQITYYNRYKRQNVVKDLSVELDRLSEESVNNDISSWTKGRSGEALSLLKKRFSHRPVQEKFVCLNCGFETHADEQAALNIARSWLFLRSQEYKKYQTNKTTGNTDKRAFVETWQSFYRKKLKEVWKPAV

SEQ ID NO: 35768 - protein, 977 aa, synthetic construct
  REGION 1..977: note = engineered CasX variant
QEIKRINKIRRRLVKDSNTKKAGKTGPMKTLLVRVMTPDLRERLENLRKKPENIPQPISNTSRANLNKLLTDYTEMKKAILHVYWEEFQKDPVGLMSRVAQPASKKIDQNKLKPEMDEKGNLTTAGFACSQCGQPLFVYKLEQVSEKGKAYTNYFGRCNVAEHEKLILLAQLKPEKDSDEAVTYSLGKFGQRALDFYSIHVTKESTHPVKPLAQIAGNRYASPVGKALSDACMGTIASFLSKYQDIIIEHQKVVKGNQKRLESLRELAGKENLEYPSVTLPPQPHTSEGVDAYNEVIARVRMWVNLNLWQKLKLSRDDAKPLLRLKKFPSFPLVERQANEVDWWDMVCNVKKLINEKKEDGKVFWQNLAGYKRQEALRPYLSSEEDRKKGKKFARYQLGDLLLHLEKKHGEDWGKVYDEAWERIDKKVEGLSKHIKLEEERRSEDAQSKAALTDWLRAKASFVIEGLKEADKDEFCRCELKLQKWYGDLRGKPFAIEAENSILDISGFSKQYNCAFIWQKDGVKKLNLYLIINYFKGGKLRFKKIKPEAFEANRFYTVINKKSGEIVPMEVNFNFDDPNLIILPLAFGKRQGREFIWNDLLSLETGSLKLANGRVIEKTLYNRRTRQDEPALFVALTFERREVLDSSNIKPMNLIGVDRGENIPAVIALTDPEGCPLSRFKDSLGNPTHILRIGESYKEKQRTIQAKKEVEQRRAGGYSRKYASKAKNLADDMVRNTARDLLYYAVTQDAMLIFENLSRGFGRQGKRTFMAERQYTRMEDWLTAKLAYEGLPSKTYLSKTLAQYTSKTCSNCGFTITSADYDRVLEKLKKTATGWMTTINGKELKVEGQITYYNRYKRQNVVKDLSVELDRLSEESVNNDISSWTKGRSGEALSLLKKRFSHRPVQEKFVCLNCGFETHADEQAALNIARSWLFLRSQEYKKYQTNKTTGNTDKRAFVETWQSFYRKKLKEVWKPAV

SEQ ID NO: 35769 - protein, 978 aa, synthetic construct
  REGION 1..978: note = engineered CasX variant
QEIKRINKIRRRLVKDSNTKKAGKTGPMKTLLVRVMTPDLRERLENLRKKPENIPQPISNTSRANLNKLLTDYTEMKKAILHVYWEEFQKDPVGLMSRVAQPASKKIDQNKLKPEMDEKGNLTTAGFACSQCGQPLFVYKLEQVSEKGKAYTNYFGRCNVAEHEKLILLAQLKPEKDSDEAVTYSLGKFGQRALDFYSIHVTKESTHPVKPLAQIAGNRYASYPVGKALSDACMGTIASFLSKYQDIIIEHQKVVKGNQKRLESLRELAGKENLEYPSVTLPPQPHTSEGVDAYNEVIARVRMWVNLNLWQKLKLSRDDAKPLLRLKGFPSFPLVERQANEVDWWDMVCNVKKLINEKKEDGKVFWQNLAGYKRQEALRPYLSSEEDRKKGKKFARYQLGDLLLHLEKKHGEDWGKVYDEAWERIDKKVEGLSKHIKLEEERRSEDAQSKAALTDWLRAKASFVIEGLKEADKDEFCRCELKLQKWYGDLRGKPFAIEAENSILDISGFSKQYNCAFIWQKDGVKKLNLYLIINYFKGGKLRFKKIKPEAFEANRFYTVINKKSGEIVPMEVNFNFDDPNLIILPLAFGKRQGREFIWNDLLSLETGSLKLANGRVIEKTLYNRRTRQDEPALFVALTFERREVLDSSNIKPMNLIGVDRGENIPAVIALTDPEGCPLSRFKDSLGNPTHILRIGERYKEKQRTIQAKKEVEQRRAGGYSRKYASKAKNLADDMVRNTARDLLYYAVTQDAMLIFENLSRGFGRQGKRTFMAERQYTRMEDWLTAKLAYEGLPSKTYLSKTLAQYTSKTCSNCGFTITSADYDRVLEKLKKTATGWMTTINGKELKVEGQITYYNRYKRQNVVKDLSVELDRLSEESVNNDISSWTKGRSGEALSLLKKRFSHRPVQEKFVCLNCGFETHADEQAALNIARSWLFLRSQEYKKYQTNKTTGNTDKRAFVETWQSFYRKKLKEVWKPAV

SEQ ID NO: 35770 - protein, 978 aa, synthetic construct
  REGION 1..978: note = engineered CasX variant
QEIKRINKIRRRLVKDSNTKKAGKTGPMKTLLVRVMTPDLRERLENLRKKPENIPQPISNTSRANLNKLLTDYTEMKKAILHVYWEEFQKDPVGLMSRVAQPASKKIDQNKLKPEMDEKGNLTTAGFACSQCGQPLFVYKLEQVSEKGKAYTNYFGRCNVAEHEKLILLAQLKPEKDSDEAVTYSLGKFGQRALDFYSIHVTKESTHPVKPLAQIAGNRYASHPVGKALSDACMGTIASFLSKYQDIIIEHQKVVKGNQKRLESLRELAGKENLEYPSVTLPPQPHTSEGVDAYNEVIARVRMWVNLNLWQKLKLSRDDAKPLLRLKGFPSFPLVERQANEVDWWDMVCNVKKLINEKKEDGKVFWQNLAGYKRQEALRPYLSSEEDRKKGKKFARYQLGDLLLHLEKKHGEDWGKVYDEAWERIDKKVEGLSKHIKLEEERRSEDAQSKAALTDWLRAKASFVIEGLKEADKDEFCRCELKLQKWYGDLRGKPFAIEAENSILDISGFSKQYNCAFIWQKDGVKKLNLYLIINYFKGGKLRFKKIKPEAFEANRFYTVINKKSGEIVPMEVNFNFDDPNLIILPLAFGKRQGREFIWNDLLSLETGSLKLANGRVIEKTLYNRRTRQDEPALFVALTFERREVLDSSNIKPMNLIGVDRGENIPAVIALTDPEGCPLSRFKDSLGNPTHILRIGERYKEKQRTIQAKKEVEQRRAGGYSRKYASKAKNLADDMVRNTARDLLYYAVTQDAMLIFENLSRGFGRQGKRTFMAERQYTRMEDWLTAKLAYEGLPSKTYLSKTLAQYTSKTCSNCGFTITSADYDRVLEKLKKTATGWMTTINGKELKVEGQITYYNRYKRQNVVKDLSVELDRLSEESVNNDISSWTKGRSGEALSLLKKRFSHRPVQEKFVCLNCGFETHADEQAALNIARSWLFLRSQEYKKYQTNKTTGNTDKRAFVETWQSFYRKKLKEVWKPAV

SEQ ID NO: 35771 - protein, 978 aa, synthetic construct
  REGION 1..978: note = engineered CasX variant
QEIKRINKIRRRLVKDSNTKKAGKTGPMKTLLVRVMTPDLRERLENLRKKPENIPQPISNTSRANLNKLLTDYTEMKKAILHVYWEEFQKDPVGLMSRVAQPASKKIDQNKLKPEMDEKGNLTTAGFACSQCGQPLFVYKLEQVSEKGKAYTNYFGRCNVAEHEKLILLAQLKPEKDSDEAVTYSLGKFGQRALDFYSIHVTKESTHPVKPLAQIAGNRYASSPVGKALSDACMGTIASFLSKYQDIIIEHQKVVKGNQKRLESLRELAGKENLEYPSVTLPPQPHTSEGVDAYNEVIARVRMWVNLNLWQKLKLSRDDAKPLLRLKGFPSFPLVERQANEVDWWDMVCNVKKLINEKKEDGKVFWQNLAGYKRQEALRPYLSSEEDRKKGKKFARYQLGDLLLHLEKKHGEDWGKVYDEAWERIDKKVEGLSKHIKLEEERRSEDAQSKAALTDWLRAKASFVIEGLKEADKDEFCRCELKLQKWYGDLRGKPFAIEAENSILDISGFSKQYNCAFIWQKDGVKKLNLYLIINYFKGGKLRFKKIKPEAFEANRFYTVINKKSGEIVPMEVNFNFDDPNLIILPLAFGKRQGREFIWNDLLSLETGSLKLANGRVIEKTLYNRRTRQDEPALFVALTFERREVLDSSNIKPMNLIGVDRGENIPAVIALTDPEGCPLSRFKDSLGNPTHILRIGERYKEKQRTIQAKKEVEQRRAGGYSRKYASKAKNLADDMVRNTARDLLYYAVTQDAMLIFENLSRGFGRQGKRTFMAERQYTRMEDWLTAKLAYEGLPSKTYLSKTLAQYTSKTCSNCGFTITSADYDRVLEKLKKTATGWMTTINGKELKVEGQITYYNRYKRQNVVKDLSVELDRLSEESVNNDISSWTKGRSGEALSLLKKRFSHRPVQEKFVCLNCGFETHADEQAALNIARSWLFLRSQEYKKYQTNKTTGNTDKRAFVETWQSFYRKKLKEVWKPAV

SEQ ID NO: 35772 - protein, 978 aa, synthetic construct
  REGION 1..978: note = engineered CasX variant
QEIKRINKIRRRLVKDSNTKKAGKTGPMKTLLVRVMTPDLRERLENLRKKPENIPQPISNTSRANLNKLLTDYTEMKKAILHVYWEEFQKDPVGLMSRVAQPASKKIDQNKLKPEMDEKGNLTTAGFACSQCGQPLFVYKLEQVSEKGKAYTNYFGRCNVAEHEKLILLAQLKPEKDSDEAVTYSLGKFGQRALDFYSIHVTKESTHPVKPLAQIAGNRYASTPVGKALSDACMGTIASFLSKYQDIIIEHQKVVKGNQKRLESLRELAGKENLEYPSVTLPPQPHTSEGVDAYNEVIARVRMWVNLNLWQKLKLSRDDAKPLLRLKGFPSFPLVERQANEVDWWDMVCNVKKLINEKKEDGKVFWQNLAGYKRQEALRPYLSSEEDRKKGKKFARYQLGDLLLHLEKKHGEDWGKVYDEAWERIDKKVEGLSKHIKLEEERRSEDAQSKAALTDWLRAKASFVIEGLKEADKDEFCRCELKLQKWYGDLRGKPFAIEAENSILDISGFSKQYNCAFIWQKDGVKKLNLYLIINYFKGGKLRFKKIKPEAFEANRFYTVINKKSGEIVPMEVNFNFDDPNLIILPLAFGKRQGREFIWNDLLSLETGSLKLANGRVIEKTLYNRRTRQDEPALFVALTFERREVLDSSNIKPMNLIGVDRGENIPAVIALTDPEGCPLSRFKDSLGNPTHILRIGERYKEKQRTIQAKKEVEQRRAGGYSRKYASKAKNLADDMVRNTARDLLYYAVTQDAMLIFENLSRGFGRQGKRTFMAERQYTRMEDWLTAKLAYEGLPSKTYLSKTLAQYTSKTCSNCGFTITSADYDRVLEKLKKTATGWMTTINGKELKVEGQITYYNRYKRQNVVKDLSVELDRLSEESVNNDISSWTKGRSGEALSLLKKRFSHRPVQEKFVCLNCGFETHADEQAALNIARSWLFLRSQEYKKYQTNKTTGNTDKRAFVETWQSFYRKKLKEVWKPAV

SEQ ID NO: 35773 - protein, 978 aa, synthetic construct
  REGION 1..978: note = engineered CasX variant
QEIKRINKIRRRLVKDSNTKKAGKTGPMKTLLVRVMTPDLRERLENLRKKPENIPQPISNTSRANLNKLLTDYTEMKKAILHVYWEEFQKDPVGLMSRVAQPASKKIDQNKLKPEMDEKGNLTTAGFACSQCGQPLFVYKLEQVSEKGKAYTNYFGRCNVAEHEKLILLAQLKPEKDSDEAVTYSLGKFGQRALDFYSIHVTKESTHPVKPLAQIAGNRYASAPVGKALSDACMGTIASFLSKYQDIIIEHQKVVKGNQKRLESLRELAGKENLEYPSVTLPPQPHTSEGVDAYNEVIARVRMWVNLNLWQKLKLSRDDAKPLLRLKGFPSFPLVERQANEVDWWDMVCNVKKLINEKKEDGKVFWQNLAGYKRQEALRPYLSSEEDRKKGKKFARYQLGDLLLHLEKKHGEDWGKVYDEAWERIDKKVEGLSKHIKLEEERRSEDAQSKAALTDWLRAKASFVIEGLKEADKDEFCRCELKLQKWYGDLRGKPFAIEAENSILDISGFSKQYNCAFIWQKDGVKKLNLYLIINYFKGGKLRFKKIKPEAFEANRFYTVINKKSGEIVPMEVNFNFDDPNLIILPLAFGKRQGREFIWNDLLSLETGSLKLANGRVIEKTLYNRRTRQDEPALFVALTFERREVLDSSNIKPMNLIGVDRGENIPAVIALTDPEGCPLSRFKDSLGNPTHILRIGERYKEKQRTIQAKKEVEQRRAGGYSRKYASKAKNLADDMVRNTARDLLYYAVTQDAMLIFENLSRGFGRQGKRTFMAERQYTRMEDWLTAKLAYEGLPSKTYLSKTLAQYTSKTCSNCGFTITSADYDRVLEKLKKTATGWMTTINGKELKVEGQITYYNRYKRQNVVKDLSVELDRLSEESVNNDISSWTKGRSGEALSLLKKRFSHRPVQEKFVCLNCGFETHADEQAALNIARSWLFLRSQEYKKYQTNKTTGNTDKRAFVETWQSFYRKKLKEVWKPAV

SEQ ID NO: 35774 - protein, 978 aa, synthetic construct
  REGION 1..978: note = engineered CasX variant
QEIKRINKIRRRLVKDSNTKKAGKTGPMKTLLVRVMTPDLRERLENLRKKPENIPQPISNTSRANLNKLLTDYTEMKKAILHVYWEEFQKDPVGLMSRVAQPASKKIDQNKLKPEMDEKGNLTTAGFACSQCGQPLFVYKLEQVSEKGKAYTNYFGRCNVAEHEKLILLAQLKPEKDSDEAVTYSLGKFGQRALDFYSIHVTKESTHPVKPLAQIAGNRYASVPVGKALSDACMGTIASFLSKYQDIIIEHQKVVKGNQKRLESLRELAGKENLEYPSVTLPPQPHTSEGVDAYNEVIARVRMWVNLNLWQKLKLSRDDAKPLLRLKGFPSFPLVERQANEVDWWDMVCNVKKLINEKKEDGKVFWQNLAGYKRQEALRPYLSSEEDRKKGKKFARYQLGDLLLHLEKKHGEDWGKVYDEAWERIDKKVEGLSKHIKLEEERRSEDAQSKAALTDWLRAKASFVIEGLKEADKDEFCRCELKLQKWYGDLRGKPFAIEAENSILDISGFSKQYNCAFIWQKDGVKKLNLYLIINYFKGGKLRFKKIKPEAFEANRFYTVINKKSGEIVPMEVNFNFDDPNLIILPLAFGKRQGREFIWNDLLSLETGSLKLANGRVIEKTLYNRRTRQDEPALFVALTFERREVLDSSNIKPMNLIGVDRGENIPAVIALTDPEGCPLSRFKDSLGNPTHILRIGERYKEKQRTIQAKKEVEQRRAGGYSRKYASKAKNLADDMVRNTARDLLYYAVTQDAMLIFENLSRGFGRQGKRTFMAERQYTRMEDWLTAKLAYEGLPSKTYLSKTLAQYTSKTCSNCGFTITSADYDRVLEKLKKTATGWMTTINGKELKVEGQITYYNRYKRQNVVKDLSVELDRLSEESVNNDISSWTKGRSGEALSLLKKRFSHRPVQEKFVCLNCGFETHADEQAALNIARSWLFLRSQEYKKYQTNKTTGNTDKRAFVETWQSFYRKKLKEVWKPAV

SEQ ID NO: 35775 - protein, 978 aa, synthetic construct
  REGION 1..978: note = engineered CasX variant
QEIKRINKIRRRLVKDSNTKKAGKTGPMKTLLVRVMTPDLRERLENLRKKPENIPQPISNTSRANLNKLLTDYTEMKKAILHVYWEEFQKDPVGLMSRVAQPASKKIDQNKLKPEMDEKGNLTTAGFACSQCGQPLFVYKLEQVSEKGKAYTNYFGRCNVAEHEKLIKLAQLKPEKDSDEAVTYSLGKFGQRALDFYSIHVTKESTHPVKPLAQIAGNRYASGPVGKALSDACMGTIASFLSKYQDIIIEHQKVVKGNQKRLESLRELAGKENLEYPSVTLPPQPHTSEGVDAYNEVIARVRMWVNLNLWQKLKLSRDDAKPLLRLKGFPSFPLVERQANEVDWWDMVCNVKKLINEKKEDGKVFWQNLAGYKRQEALRPYLSSEEDRKKGKKFARYQLGDLLLHLEKKHGEDWGKVYDEAWERIDKKVEGLSKHIKLEEERRSEDAQSKAALTDWLRAKASFVIEGLKEADKDEFCRCELKLQKWYGDLRGKPFAIEAENSILDISGFSKQYNCAFIWQKDGVKKLNLYLIINYFKGGKLRFKKIKPEAFEANRFYTVINKKSGEIVPMEVNFNFDDPNLIILPLAFGKRQGREFIWNDLLSLETGSLKLANGRVIEKTLYNRRTRQDEPALFVALTFERREVLDSSNIKPMNLIGVDRGENIPAVIALTDPEGCPLSRFKDSLGNPTHILRIGERYKEKQRTIQAKKEVEQRRAGGYSRKYASKAKNLADDMVRNTARDLLYYAVTQDAMLIFENLSRGFGRQGKRTFMAERQYTRMEDWLTAKLAYEGLPSKTYLSKTLAQYTSKTCSNCGFTITSADYDRVLEKLKKTATGWMTTINGKELKVEGQITYYNRYKRQNVVKDLSVELDRLSEESVNNDISSWTKGRSGEALSLLKKRFSHRPVQEKFVCLNCGFETHADEQAALNIARSWLFLRSQEYKKYQTNKTTGNTDKRAFVETWQSFYRKKLKEVWKPAV

SEQ ID NO: 35776 - protein, 977 aa, synthetic construct
  REGION 1..977: note = engineered CasX variant
QEIKRINKIRRRLVKDSNTKKAGKTGPMKTLLVRVMTPDLRERLENLRKKPENIPQPISNTSRANLNKLLTDYTEMKKAILHVYWEEFQKDPVGLMSRVAQPASKKIDQNKLKPEMDEKGNLTTAGFACSQCGQPLFVYKLEQVSEKGKAYTNYFGRCNVAEHEKLILLAQLKPEKDSDEAVTYSLGKFGQRALDFYSIHVTKESTHPVKPLAQIAGNRYASPVGKALSDACMGTIASFLSKYQDIIIEHQKVVKGNQKRLESLRELAGKENLEYPSVTLPPQPHTSEGVDAYNEVIARVRMWVNLNLWQKLKLSRDDAKPLLRLKGFPSFPLVERQANEVDWWDMVCNVKKLINEKKEDGKVFWQNLAGYKRQEALRPYLSSEEDRKKGKKFARYQLGDLLLHLEKKHGEDWGKVYDEAWERIDKKVEGLSKHIKLEEERRSEDAQSKAALTDWLRAKASFVIEGLKEADKDEFCRCELKLQKWYGDLRGKPFAIEAENSILDISGFSKQYNCAFIWQKDGVKKLNLYLIINYFKGGKLRFKKIKPEAFEANRFYTVINKKSGEIVPMEVNFNFDDPNLIILPLAFGKRQGREFIWNDLLSLETGSLKLANGRVIEKTLYNRRTRQDEPALFVALTFERREVLDSSNIKPMNLIGVDRGENIPAVIALTDPEGCPLSRFKDSLGNPTHILRIGERYKEKQRTIQAKKEVEQRRAGGYSRKYASKAKNLADDMVRNTARDLLYYAVTQDAMLIFENLSRGFGRQGKRTFMAERQYTRMEDWLTAKLAYEGLPSKTYLSKTLAQYTSKTCSNCGFTITSADYDRVLEKLKKTATGWMTTINGKELKVEGQITYYNRYKRQNVVKDLSVELDRLSEESVNNDISSWTKGRSGEALSLLKKRFSHRPVQEKFVCLNCGFETHADEQAALNIARSWLFLRSQEYKKYQTNKTTGNTDKRAFVETWQSFYRKKLKEVWKPAV

SEQ ID NO: 35777 - protein, 978 aa, synthetic construct
  REGION 1..978: note = engineered CasX variant
QEIKRINKIRRRLVKDSNTKKAGKTGPMKTLLVRVMTPDLRERLENLRKKPENIPQPISNTSRANLNKLLTDYTEMKKAILHVYWEEFQKDPVGLMSRVAQPASKKIDQNKLKPEMDEKGNLTTAGFACSQCGQPLFVYKLEQVSEKGKAYTNYFGRCNVAEHEKLILLAQLKPEKDSDEAVTYSLGKFGQRALDFYSIHVTKESTHPVKPLAQIAGNRYASYPVGKALSDACMGTIASFLSKYQDIIIEHQKVVKGNQKRLESLRELAGKENLEYPSVTLPPQPHTSEGVDAYNEVIARVRMWVNLNLWQKLKLSRDDAKPLLRLKGFPSFPLVERQANEVDWWDMVCNVKKLINEKKEDGKVFWQNLAGYKRQEALRPYLSSEEDRKKGKKFARYQLGDLLLHLEKKHGEDWGKVYDEAWERIDKKVEGLSKHIKLEEERRSEDAQSKAALTDWLRAKASFVIEGLKEADKDEFCRCELKLQKWYGDLRGKPFAIEAENSILDISGFSKQYNCAFIWQKDGVKKLNLYLIINYFKGGKLRFKKIKPEAFEANRFYTVINKKSGEIVPMEVNFNFDDPNLIILPLAFGKRQGREFIWNDLLSLETGSLQLANGRVIEKTLYNRRTRQDEPALFVALTFERREVLDSSNIKPMNLIGVDRGENIPAVIALTDPEGCPLSRFKDSLGNPTHILRIGESYKEKQRTIQAKKEVEQRRAGGYSRKYASKAKNLADDMVRNTARDLLYYAVTQDAMLIFENLSRGFGRQGKRTFMAERQYTRMEDWLTAKLAYEGLPSKTYLSKTLAQYTSKTCSNCGFTITSADYDRVLEKLKKTATGWMTTINGKELKVEGQITYYNRYKRQNVVKDLSVELDRLSEESVNNDISSWTKGRSGEALSLLKKRFSHRPVQEKFVCLNCGFETHADEQAALNIARSWLFLRSQEYKKYQTNKTTGNTDKRAFVETWQSFYRKKLKEVWKPAV

SEQ ID NO: 35778 - protein, 978 aa, synthetic construct
  REGION 1..978: note = engineered CasX variant
QEIKRINKIRRRLVKDSNTKKAGKTGPMKTLLVRVMTPDLRERLENLRKKPENIPQPISNTSRANLNKLLTDYTEMKKAILHVYWEEFQKDPVGLMSRVAQPASKKIDQNKLKPEMDEKGNLTTAGFACSQCGQPLFVYKLEQVSEKGKAYTNYFGRCNVAEHEKLILLAQLKPEKDSDEAVTYSLGKFGQRALDFYSIHVTKESTHPVKPLAQIAGNRYASHPVGKALSDACMGTIASFLSKYQDIIIEHQKVVKGNQKRLESLRELAGKENLEYPSVTLPPQPHTSEGVDAYNEVIARVRMWVNLNLWQKLKLSRDDAKPLLRLKGFPSFPLVERQANEVDWWDMVCNVKKLINEKKEDGKVFWQNLAGYKRQEALRPYLSSEEDRKKGKKFARYQLGDLLLHLEKKHGEDWGKVYDEAWERIDKKVEGLSKHIKLEEERRSEDAQSKAALTDWLRAKASFVIEGLKEADKDEFCRCELKLQKWYGDLRGKPFAIEAENSILDISGFSKQYNCAFIWQKDGVKKLNLYLIINYFKGGKLRFKKIKPEAFEANRFYTVINKKSGEIVPMEVNFNFDDPNLIILPLAFGKRQGREFIWNDLLSLETGSLQLANGRVIEKTLYNRRTRQDEPALFVALTFERREVLDSSNIKPMNLIGVDRGENIPAVIALTDPEGCPLSRFKDSLGNPTHILRIGESYKEKQRTIQAKKEVEQRRAGGYSRKYASKAKNLADDMVRNTARDLLYYAVTQDAMLIFENLSRGFGRQGKRTFMAERQYTRMEDWLTAKLAYEGLPSKTYLSKTLAQYTSKTCSNCGFTITSADYDRVLEKLKKTATGWMTTINGKELKVEGQITYYNRYKRQNVVKDLSVELDRLSEESVNNDISSWTKGRSGEALSLLKKRFSHRPVQEKFVCLNCGFETHADEQAALNIARSWLFLRSQEYKKYQTNKTTGNTDKRAFVETWQSFYRKKLKEVWKPAV

SEQ ID NO: 35779 - protein, 978 aa, synthetic construct
  REGION 1..978: note = engineered CasX variant
QEIKRINKIRRRLVKDSNTKKAGKTGPMKTLLVRVMTPDLRERLENLRKKPENIPQPISNTSRANLNKLLTDYTEMKKAILHVYWEEFQKDPVGLMSRVAQPASKKIDQNKLKPEMDEKGNLTTAGFACSQCGQPLFVYKLEQVSEKGKAYTNYFGRCNVAEHEKLILLAQLKPEKDSDEAVTYSLGKFGQRALDFYSIHVTKESTHPVKPLAQIAGNRYASSPVGKALSDACMGTIASFLSKYQDIIIEHQKVVKGNQKRLESLRELAGKENLEYPSVTLPPQPHTSEGVDAYNEVIARVRMWVNLNLWQKLKLSRDDAKPLLRLKGFPSFPLVERQANEVDWWDMVCNVKKLINEKKEDGKVFWQNLAGYKRQEALRPYLSSEEDRKKGKKFARYQLGDLLLHLEKKHGEDWGKVYDEAWERIDKKVEGLSKHIKLEEERRSEDAQSKAALTDWLRAKASFVIEGLKEADKDEFCRCELKLQKWYGDLRGKPFAIEAENSILDISGFSKQYNCAFIWQKDGVKKLNLYLIINYFKGGKLRFKKIKPEAFEANRFYTVINKKSGEIVPMEVNFNFDDPNLIILPLAFGKRQGREFIWNDLLSLETGSLQLANGRVIEKTLYNRRTRQDEPALFVALTFERREVLDSSNIKPMNLIGVDRGENIPAVIALTDPEGCPLSRFKDSLGNPTHILRIGESYKEKQRTIQAKKEVEQRRAGGYSRKYASKAKNLADDMVRNTARDLLYYAVTQDAMLIFENLSRGFGRQGKRTFMAERQYTRMEDWLTAKLAYEGLPSKTYLSKTLAQYTSKTCSNCGFTITSADYDRVLEKLKKTATGWMTTINGKELKVEGQITYYNRYKRQNVVKDLSVELDRLSEESVNNDISSWTKGRSGEALSLLKKRFSHRPVQEKFVCLNCGFETHADEQAALNIARSWLFLRSQEYKKYQTNKTTGNTDKRAFVETWQSFYRKKLKEVWKPAV

SEQ ID NO: 35780 - protein, 978 aa, synthetic construct
  REGION 1..978: note = engineered CasX variant
QEIKRINKIRRRLVKDSNTKKAGKTGPMKTLLVRVMTPDLRERLENLRKKPENIPQPISNTSRANLNKLLTDYTEMKKAILHVYWEEFQKDPVGLMSRVAQPASKKIDQNKLKPEMDEKGNLTTAGFACSQCGQPLFVYKLEQVSEKGKAYTNYFGRCNVAEHEKLILLAQLKPEKDSDEAVTYSLGKFGQRALDFYSIHVTKESTHPVKPLAQIAGNRYASTPVGKALSDACMGTIASFLSKYQDIIIEHQKVVKGNQKRLESLRELAGKENLEYPSVTLPPQPHTSEGVDAYNEVIARVRMWVNLNLWQKLKLSRDDAKPLLRLKGFPSFPLVERQANEVDWWDMVCNVKKLINEKKEDGKVFWQNLAGYKRQEALRPYLSSEEDRKKGKKFARYQLGDLLLHLEKKHGEDWGKVYDEAWERIDKKVEGLSKHIKLEEERRSEDAQSKAALTDWLRAKASFVIEGLKEADKDEFCRCELKLQKWYGDLRGKPFAIEAENSILDISGFSKQYNCAFIWQKDGVKKLNLYLIINYFKGGKLRFKKIKPEAFEANRFYTVINKKSGEIVPMEVNFNFDDPNLIILPLAFGKRQGREFIWNDLLSLETGSLQLANGRVIEKTLYNRRTRQDEPALFVALTFERREVLDSSNIKPMNLIGVDRGENIPAVIALTDPEGCPLSRFKDSLGNPTHILRIGESYKEKQRTIQAKKEVEQRRAGGYSRKYASKAKNLADDMVRNTARDLLYYAVTQDAMLIFENLSRGFGRQGKRTFMAERQYTRMEDWLTAKLAYEGLPSKTYLSKTLAQYTSKTCSNCGFTITSADYDRVLEKLKKTATGWMTTINGKELKVEGQITYYNRYKRQNVVKDLSVELDRLSEESVNNDISSWTKGRSGEALSLLKKRFSHRPVQEKFVCLNCGFETHADEQAALNIARSWLFLRSQEYKKYQTNKTTGNTDKRAFVETWQSFYRKKLKEVWKPAV

SEQ ID NO: 35781 - protein, 978 aa, synthetic construct
  REGION 1..978: note = engineered CasX variant
QEIKRINKIRRRLVKDSNTKKAGKTGPMKTLLVRVMTPDLRERLENLRKKPENIPQPISNTSRANLNKLLTDYTEMKKAILHVYWEEFQKDPVGLMSRVAQPASKKIDQNKLKPEMDEKGNLTTAGFACSQCGQPLFVYKLEQVSEKGKAYTNYFGRCNVAEHEKLILLAQLKPEKDSDEAVTYSLGKFGQRALDFYSIHVTKESTHPVKPLAQIAGNRYASAPVGKALSDACMGTIASFLSKYQDIIIEHQKVVKGNQKRLESLRELAGKENLEYPSVTLPPQPHTSEGVDAYNEVIARVRMWVNLNLWQKLKLSRDDAKPLLRLKGFPSFPLVERQANEVDWWDMVCNVKKLINEKKEDGKVFWQNLAGYKRQEALRPYLSSEEDRKKGKKFARYQLGDLLLHLEKKHGEDWGKVYDEAWERIDKKVEGLSKHIKLEEERRSEDAQSKAALTDWLRAKASFVIEGLKEADKDEFCRCELKLQKWYGDLRGKPFAIEAENSILDISGFSKQYNCAFIWQKDGVKKLNLYLIINYFKGGKLRFKKIKPEAFEANRFYTVINKKSGEIVPMEVNFNFDDPNLIILPLAFGKRQGREFIWNDLLSLETGSLQLANGRVIEKTLYNRRTRQDEPALFVALTFERREVLDSSNIKPMNLIGVDRGENIPAVIALTDPEGCPLSRFKDSLGNPTHILRIGESYKEKQRTIQAKKEVEQRRAGGYSRKYASKAKNLADDMVRNTARDLLYYAVTQDAMLIFENLSRGFGRQGKRTFMAERQYTRMEDWLTAKLAYEGLPSKTYLSKTLAQYTSKTCSNCGFTITSADYDRVLEKLKKTATGWMTTINGKELKVEGQITYYNRYKRQNVVKDLSVELDRLSEESVNNDISSWTKGRSGEALSLLKKRFSHRPVQEKFVCLNCGFETHADEQAALNIARSWLFLRSQEYKKYQTNKTTGNTDKRAFVETWQSFYRKKLKEVWKPAV

SEQ ID NO: 35782 - protein, 978 aa, synthetic construct
  REGION 1..978: note = engineered CasX variant
QEIKRINKIRRRLVKDSNTKKAGKTGPMKTLLVRVMTPDLRERLENLRKKPENIPQPISNTSRANLNKLLTDYTEMKKAILHVYWEEFQKDPVGLMSRVAQPASKKIDQNKLKPEMDEKGNLTTAGFACSQCGQPLFVYKLEQVSEKGKAYTNYFGRCNVAEHEKLILLAQLKPEKDSDEAVTYSLGKFGQRALDFYSIHVTKESTHPVKPLAQIAGNRYASVPVGKALSDACMGTIASFLSKYQDIIIEHQKVVKGNQKRLESLRELAGKENLEYPSVTLPPQPHTSEGVDAYNEVIARVRMWVNLNLWQKLKLSRDDAKPLLRLKGFPSFPLVERQANEVDWWDMVCNVKKLINEKKEDGKVFWQNLAGYKRQEALRPYLSSEEDRKKGKKFARYQLGDLLLHLEKKHGEDWGKVYDEAWERIDKKVEGLSKHIKLEEERRSEDAQSKAALTDWLRAKASFVIEGLKEADKDEFCRCELKLQKWYGDLRGKPFAIEAENSILDISGFSKQYNCAFIWQKDGVKKLNLYLIINYFKGGKLRFKKIKPEAFEANRFYTVINKKSGEIVPMEVNFNFDDPNLIILPLAFGKRQGREFIWNDLLSLETGSLQLANGRVIEKTLYNRRTRQDEPALFVALTFERREVLDSSNIKPMNLIGVDRGENIPAVIALTDPEGCPLSRFKDSLGNPTHILRIGESYKEKQRTIQAKKEVEQRRAGGYSRKYASKAKNLADDMVRNTARDLLYYAVTQDAMLIFENLSRGFGRQGKRTFMAERQYTRMEDWLTAKLAYEGLPSKTYLSKTLAQYTSKTCSNCGFTITSADYDRVLEKLKKTATGWMTTINGKELKVEGQITYYNRYKRQNVVKDLSVELDRLSEESVNNDISSWTKGRSGEALSLLKKRFSHRPVQEKFVCLNCGFETHADEQAALNIARSWLFLRSQEYKKYQTNKTTGNTDKRAFVETWQSFYRKKLKEVWKPAV

SEQ ID NO: 35783 - protein, 978 aa, synthetic construct
  REGION 1..978: note = engineered CasX variant
QEIKRINKIRRRLVKDSNTKKAGKTGPMKTLLVRVMTPDLRERLENLRKKPENIPQPISNTSRANLNKLLTDYTEMKKAILHVYWEEFQKDPVGLMSRVAQPASKKIDQNKLKPEMDEKGNLTTAGFACSQCGQPLFVYKLEQVSEKGKAYTNYFGRCNVAEHEKLIKLAQLKPEKDSDEAVTYSLGKFGQRALDFYSIHVTKESTHPVKPLAQIAGNRYASGPVGKALSDACMGTIASFLSKYQDIIIEHQKVVKGNQKRLESLRELAGKENLEYPSVTLPPQPHTSEGVDAYNEVIARVRMWVNLNLWQKLKLSRDDAKPLLRLKGFPSFPLVERQANEVDWWDMVCNVKKLINEKKEDGKVFWQNLAGYKRQEALRPYLSSEEDRKKGKKFARYQLGDLLLHLEKKHGEDWGKVYDEAWERIDKKVEGLSKHIKLEEERRSEDAQSKAALTDWLRAKASFVIEGLKEADKDEFCRCELKLQKWYGDLRGKPFAIEAENSILDISGFSKQYNCAFIWQKDGVKKLNLYLIINYFKGGKLRFKKIKPEAFEANRFYTVINKKSGEIVPMEVNFNFDDPNLIILPLAFGKRQGREFIWNDLLSLETGSLQLANGRVIEKTLYNRRTRQDEPALFVALTFERREVLDSSNIKPMNLIGVDRGENIPAVIALTDPEGCPLSRFKDSLGNPTHILRIGESYKEKQRTIQAKKEVEQRRAGGYSRKYASKAKNLADDMVRNTARDLLYYAVTQDAMLIFENLSRGFGRQGKRTFMAERQYTRMEDWLTAKLAYEGLPSKTYLSKTLAQYTSKTCSNCGFTITSADYDRVLEKLKKTATGWMTTINGKELKVEGQITYYNRYKRQNVVKDLSVELDRLSEESVNNDISSWTKGRSGEALSLLKKRFSHRPVQEKFVCLNCGFETHADEQAALNIARSWLFLRSQEYKKYQTNKTTGNTDKRAFVETWQSFYRKKLKEVWKPAV

SEQ ID NO: 35784 - protein, 977 aa, synthetic construct
  REGION 1..977: note = engineered CasX variant
QEIKRINKIRRRLVKDSNTKKAGKTGPMKTLLVRVMTPDLRERLENLRKKPENIPQPISNTSRANLNKLLTDYTEMKKAILHVYWEEFQKDPVGLMSRVAQPASKKIDQNKLKPEMDEKGNLTTAGFACSQCGQPLFVYKLEQVSEKGKAYTNYFGRCNVAEHEKLILLAQLKPEKDSDEAVTYSLGKFGQRALDFYSIHVTKESTHPVKPLAQIAGNRYASPVGKALSDACMGTIASFLSKYQDIIIEHQKVVKGNQKRLESLRELAGKENLEYPSVTLPPQPHTSEGVDAYNEVIARVRMWVNLNLWQKLKLSRDDAKPLLRLKGFPSFPLVERQANEVDWWDMVCNVKKLINEKKEDGKVFWQNLAGYKRQEALRPYLSSEEDRKKGKKFARYQLGDLLLHLEKKHGEDWGKVYDEAWERIDKKVEGLSKHIKLEEERRSEDAQSKAALTDWLRAKASFVIEGLKEADKDEFCRCELKLQKWYGDLRGKPFAIEAENSILDISGFSKQYNCAFIWQKDGVKKLNLYLIINYFKGGKLRFKKIKPEAFEANRFYTVINKKSGEIVPMEVNFNFDDPNLIILPLAFGKRQGREFIWNDLLSLETGSLQLANGRVIEKTLYNRRTRQDEPALFVALTFERREVLDSSNIKPMNLIGVDRGENIPAVIALTDPEGCPLSRFKDSLGNPTHILRIGESYKEKQRTIQAKKEVEQRRAGGYSRKYASKAKNLADDMVRNTARDLLYYAVTQDAMLIFENLSRGFGRQGKRTFMAERQYTRMEDWLTAKLAYEGLPSKTYLSKTLAQYTSKTCSNCGFTITSADYDRVLEKLKKTATGWMTTINGKELKVEGQITYYNRYKRQNVVKDLSVELDRLSEESVNNDISSWTKGRSGEALSLLKKRFSHRPVQEKFVCLNCGFETHADEQAALNIARSWLFLRSQEYKKYQTNKTTGNTDKRAFVETWQSFYRKKLKEVWKPAV

SEQ ID NO: 35785 - protein, 978 aa, synthetic construct
  REGION 1..978: note = engineered CasX variant
QEIKRINKIRRRLVKDSNTKKAGKTGPMKTLLVRVMTPDLRERLENLRKKPENIPQPISNTSRANLNKLLTDYTEMKKAILHVYWEEFQKDPVGLMSRVAQPASKKIDQNKLKPEMDEKGNLTTAGFACSQCGQPLFVYKLEQVSEKGKAYTNYFGRCNVAEHEKLILLAQLKPEKDSDEAVTYSLGKFGQRALDFYSIHVTKESTHPVKPLAQIAGNRYASYPVGKALSDACMGTIASFLSKYQDIIIEHQKVVKGNQKRLESLRELAGKENLEYPSVTLPPQPHTKEGLDAYNEVIARVRTWVNLNLWQKLKLSRDDAKPLLRLKGFPSFPLVERQANEVDWWDMVCNVKKLINEKKEDGKVFWQNLAGYKRQEALRPYLSSEEDRKKGKKFARYQLGDLLLHLEKKHGEDWGKVYDEAWERIDKKVEGLSKHIKLEEERRSEDAQSKAALTDWLRAKASFVIEGLKEADKDEFCRCELKLQKWYGDLRGKPFAIEAENSILDISGFSKQYNCAFIWQKDGVKKLNLYLIINYFKGGKLRFKKIKPEAFEANRFYTVINKKSGEIVPMEVNFNFDDPNLIILPLAFGKRQGREFIWNDLLSLETGSLKLANGRVIEKTLYNRRTRQDEPALFVALTFERREVLDSSNIKPMNLIGVDRGENIPAVIALTDPEGCPLSRFKDSLGNPTHILRIGESYKEKQRTIQAKKEVEQRRAGGYSRKYASKAKNLADDMVRNTARDLLYYAVTQDAMLIFENLSRGFGRQGKRTFMAERQYTRMEDWLTAKLAYEGLPSKTYLSKTLAQYTSKTCSNCGFTITSADYDRVLEKLKKTATGWMTTINGKELKVEGQITYYNRYKRQNVVKDLSVELDRLSEESVNNDISSWTKGRSGEALSLLKKRFSHRPVQEKFVCLNCGFETHADEQAALNIARSWLFLRSQEYKKYQTNKTTGNTDKRAFVETWQSFYRKKLKEVWKPAV

SEQ ID NO: 35786 - protein, 978 aa, synthetic construct
  REGION 1..978: note = engineered CasX variant
QEIKRINKIRRRLVKDSNTKKAGKTGPMKTLLVRVMTPDLRERLENLRKKPENIPQPISNTSRANLNKLLTDYTEMKKAILHVYWEEFQKDPVGLMSRVAQPASKKIDQNKLKPEMDEKGNLTTAGFACSQCGQPLFVYKLEQVSEKGKAYTNYFGRCNVAEHEKLILLAQLKPEKDSDEAVTYSLGKFGQRALDFYSIHVTKESTHPVKPLAQIAGNRYASHPVGKALSDACMGTIASFLSKYQDIIIEHQKVVKGNQKRLESLRELAGKENLEYPSVTLPPQPHTKEGLDAYNEVIARVRTWVNLNLWQKLKLSRDDAKPLLRLKGFPSFPLVERQANEVDWWDMVCNVKKLINEKKEDGKVFWQNLAGYKRQEALRPYLSSEEDRKKGKKFARYQLGDLLLHLEKKHGEDWGKVYDEAWERIDKKVEGLSKHIKLEEERRSEDAQSKAALTDWLRAKASFVIEGLKEADKDEFCRCELKLQKWYGDLRGKPFAIEAENSILDISGFSKQYNCAFIWQKDGVKKLNLYLIINYFKGGKLRFKKIKPEAFEANRFYTVINKKSGEIVPMEVNFNFDDPNLIILPLAFGKRQGREFIWNDLLSLETGSLKLANGRVIEKTLYNRRTRQDEPALFVALTFERREVLDSSNIKPMNLIGVDRGENIPAVIALTDPEGCPLSRFKDSLGNPTHILRIGESYKEKQRTIQAKKEVEQRRAGGYSRKYASKAKNLADDMVRNTARDLLYYAVTQDAMLIFENLSRGFGRQGKRTFMAERQYTRMEDWLTAKLAYEGLPSKTYLSKTLAQYTSKTCSNCGFTITSADYDRVLEKLKKTATGWMTTINGKELKVEGQITYYNRYKRQNVVKDLSVELDRLSEESVNNDISSWTKGRSGEALSLLKKRFSHRPVQEKFVCLNCGFETHADEQAALNIARSWLFLRSQEYKKYQTNKTTGNTDKRAFVETWQSFYRKKLKEVWKPAV

SEQ ID NO: 35787 - protein, 978 aa, synthetic construct
  REGION 1..978: note = engineered CasX variant
QEIKRINKIRRRLVKDSNTKKAGKTGPMKTLLVRVMTPDLRERLENLRKKPENIPQPISNTSRANLNKLLTDYTEMKKAILHVYWEEFQKDPVGLMSRVAQPASKKIDQNKLKPEMDEKGNLTTAGFACSQCGQPLFVYKLEQVSEKGKAYTNYFGRCNVAEHEKLILLAQLKPEKDSDEAVTYSLGKFGQRALDFYSIHVTKESTHPVKPLAQIAGNRYASSPVGKALSDACMGTIASFLSKYQDIIIEHQKVVKGNQKRLESLRELAGKENLEYPSVTLPPQPHTKEGLDAYNEVIARVRTWVNLNLWQKLKLSRDDAKPLLRLKGFPSFPLVERQANEVDWWDMVCNVKKLINEKKEDGKVFWQNLAGYKRQEALRPYLSSEEDRKKGKKFARYQLGDLLLHLEKKHGEDWGKVYDEAWERIDKKVEGLSKHIKLEEERRSEDAQSKAALTDWLRAKASFVIEGLKEADKDEFCRCELKLQKWYGDLRGKPFAIEAENSILDISGFSKQYNCAFIWQKDGVKKLNLYLIINYFKGGKLRFKKIKPEAFEANRFYTVINKKSGEIVPMEVNFNFDDPNLIILPLAFGKRQGREFIWNDLLSLETGSLKLANGRVIEKTLYNRRTRQDEPALFVALTFERREVLDSSNIKPMNLIGVDRGENIPAVIALTDPEGCPLSRFKDSLGNPTHILRIGESYKEKQRTIQAKKEVEQRRAGGYSRKYASKAKNLADDMVRNTARDLLYYAVTQDAMLIFENLSRGFGRQGKRTFMAERQYTRMEDWLTAKLAYEGLPSKTYLSKTLAQYTSKTCSNCGFTITSADYDRVLEKLKKTATGWMTTINGKELKVEGQITYYNRYKRQNVVKDLSVELDRLSEESVNNDISSWTKGRSGEALSLLKKRFSHRPVQEKFVCLNCGFETHADEQAALNIARSWLFLRSQEYKKYQTNKTTGNTDKRAFVETWQSFYRKKLKEVWKPAV

SEQ ID NO: 35788 - protein, 978 aa, synthetic construct
  REGION 1..978: note = engineered CasX variant
QEIKRINKIRRRLVKDSNTKKAGKTGPMKTLLVRVMTPDLRERLENLRKKPENIPQPISNTSRANLNKLLTDYTEMKKAILHVYWEEFQKDPVGLMSRVAQPASKKIDQNKLKPEMDEKGNLTTAGFACSQCGQPLFVYKLEQVSEKGKAYTNYFGRCNVAEHEKLILLAQLKPEKDSDEAVTYSLGKFGQRALDFYSIHVTKESTHPVKPLAQIAGNRYASTPVGKALSDACMGTIASFLSKYQDIIIEHQKVVKGNQKRLESLRELAGKENLEYPSVTLPPQPHTKEGLDAYNEVIARVRTWVNLNLWQKLKLSRDDAKPLLRLKGFPSFPLVERQANEVDWWDMVCNVKKLINEKKEDGKVFWQNLAGYKRQEALRPYLSSEEDRKKGKKFARYQLGDLLLHLEKKHGEDWGKVYDEAWERIDKKVEGLSKHIKLEEERRSEDAQSKAALTDWLRAKASFVIEGLKEADKDEFCRCELKLQKWYGDLRGKPFAIEAENSILDISGFSKQYNCAFIWQKDGVKKLNLYLIINYFKGGKLRFKKIKPEAFEANRFYTVINKKSGEIVPMEVNFNFDDPNLIILPLAFGKRQGREFIWNDLLSLETGSLKLANGRVIEKTLYNRRTRQDEPALFVALTFERREVLDSSNIKPMNLIGVDRGENIPAVIALTDPEGCPLSRFKDSLGNPTHILRIGESYKEKQRTIQAKKEVEQRRAGGYSRKYASKAKNLADDMVRNTARDLLYYAVTQDAMLIFENLSRGFGRQGKRTFMAERQYTRMEDWLTAKLAYEGLPSKTYLSKTLAQYTSKTCSNCGFTITSADYDRVLEKLKKTATGWMTTINGKELKVEGQITYYNRYKRQNVVKDLSVELDRLSEESVNNDISSWTKGRSGEALSLLKKRFSHRPVQEKFVCLNCGFETHADEQAALNIARSWLFLRSQEYKKYQTNKTTGNTDKRAFVETWQSFYRKKLKEVWKPAV

SEQ ID NO: 35789 - protein, 978 aa, synthetic construct
  REGION 1..978: note = engineered CasX variant
QEIKRINKIRRRLVKDSNTKKAGKTGPMKTLLVRVMTPDLRERLENLRKKPENIPQPISNTSRANLNKLLTDYTEMKKAILHVYWEEFQKDPVGLMSRVAQPASKKIDQNKLKPEMDEKGNLTTAGFACSQCGQPLFVYKLEQVSEKGKAYTNYFGRCNVAEHEKLILLAQLKPEKDSDEAVTYSLGKFGQRALDFYSIHVTKESTHPVKPLAQIAGNRYASAPVGKALSDACMGTIASFLSKYQDIIIEHQKVVKGNQKRLESLRELAGKENLEYPSVTLPPQPHTKEGLDAYNEVIARVRTWVNLNLWQKLKLSRDDAKPLLRLKGFPSFPLVERQANEVDWWDMVCNVKKLINEKKEDGKVFWQNLAGYKRQEALRPYLSSEEDRKKGKKFARYQLGDLLLHLEKKHGEDWGKVYDEAWERIDKKVEGLSKHIKLEEERRSEDAQSKAALTDWLRAKASFVIEGLKEADKDEFCRCELKLQKWYGDLRGKPFAIEAENSILDISGFSKQYNCAFIWQKDGVKKLNLYLIINYFKGGKLRFKKIKPEAFEANRFYTVINKKSGEIVPMEVNFNFDDPNLIILPLAFGKRQGREFIWNDLLSLETGSLKLANGRVIEKTLYNRRTRQDEPALFVALTFERREVLDSSNIKPMNLIGVDRGENIPAVIALTDPEGCPLSRFKDSLGNPTHILRIGESYKEKQRTIQAKKEVEQRRAGGYSRKYASKAKNLADDMVRNTARDLLYYAVTQDAMLIFENLSRGFGRQGKRTFMAERQYTRMEDWLTAKLAYEGLPSKTYLSKTLAQYTSKTCSNCGFTITSADYDRVLEKLKKTATGWMTTINGKELKVEGQITYYNRYKRQNVVKDLSVELDRLSEESVNNDISSWTKGRSGEALSLLKKRFSHRPVQEKFVCLNCGFETHADEQAALNIARSWLFLRSQEYKKYQTNKTTGNTDKRAFVETWQSFYRKKLKEVWKPAV

SEQ ID NO: 35790 - protein, 978 aa, synthetic construct
  REGION 1..978: note = engineered CasX variant
QEIKRINKIRRRLVKDSNTKKAGKTGPMKTLLVRVMTPDLRERLENLRKKPENIPQPISNTSRANLNKLLTDYTEMKKAILHVYWEEFQKDPVGLMSRVAQPASKKIDQNKLKPEMDEKGNLTTAGFACSQCGQPLFVYKLEQVSEKGKAYTNYFGRCNVAEHEKLILLAQLKPEKDSDEAVTYSLGKFGQRALDFYSIHVTKESTHPVKPLAQIAGNRYASVPVGKALSDACMGTIASFLSKYQDIIIEHQKVVKGNQKRLESLRELAGKENLEYPSVTLPPQPHTKEGLDAYNEVIARVRTWVNLNLWQKLKLSRDDAKPLLRLKGFPSFPLVERQANEVDWWDMVCNVKKLINEKKEDGKVFWQNLAGYKRQEALRPYLSSEEDRKKGKKFARYQLGDLLLHLEKKHGEDWGKVYDEAWERIDKKVEGLSKHIKLEEERRSEDAQSKAALTDWLRAKASFVIEGLKEADKDEFCRCELKLQKWYGDLRGKPFAIEAENSILDISGFSKQYNCAFIWQKDGVKKLNLYLIINYFKGGKLRFKKIKPEAFEANRFYTVINKKSGEIVPMEVNFNFDDPNLIILPLAFGKRQGREFIWNDLLSLETGSLKLANGRVIEKTLYNRRTRQDEPALFVALTFERREVLDSSNIKPMNLIGVDRGENIPAVIALTDPEGCPLSRFKDSLGNPTHILRIGESYKEKQRTIQAKKEVEQRRAGGYSRKYASKAKNLADDMVRNTARDLLYYAVTQDAMLIFENLSRGFGRQGKRTFMAERQYTRMEDWLTAKLAYEGLPSKTYLSKTLAQYTSKTCSNCGFTITSADYDRVLEKLKKTATGWMTTINGKELKVEGQITYYNRYKRQNVVKDLSVELDRLSEESVNNDISSWTKGRSGEALSLLKKRFSHRPVQEKFVCLNCGFETHADEQAALNIARSWLFLRSQEYKKYQTNKTTGNTDKRAFVETWQSFYRKKLKEVWKPAV

SEQ ID NO: 35791 - protein, 978 aa, synthetic construct
  REGION 1..978: note = engineered CasX variant
QEIKRINKIRRRLVKDSNTKKAGKTGPMKTLLVRVMTPDLRERLENLRKKPENIPQPISNTSRANLNKLLTDYTEMKKAILHVYWEEFQKDPVGLMSRVAQPASKKIDQNKLKPEMDEKGNLTTAGFACSQCGQPLFVYKLEQVSEKGKAYTNYFGRCNVAEHEKLIKLAQLKPEKDSDEAVTYSLGKFGQRALDFYSIHVTKESTHPVKPLAQIAGNRYASGPVGKALSDACMGTIASFLSKYQDIIIEHQKVVKGNQKRLESLRELAGKENLEYPSVTLPPQPHTKEGLDAYNEVIARVRTWVNLNLWQKLKLSRDDAKPLLRLKGFPSFPLVERQANEVDWWDMVCNVKKLINEKKEDGKVFWQNLAGYKRQEALRPYLSSEEDRKKGKKFARYQLGDLLLHLEKKHGEDWGKVYDEAWERIDKKVEGLSKHIKLEEERRSEDAQSKAALTDWLRAKASFVIEGLKEADKDEFCRCELKLQKWYGDLRGKPFAIEAENSILDISGFSKQYNCAFIWQKDGVKKLNLYLIINYFKGGKLRFKKIKPEAFEANRFYTVINKKSGEIVPMEVNFNFDDPNLIILPLAFGKRQGREFIWNDLLSLETGSLKLANGRVIEKTLYNRRTRQDEPALFVALTFERREVLDSSNIKPMNLIGVDRGENIPAVIALTDPEGCPLSRFKDSLGNPTHILRIGESYKEKQRTIQAKKEVEQRRAGGYSRKYASKAKNLADDMVRNTARDLLYYAVTQDAMLIFENLSRGFGRQGKRTFMAERQYTRMEDWLTAKLAYEGLPSKTYLSKTLAQYTSKTCSNCGFTITSADYDRVLEKLKKTATGWMTTINGKELKVEGQITYYNRYKRQNVVKDLSVELDRLSEESVNNDISSWTKGRSGEALSLLKKRFSHRPVQEKFVCLNCGFETHADEQAALNIARSWLFLRSQEYKKYQTNKTTGNTDKRAFVETWQSFYRKKLKEVWKPAV

SEQ ID NO: 35792 - protein, 977 aa, synthetic construct
  REGION 1..977: note = engineered CasX variant
QEIKRINKIRRRLVKDSNTKKAGKTGPMKTLLVRVMTPDLRERLENLRKKPENIPQPISNTSRANLNKLLTDYTEMKKAILHVYWEEFQKDPVGLMSRVAQPASKKIDQNKLKPEMDEKGNLTTAGFACSQCGQPLFVYKLEQVSEKGKAYTNYFGRCNVAEHEKLILLAQLKPEKDSDEAVTYSLGKFGQRALDFYSIHVTKESTHPVKPLAQIAGNRYASPVGKALSDACMGTIASFLSKYQDIIIEHQKVVKGNQKRLESLRELAGKENLEYPSVTLPPQPHTKEGLDAYNEVIARVRTWVNLNLWQKLKLSRDDAKPLLRLKGFPSFPLVERQANEVDWWDMVCNVKKLINEKKEDGKVFWQNLAGYKRQEALRPYLSSEEDRKKGKKFARYQLGDLLLHLEKKHGEDWGKVYDEAWERIDKKVEGLSKHIKLEEERRSEDAQSKAALTDWLRAKASFVIEGLKEADKDEFCRCELKLQKWYGDLRGKPFAIEAENSILDISGFSKQYNCAFIWQKDGVKKLNLYLIINYFKGGKLRFKKIKPEAFEANRFYTVINKKSGEIVPMEVNFNFDDPNLIILPLAFGKRQGREFIWNDLLSLETGSLKLANGRVIEKTLYNRRTRQDEPALFVALTFERREVLDSSNIKPMNLIGVDRGENIPAVIALTDPEGCPLSRFKDSLGNPTHILRIGESYKEKQRTIQAKKEVEQRRAGGYSRKYASKAKNLADDMVRNTARDLLYYAVTQDAMLIFENLSRGFGRQGKRTFMAERQYTRMEDWLTAKLAYEGLPSKTYLSKTLAQYTSKTCSNCGFTITSADYDRVLEKLKKTATGWMTTINGKELKVEGQITYYNRYKRQNVVKDLSVELDRLSEESVNNDISSWTKGRSGEALSLLKKRFSHRPVQEKFVCLNCGFETHADEQAALNIARSWLFLRSQEYKKYQTNKTTGNTDKRAFVETWQSFYRKKLKEVWKPAV

SEQ ID NO: 35793 - protein, 978 aa, synthetic construct
  REGION 1..978: note = engineered CasX variant
QEIKRINKIRRRLVKDSNTKKAGKTGPMKTLLVRVMTPDLRERLENLRKKPENIPQPISNTSRANLNKLLTDYTEMKKAILHVYWEEFQKDPVGLMSRVAQPASKKIDQNKLKPEMDEKGNLTTAGFACSQCGQPLFVYKLEQVSEKGKAYTNYFGRCNVAEHEKLILLAQLKPEKDSDEAVTYSLGKFGQRALDFYSIHVTKESTHPVKPLAQIAGNRYASYPVGKALSDACMGTIASFLSKYQDIIIEHQKVVKGNQKRLESLRELAGKENLEYPSVTLPPQPHTKEGLDAYNEVIARVRWWVNLNLWQKLKLSRDDAKPLLRLKGFPSFPLVERQANEVDWWDMVCNVKKLINEKKEDGKVFWQNLAGYKRQEALRPYLSSEEDRKKGKKFARYQLGDLLLHLEKKHGEDWGKVYDEAWERIDKKVEGLSKHIKLEEERRSEDAQSKAALTDWLRAKASFVIEGLKEADKDEFCRCELKLQKWYGDLRGKPFAIEAENSILDISGFSKQYNCAFIWQKDGVKKLNLYLIINYFKGGKLRFKKIKPEAFEANRFYTVINKKSGEIVPMEVNFNFDDPNLIILPLAFGKRQGREFIWNDLLSLETGSLKLANGRVIEKTLYNRRTRQDEPALFVALTFERREVLDSSNIKPMNLIGVDRGENIPAVIALTDPEGCPLSRFKDSLGNPTHILRIGESYKEKQRTIQAKKEVEQRRAGGYSRKYASKAKNLADDMVRNTARDLLYYAVTQDAMLIFENLSRGFGRQGKRTFMAERQYTRMEDWLTAKLAYEGLPSKTYLSKTLAQYTSKTCSNCGFTITSADYDRVLEKLKKTATGWMTTINGKELKVEGQITYYNRYKRQNVVKDLSVELDRLSEESVNNDISSWTKGRSGEALSLLKKRFSHRPVQEKFVCLNCGFETHADEQAALNIARSWLFLRSQEYKKYQTNKTTGNTDKRAFVETWQSFYRKKLKEVWKPAV

SEQ ID NO: 35794 - protein, 978 aa, synthetic construct
  REGION 1..978: note = engineered CasX variant
QEIKRINKIRRRLVKDSNTKKAGKTGPMKTLLVRVMTPDLRERLENLRKKPENIPQPISNTSRANLNKLLTDYTEMKKAILHVYWEEFQKDPVGLMSRVAQPASKKIDQNKLKPEMDEKGNLTTAGFACSQCGQPLFVYKLEQVSEKGKAYTNYFGRCNVAEHEKLILLAQLKPEKDSDEAVTYSLGKFGQRALDFYSIHVTKESTHPVKPLAQIAGNRYASHPVGKALSDACMGTIASFLSKYQDIIIEHQKVVKGNQKRLESLRELAGKENLEYPSVTLPPQPHTKEGLDAYNEVIARVRWWVNLNLWQKLKLSRDDAKPLLRLKGFPSFPLVERQANEVDWWDMVCNVKKLINEKKEDGKVFWQNLAGYKRQEALRPYLSSEEDRKKGKKFARYQLGDLLLHLEKKHGEDWGKVYDEAWERIDKKVEGLSKHIKLEEERRSEDAQSKAALTDWLRAKASFVIEGLKEADKDEFCRCELKLQKWYGDLRGKPFAIEAENSILDISGFSKQYNCAFIWQKDGVKKLNLYLIINYFKGGKLRFKKIKPEAFEANRFYTVINKKSGEIVPMEVNFNFDDPNLIILPLAFGKRQGREFIWNDLLSLETGSLKLANGRVIEKTLYNRRTRQDEPALFVALTFERREVLDSSNIKPMNLIGVDRGENIPAVIALTDPEGCPLSRFKDSLGNPTHILRIGESYKEKQRTIQAKKEVEQRRAGGYSRKYASKAKNLADDMVRNTARDLLYYAVTQDAMLIFENLSRGFGRQGKRTFMAERQYTRMEDWLTAKLAYEGLPSKTYLSKTLAQYTSKTCSNCGFTITSADYDRVLEKLKKTATGWMTTINGKELKVEGQITYYNRYKRQNVVKDLSVELDRLSEESVNNDISSWTKGRSGEALSLLKKRFSHRPVQEKFVCLNCGFETHADEQAALNIARSWLFLRSQEYKKYQTNKTTGNTDKRAFVETWQSFYRKKLKEVWKPAV

SEQ ID NO: 35795 - protein, 978 aa, synthetic construct
  REGION 1..978: note = engineered CasX variant
QEIKRINKIRRRLVKDSNTKKAGKTGPMKTLLVRVMTPDLRERLENLRKKPENIPQPISNTSRANLNKLLTDYTEMKKAILHVYWEEFQKDPVGLMSRVAQPASKKIDQNKLKPEMDEKGNLTTAGFACSQCGQPLFVYKLEQVSEKGKAYTNYFGRCNVAEHEKLILLAQLKPEKDSDEAVTYSLGKFGQRALDFYSIHVTKESTHPVKPLAQIAGNRYASSPVGKALSDACMGTIASFLSKYQDIIIEHQKVVKGNQKRLESLRELAGKENLEYPSVTLPPQPHTKEGLDAYNEVIARVRWWVNLNLWQKLKLSRDDAKPLLRLKGFPSFPLVERQANEVDWWDMVCNVKKLINEKKEDGKVFWQNLAGYKRQEALRPYLSSEEDRKKGKKFARYQLGDLLLHLEKKHGEDWGKVYDEAWERIDKKVEGLSKHIKLEEERRSEDAQSKAALTDWLRAKASFVIEGLKEADKDEFCRCELKLQKWYGDLRGKPFAIEAENSILDISGFSKQYNCAFIWQKDGVKKLNLYLIINYFKGGKLRFKKIKPEAFEANRFYTVINKKSGEIVPMEVNFNFDDPNLIILPLAFGKRQGREFIWNDLLSLETGSLKLANGRVIEKTLYNRRTRQDEPALFVALTFERREVLDSSNIKPMNLIGVDRGENIPAVIALTDPEGCPLSRFKDSLGNPTHILRIGESYKEKQRTIQAKKEVEQRRAGGYSRKYASKAKNLADDMVRNTARDLLYYAVTQDAMLIFENLSRGFGRQGKRTFMAERQYTRMEDWLTAKLAYEGLPSKTYLSKTLAQYTSKTCSNCGFTITSADYDRVLEKLKKTATGWMTTINGKELKVEGQITYYNRYKRQNVVKDLSVELDRLSEESVNNDISSWTKGRSGEALSLLKKRFSHRPVQEKFVCLNCGFETHADEQAALNIARSWLFLRSQEYKKYQTNKTTGNTDKRAFVETWQSFYRKKLKEVWKPAV

SEQ ID NO: 35796 - protein, 978 aa, synthetic construct
  REGION 1..978: note = engineered CasX variant
QEIKRINKIRRRLVKDSNTKKAGKTGPMKTLLVRVMTPDLRERLENLRKKPENIPQPISNTSRANLNKLLTDYTEMKKAILHVYWEEFQKDPVGLMSRVAQPASKKIDQNKLKPEMDEKGNLTTAGFACSQCGQPLFVYKLEQVSEKGKAYTNYFGRCNVAEHEKLILLAQLKPEKDSDEAVTYSLGKFGQRALDFYSIHVTKESTHPVKPLAQIAGNRYASTPVGKALSDACMGTIASFLSKYQDIIIEHQKVVKGNQKRLESLRELAGKENLEYPSVTLPPQPHTKEGLDAYNEVIARVRWWVNLNLWQKLKLSRDDAKPLLRLKGFPSFPLVERQANEVDWWDMVCNVKKLINEKKEDGKVFWQNLAGYKRQEALRPYLSSEEDRKKGKKFARYQLGDLLLHLEKKHGEDWGKVYDEAWERIDKKVEGLSKHIKLEEERRSEDAQSKAALTDWLRAKASFVIEGLKEADKDEFCRCELKLQKWYGDLRGKPFAIEAENSILDISGFSKQYNCAFIWQKDGVKKLNLYLIINYFKGGKLRFKKIKPEAFEANRFYTVINKKSGEIVPMEVNFNFDDPNLIILPLAFGKRQGREFIWNDLLSLETGSLKLANGRVIEKTLYNRRTRQDEPALFVALTFERREVLDSSNIKPMNLIGVDRGENIPAVIALTDPEGCPLSRFKDSLGNPTHILRIGESYKEKQRTIQAKKEVEQRRAGGYSRKYASKAKNLADDMVRNTARDLLYYAVTQDAMLIFENLSRGFGRQGKRTFMAERQYTRMEDWLTAKLAYEGLPSKTYLSKTLAQYTSKTCSNCGFTITSADYDRVLEKLKKTATGWMTTINGKELKVEGQITYYNRYKRQNVVKDLSVELDRLSEESVNNDISSWTKGRSGEALSLLKKRFSHRPVQEKFVCLNCGFETHADEQAALNIARSWLFLRSQEYKKYQTNKTTGNTDKRAFVETWQSFYRKKLKEVWKPAV

SEQ ID NO: 35797 - protein, 978 aa, synthetic construct
  REGION 1..978: note = engineered CasX variant
QEIKRINKIRRRLVKDSNTKKAGKTGPMKTLLVRVMTPDLRERLENLRKKPENIPQPISNTSRANLNKLLTDYTEMKKAILHVYWEEFQKDPVGLMSRVAQPASKKIDQNKLKPEMDEKGNLTTAGFACSQCGQPLFVYKLEQVSEKGKAYTNYFGRCNVAEHEKLILLAQLKPEKDSDEAVTYSLGKFGQRALDFYSIHVTKESTHPVKPLAQIAGNRYASAPVGKALSDACMGTIASFLSKYQDIIIEHQKVVKGNQKRLESLRELAGKENLEYPSVTLPPQPHTKEGLDAYNEVIARVRWWVNLNLWQKLKLSRDDAKPLLRLKGFPSFPLVERQANEVDWWDMVCNVKKLINEKKEDGKVFWQNLAGYKRQEALRPYLSSEEDRKKGKKFARYQLGDLLLHLEKKHGEDWGKVYDEAWERIDKKVEGLSKHIKLEEERRSEDAQSKAALTDWLRAKASFVIEGLKEADKDEFCRCELKLQKWYGDLRGKPFAIEAENSILDISGFSKQYNCAFIWQKDGVKKLNLYLIINYFKGGKLRFKKIKPEAFEANRFYTVINKKSGEIVPMEVNFNFDDPNLIILPLAFGKRQGREFIWNDLLSLETGSLKLANGRVIEKTLYNRRTRQDEPALFVALTFERREVLDSSNIKPMNLIGVDRGENIPAVIALTDPEGCPLSRFKDSLGNPTHILRIGESYKEKQRTIQAKKEVEQRRAGGYSRKYASKAKNLADDMVRNTARDLLYYAVTQDAMLIFENLSRGFGRQGKRTFMAERQYTRMEDWLTAKLAYEGLPSKTYLSKTLAQYTSKTCSNCGFTITSADYDRVLEKLKKTATGWMTTINGKELKVEGQITYYNRYKRQNVVKDLSVELDRLSEESVNNDISSWTKGRSGEALSLLKKRFSHRPVQEKFVCLNCGFETHADEQAALNIARSWLFLRSQEYKKYQTNKTTGNTDKRAFVETWQSFYRKKLKEVWKPAV

SEQ ID NO: 35798 - protein, 978 aa, synthetic construct
  REGION 1..978: note = engineered CasX variant
QEIKRINKIRRRLVKDSNTKKAGKTGPMKTLLVRVMTPDLRERLENLRKKPENIPQPISNTSRANLNKLLTDYTEMKKAILHVYWEEFQKDPVGLMSRVAQPASKKIDQNKLKPEMDEKGNLTTAGFACSQCGQPLFVYKLEQVSEKGKAYTNYFGRCNVAEHEKLILLAQLKPEKDSDEAVTYSLGKFGQRALDFYSIHVTKESTHPVKPLAQIAGNRYASVPVGKALSDACMGTIASFLSKYQDIIIEHQKVVKGNQKRLESLRELAGKENLEYPSVTLPPQPHTKEGLDAYNEVIARVRWWVNLNLWQKLKLSRDDAKPLLRLKGFPSFPLVERQANEVDWWDMVCNVKKLINEKKEDGKVFWQNLAGYKRQEALRPYLSSEEDRKKGKKFARYQLGDLLLHLEKKHGEDWGKVYDEAWERIDKKVEGLSKHIKLEEERRSEDAQSKAALTDWLRAKASFVIEGLKEADKDEFCRCELKLQKWYGDLRGKPFAIEAENSILDISGFSKQYNCAFIWQKDGVKKLNLYLIINYFKGGKLRFKKIKPEAFEANRFYTVINKKSGEIVPMEVNFNFDDPNLIILPLAFGKRQGREFIWNDLLSLETGSLKLANGRVIEKTLYNRRTRQDEPALFVALTFERREVLDSSNIKPMNLIGVDRGENIPAVIALTDPEGCPLSRFKDSLGNPTHILRIGESYKEKQRTIQAKKEVEQRRAGGYSRKYASKAKNLADDMVRNTARDLLYYAVTQDAMLIFENLSRGFGRQGKRTFMAERQYTRMEDWLTAKLAYEGLPSKTYLSKTLAQYTSKTCSNCGFTITSADYDRVLEKLKKTATGWMTTINGKELKVEGQITYYNRYKRQNVVKDLSVELDRLSEESVNNDISSWTKGRSGEALSLLKKRFSHRPVQEKFVCLNCGFETHADEQAALNIARSWLFLRSQEYKKYQTNKTTGNTDKRAFVETWQSFYRKKLKEVWKPAV

SEQ ID NO: 35799 - protein, 978 aa, synthetic construct
  REGION 1..978: note = engineered CasX variant
QEIKRINKIRRRLVKDSNTKKAGKTGPMKTLLVRVMTPDLRERLENLRKKPENIPQPISNTSRANLNKLLTDYTEMKKAILHVYWEEFQKDPVGLMSRVAQPASKKIDQNKLKPEMDEKGNLTTAGFACSQCGQPLFVYKLEQVSEKGKAYTNYFGRCNVAEHEKLIKLAQLKPEKDSDEAVTYSLGKFGQRALDFYSIHVTKESTHPVKPLAQIAGNRYASGPVGKALSDACMGTIASFLSKYQDIIIEHQKVVKGNQKRLESLRELAGKENLEYPSVTLPPQPHTKEGLDAYNEVIARVRWWVNLNLWQKLKLSRDDAKPLLRLKGFPSFPLVERQANEVDWWDMVCNVKKLINEKKEDGKVFWQNLAGYKRQEALRPYLSSEEDRKKGKKFARYQLGDLLLHLEKKHGEDWGKVYDEAWERIDKKVEGLSKHIKLEEERRSEDAQSKAALTDWLRAKASFVIEGLKEADKDEFCRCELKLQKWYGDLRGKPFAIEAENSILDISGFSKQYNCAFIWQKDGVKKLNLYLIINYFKGGKLRFKKIKPEAFEANRFYTVINKKSGEIVPMEVNFNFDDPNLIILPLAFGKRQGREFIWNDLLSLETGSLKLANGRVIEKTLYNRRTRQDEPALFVALTFERREVLDSSNIKPMNLIGVDRGENIPAVIALTDPEGCPLSRFKDSLGNPTHILRIGESYKEKQRTIQAKKEVEQRRAGGYSRKYASKAKNLADDMVRNTARDLLYYAVTQDAMLIFENLSRGFGRQGKRTFMAERQYTRMEDWLTAKLAYEGLPSKTYLSKTLAQYTSKTCSNCGFTITSADYDRVLEKLKKTATGWMTTINGKELKVEGQITYYNRYKRQNVVKDLSVELDRLSEESVNNDISSWTKGRSGEALSLLKKRFSHRPVQEKFVCLNCGFETHADEQAALNIARSWLFLRSQEYKKYQTNKTTGNTDKRAFVETWQSFYRKKLKEVWKPAV

SEQ ID NO: 35800 - protein, 977 aa, synthetic construct
  REGION 1..977: note = engineered CasX variant
QEIKRINKIRRRLVKDSNTKKAGKTGPMKTLLVRVMTPDLRERLENLRKKPENIPQPISNTSRANLNKLLTDYTEMKKAILHVYWEEFQKDPVGLMSRVAQPASKKIDQNKLKPEMDEKGNLTTAGFACSQCGQPLFVYKLEQVSEKGKAYTNYFGRCNVAEHEKLILLAQLKPEKDSDEAVTYSLGKFGQRALDFYSIHVTKESTHPVKPLAQIAGNRYASPVGKALSDACMGTIASFLSKYQDIIIEHQKVVKGNQKRLESLRELAGKENLEYPSVTLPPQPHTKEGLDAYNEVIARVRWWVNLNLWQKLKLSRDDAKPLLRLKGFPSFPLVERQANEVDWWDMVCNVKKLINEKKEDGKVFWQNLAGYKRQEALRPYLSSEEDRKKGKKFARYQLGDLLLHLEKKHGEDWGKVYDEAWERIDKKVEGLSKHIKLEEERRSEDAQSKAALTDWLRAKASFVIEGLKEADKDEFCRCELKLQKWYGDLRGKPFAIEAENSILDISGFSKQYNCAFIWQKDGVKKLNLYLIINYFKGGKLRFKKIKPEAFEANRFYTVINKKSGEIVPMEVNFNFDDPNLIILPLAFGKRQGREFIWNDLLSLETGSLKLANGRVIEKTLYNRRTRQDEPALFVALTFERREVLDSSNIKPMNLIGVDRGENIPAVIALTDPEGCPLSRFKDSLGNPTHILRIGESYKEKQRTIQAKKEVEQRRAGGYSRKYASKAKNLADDMVRNTARDLLYYAVTQDAMLIFENLSRGFGRQGKRTFMAERQYTRMEDWLTAKLAYEGLPSKTYLSKTLAQYTSKTCSNCGFTITSADYDRVLEKLKKTATGWMTTINGKELKVEGQITYYNRYKRQNVVKDLSVELDRLSEESVNNDISSWTKGRSGEALSLLKKRFSHRPVQEKFVCLNCGFETHADEQAALNIARSWLFLRSQEYKKYQTNKTTGNTDKRAFVETWQSFYRKKLKEVWKPAV

SEQ ID NO: 35801 - protein, 979 aa, synthetic construct
  REGION 1..979: note = engineered CasX variant
QEIKRINKIRRRLVKDSNTKKAGKTGPMKTLLVRVMTPDLRERLENLRKKPENIPQPISNTSRANLNKLLTDYTEMKKAILHVYWEEFQKDPVGLMSRVAQPASKKIDQNKLKPEMDEKGNLTTAGFACSQCGQPLFVYKLEQVSEKGKAYTNYFGRCNVAEHEKLILLAQLKPEKDSDEAVTYSLGKFGQRALDFYSIHVTKESTHPVKPLAQIAGNRYASYPVGKALSDACMGTIASFLSKYQDIIIEHQKVVKGNQKRLESLRELAGKENLEYPSVTLPPQPHTKEGLDAYNEVIARVRMWVNLNLWQKLKLSRDDAKPLLRLKGFPSFPLVERQQANEVDWWDMVCNVKKLINEKKEDGKVFWQNLAGYKRQEALRPYLSSEEDRKKGKKFARYQLGDLLLHLEKKHGEDWGKVYDEAWERIDKKVEGLSKHIKLEEERRSEDAQSKAALTDWLRAKASFVIEGLKEADKDEFCRCELKLQKWYGDLRGKPFAIEAENSILDISGFSKQYNCAFIWQKDGVKKLNLYLIINYFKGGKLRFKKIKPEAFEANRFYTVINKKSGEIVPMEVNFNFDDPNLIILPLAFGKRQGREFIWNDLLSLETGSLKLANGRVIEKTLYNRRTRQDEPALFVALTFERREVLDSSNIKPMNLIGVDRGENIPAVIALTDPEGCPLSRFKDSLGNPTHILRIGESYKEKQRTIQAKKEVEQRRAGGYSRKYASKAKNLADDMVRNTARDLLYYAVTQDAMLIFENLSRGFGRQGKRTFMAERQYTRMEDWLTAKLAYEGLPSKTYLSKTLAQYTSKTCSNCGFTITSADYDRVLEKLKKTATGWMTTINGKELKVEGQITYYNRYKRQNVVKDLSVELDRLSEESVNNDISSWTKGRSGEALSLLKKRFSHRPVQEKFVCLNCGFETHADEQAALNIARSWLFLRSQEYKKYQTNKTTGNTDKRAFVETWQSFYRKKLKEVWKPAV

SEQ ID NO: 35802 - protein, 979 aa, synthetic construct
  REGION 1..979: note = engineered CasX variant
QEIKRINKIRRRLVKDSNTKKAGKTGPMKTLLVRVMTPDLRERLENLRKKPENIPQPISNTSRANLNKLLTDYTEMKKAILHVYWEEFQKDPVGLMSRVAQPASKKIDQNKLKPEMDEKGNLTTAGFACSQCGQPLFVYKLEQVSEKGKAYTNYFGRCNVAEHEKLILLAQLKPEKDSDEAVTYSLGKFGQRALDFYSIHVTKESTHPVKPLAQIAGNRYASHPVGKALSDACMGTIASFLSKYQDIIIEHQKVVKGNQKRLESLRELAGKENLEYPSVTLPPQPHTKEGLDAYNEVIARVRMWVNLNLWQKLKLSRDDAKPLLRLKGFPSFPLVERQQANEVDWWDMVCNVKKLINEKKEDGKVFWQNLAGYKRQEALRPYLSSEEDRKKGKKFARYQLGDLLLHLEKKHGEDWGKVYDEAWERIDKKVEGLSKHIKLEEERRSEDAQSKAALTDWLRAKASFVIEGLKEADKDEFCRCELKLQKWYGDLRGKPFAIEAENSILDISGFSKQYNCAFIWQKDGVKKLNLYLIINYFKGGKLRFKKIKPEAFEANRFYTVINKKSGEIVPMEVNFNFDDPNLIILPLAFGKRQGREFIWNDLLSLETGSLKLANGRVIEKTLYNRRTRQDEPALFVALTFERREVLDSSNIKPMNLIGVDRGENIPAVIALTDPEGCPLSRFKDSLGNPTHILRIGESYKEKQRTIQAKKEVEQRRAGGYSRKYASKAKNLADDMVRNTARDLLYYAVTQDAMLIFENLSRGFGRQGKRTFMAERQYTRMEDWLTAKLAYEGLPSKTYLSKTLAQYTSKTCSNCGFTITSADYDRVLEKLKKTATGWMTTINGKELKVEGQITYYNRYKRQNVVKDLSVELDRLSEESVNNDISSWTKGRSGEALSLLKKRFSHRPVQEKFVCLNCGFETHADEQAALNIARSWLFLRSQEYKKYQTNKTTGNTDKRAFVETWQSFYRKKLKEVWKPAV

SEQ ID NO: 35803 - protein, 979 aa, synthetic construct
  REGION 1..979: note = engineered CasX variant
QEIKRINKIRRRLVKDSNTKKAGKTGPMKTLLVRVMTPDLRERLENLRKKPENIPQPISNTSRANLNKLLTDYTEMKKAILHVYWEEFQKDPVGLMSRVAQPASKKIDQNKLKPEMDEKGNLTTAGFACSQCGQPLFVYKLEQVSEKGKAYTNYFGRCNVAEHEKLILLAQLKPEKDSDEAVTYSLGKFGQRALDFYSIHVTKESTHPVKPLAQIAGNRYASSPVGKALSDACMGTIASFLSKYQDIIIEHQKVVKGNQKRLESLRELAGKENLEYPSVTLPPQPHTKEGLDAYNEVIARVRMWVNLNLWQKLKLSRDDAKPLLRLKGFPSFPLVERQQANEVDWWDMVCNVKKLINEKKEDGKVFWQNLAGYKRQEALRPYLSSEEDRKKGKKFARYQLGDLLLHLEKKHGEDWGKVYDEAWERIDKKVEGLSKHIKLEEERRSEDAQSKAALTDWLRAKASFVIEGLKEADKDEFCRCELKLQKWYGDLRGKPFAIEAENSILDISGFSKQYNCAFIWQKDGVKKLNLYLIINYFKGGKLRFKKIKPEAFEANRFYTVINKKSGEIVPMEVNFNFDDPNLIILPLAFGKRQGREFIWNDLLSLETGSLKLANGRVIEKTLYNRRTRQDEPALFVALTFERREVLDSSNIKPMNLIGVDRGENIPAVIALTDPEGCPLSRFKDSLGNPTHILRIGESYKEKQRTIQAKKEVEQRRAGGYSRKYASKAKNLADDMVRNTARDLLYYAVTQDAMLIFENLSRGFGRQGKRTFMAERQYTRMEDWLTAKLAYEGLPSKTYLSKTLAQYTSKTCSNCGFTITSADYDRVLEKLKKTATGWMTTINGKELKVEGQITYYNRYKRQNVVKDLSVELDRLSEESVNNDISSWTKGRSGEALSLLKKRFSHRPVQEKFVCLNCGFETHADEQAALNIARSWLFLRSQEYKKYQTNKTTGNTDKRAFVETWQSFYRKKLKEVWKPAV

SEQ ID NO: 35804 - protein, 979 aa, synthetic construct
  REGION 1..979: note = engineered CasX variant
QEIKRINKIRRRLVKDSNTKKAGKTGPMKTLLVRVMTPDLRERLENLRKKPENIPQPISNTSRANLNKLLTDYTEMKKAILHVYWEEFQKDPVGLMSRVAQPASKKIDQNKLKPEMDEKGNLTTAGFACSQCGQPLFVYKLEQVSEKGKAYTNYFGRCNVAEHEKLILLAQLKPEKDSDEAVTYSLGKFGQRALDFYSIHVTKESTHPVKPLAQIAGNRYASTPVGKALSDACMGTIASFLSKYQDIIIEHQKVVKGNQKRLESLRELAGKENLEYPSVTLPPQPHTKEGLDAYNEVIARVRMWVNLNLWQKLKLSRDDAKPLLRLKGFPSFPLVERQQANEVDWWDMVCNVKKLINEKKEDGKVFWQNLAGYKRQEALRPYLSSEEDRKKGKKFARYQLGDLLLHLEKKHGEDWGKVYDEAWERIDKKVEGLSKHIKLEEERRSEDAQSKAALTDWLRAKASFVIEGLKEADKDEFCRCELKLQKWYGDLRGKPFAIEAENSILDISGFSKQYNCAFIWQKDGVKKLNLYLIINYFKGGKLRFKKIKPEAFEANRFYTVINKKSGEIVPMEVNFNFDDPNLIILPLAFGKRQGREFIWNDLLSLETGSLKLANGRVIEKTLYNRRTRQDEPALFVALTFERREVLDSSNIKPMNLIGVDRGENIPAVIALTDPEGCPLSRFKDSLGNPTHILRIGESYKEKQRTIQAKKEVEQRRAGGYSRKYASKAKNLADDMVRNTARDLLYYAVTQDAMLIFENLSRGFGRQGKRTFMAERQYTRMEDWLTAKLAYEGLPSKTYLSKTLAQYTSKTCSNCGFTITSADYDRVLEKLKKTATGWMTTINGKELKVEGQITYYNRYKRQNVVKDLSVELDRLSEESVNNDISSWTKGRSGEALSLLKKRFSHRPVQEKFVCLNCGFETHADEQAALNIARSWLFLRSQEYKKYQTNKTTGNTDKRAFVETWQSFYRKKLKEVWKPAV

SEQ ID NO: 35805 - protein, 979 aa, synthetic construct
  REGION 1..979: note = engineered CasX variant
QEIKRINKIRRRLVKDSNTKKAGKTGPMKTLLVRVMTPDLRERLENLRKKPENIPQPISNTSRANLNKLLTDYTEMKKAILHVYWEEFQKDPVGLMSRVAQPASKKIDQNKLKPEMDEKGNLTTAGFACSQCGQPLFVYKLEQVSEKGKAYTNYFGRCNVAEHEKLILLAQLKPEKDSDEAVTYSLGKFGQRALDFYSIHVTKESTHPVKPLAQIAGNRYASAPVGKALSDACMGTIASFLSKYQDIIIEHQKVVKGNQKRLESLRELAGKENLEYPSVTLPPQPHTKEGLDAYNEVIARVRMWVNLNLWQKLKLSRDDAKPLLRLKGFPSFPLVERQQANEVDWWDMVCNVKKLINEKKEDGKVFWQNLAGYKRQEALRPYLSSEEDRKKGKKFARYQLGDLLLHLEKKHGEDWGKVYDEAWERIDKKVEGLSKHIKLEEERRSEDAQSKAALTDWLRAKASFVIEGLKEADKDEFCRCELKLQKWYGDLRGKPFAIEAENSILDISGFSKQYNCAFIWQKDGVKKLNLYLIINYFKGGKLRFKKIKPEAFEANRFYTVINKKSGEIVPMEVNFNFDDPNLIILPLAFGKRQGREFIWNDLLSLETGSLKLANGRVIEKTLYNRRTRQDEPALFVALTFERREVLDSSNIKPMNLIGVDRGENIPAVIALTDPEGCPLSRFKDSLGNPTHILRIGESYKEKQRTIQAKKEVEQRRAGGYSRKYASKAKNLADDMVRNTARDLLYYAVTQDAMLIFENLSRGFGRQGKRTFMAERQYTRMEDWLTAKLAYEGLPSKTYLSKTLAQYTSKTCSNCGFTITSADYDRVLEKLKKTATGWMTTINGKELKVEGQITYYNRYKRQNVVKDLSVELDRLSEESVNNDISSWTKGRSGEALSLLKKRFSHRPVQEKFVCLNCGFETHADEQAALNIARSWLFLRSQEYKKYQTNKTTGNTDKRAFVETWQSFYRKKLKEVWKPAV

SEQ ID NO: 35806 - protein, 979 aa, synthetic construct
  REGION 1..979: note = engineered CasX variant
QEIKRINKIRRRLVKDSNTKKAGKTGPMKTLLVRVMTPDLRERLENLRKKPENIPQPISNTSRANLNKLLTDYTEMKKAILHVYWEEFQKDPVGLMSRVAQPASKKIDQNKLKPEMDEKGNLTTAGFACSQCGQPLFVYKLEQVSEKGKAYTNYFGRCNVAEHEKLILLAQLKPEKDSDEAVTYSLGKFGQRALDFYSIHVTKESTHPVKPLAQIAGNRYASVPVGKALSDACMGTIASFLSKYQDIIIEHQKVVKGNQKRLESLRELAGKENLEYPSVTLPPQPHTKEGLDAYNEVIARVRMWVNLNLWQKLKLSRDDAKPLLRLKGFPSFPLVERQQANEVDWWDMVCNVKKLINEKKEDGKVFWQNLAGYKRQEALRPYLSSEEDRKKGKKFARYQLGDLLLHLEKKHGEDWGKVYDEAWERIDKKVEGLSKHIKLEEERRSEDAQSKAALTDWLRAKASFVIEGLKEADKDEFCRCELKLQKWYGDLRGKPFAIEAENSILDISGFSKQYNCAFIWQKDGVKKLNLYLIINYFKGGKLRFKKIKPEAFEANRFYTVINKKSGEIVPMEVNFNFDDPNLIILPLAFGKRQGREFIWNDLLSLETGSLKLANGRVIEKTLYNRRTRQDEPALFVALTFERREVLDSSNIKPMNLIGVDRGENIPAVIALTDPEGCPLSRFKDSLGNPTHILRIGESYKEKQRTIQAKKEVEQRRAGGYSRKYASKAKNLADDMVRNTARDLLYYAVTQDAMLIFENLSRGFGRQGKRTFMAERQYTRMEDWLTAKLAYEGLPSKTYLSKTLAQYTSKTCSNCGFTITSADYDRVLEKLKKTATGWMTTINGKELKVEGQITYYNRYKRQNVVKDLSVELDRLSEESVNNDISSWTKGRSGEALSLLKKRFSHRPVQEKFVCLNCGFETHADEQAALNIARSWLFLRSQEYKKYQTNKTTGNTDKRAFVETWQSFYRKKLKEVWKPAV

SEQ ID NO: 35807 - protein, 979 aa, synthetic construct
  REGION 1..979: note = engineered CasX variant
QEIKRINKIRRRLVKDSNTKKAGKTGPMKTLLVRVMTPDLRERLENLRKKPENIPQPISNTSRANLNKLLTDYTEMKKAILHVYWEEFQKDPVGLMSRVAQPASKKIDQNKLKPEMDEKGNLTTAGFACSQCGQPLFVYKLEQVSEKGKAYTNYFGRCNVAEHEKLIKLAQLKPEKDSDEAVTYSLGKFGQRALDFYSIHVTKESTHPVKPLAQIAGNRYASGPVGKALSDACMGTIASFLSKYQDIIIEHQKVVKGNQKRLESLRELAGKENLEYPSVTLPPQPHTKEGLDAYNEVIARVRMWVNLNLWQKLKLSRDDAKPLLRLKGFPSFPLVERQQANEVDWWDMVCNVKKLINEKKEDGKVFWQNLAGYKRQEALRPYLSSEEDRKKGKKFARYQLGDLLLHLEKKHGEDWGKVYDEAWERIDKKVEGLSKHIKLEEERRSEDAQSKAALTDWLRAKASFVIEGLKEADKDEFCRCELKLQKWYGDLRGKPFAIEAENSILDISGFSKQYNCAFIWQKDGVKKLNLYLIINYFKGGKLRFKKIKPEAFEANRFYTVINKKSGEIVPMEVNFNFDDPNLIILPLAFGKRQGREFIWNDLLSLETGSLKLANGRVIEKTLYNRRTRQDEPALFVALTFERREVLDSSNIKPMNLIGVDRGENIPAVIALTDPEGCPLSRFKDSLGNPTHILRIGESYKEKQRTIQAKKEVEQRRAGGYSRKYASKAKNLADDMVRNTARDLLYYAVTQDAMLIFENLSRGFGRQGKRTFMAERQYTRMEDWLTAKLAYEGLPSKTYLSKTLAQYTSKTCSNCGFTITSADYDRVLEKLKKTATGWMTTINGKELKVEGQITYYNRYKRQNVVKDLSVELDRLSEESVNNDISSWTKGRSGEALSLLKKRFSHRPVQEKFVCLNCGFETHADEQAALNIARSWLFLRSQEYKKYQTNKTTGNTDKRAFVETWQSFYRKKLKEVWKPAV

SEQ ID NO: 35808 - protein, 978 aa, synthetic construct
  REGION 1..978: note = engineered CasX variant
QEIKRINKIRRRLVKDSNTKKAGKTGPMKTLLVRVMTPDLRERLENLRKKPENIPQPISNTSRANLNKLLTDYTEMKKAILHVYWEEFQKDPVGLMSRVAQPASKKIDQNKLKPEMDEKGNLTTAGFACSQCGQPLFVYKLEQVSEKGKAYTNYFGRCNVAEHEKLILLAQLKPEKDSDEAVTYSLGKFGQRALDFYSIHVTKESTHPVKPLAQIAGNRYASPVGKALSDACMGTIASFLSKYQDIIIEHQKVVKGNQKRLESLRELAGKENLEYPSVTLPPQPHTKEGLDAYNEVIARVRMWVNLNLWQKLKLSRDDAKPLLRLKGFPSFPLVERQQANEVDWWDMVCNVKKLINEKKEDGKVFWQNLAGYKRQEALRPYLSSEEDRKKGKKFARYQLGDLLLHLEKKHGEDWGKVYDEAWERIDKKVEGLSKHIKLEEERRSEDAQSKAALTDWLRAKASFVIEGLKEADKDEFCRCELKLQKWYGDLRGKPFAIEAENSILDISGFSKQYNCAFIWQKDGVKKLNLYLIINYFKGGKLRFKKIKPEAFEANRFYTVINKKSGEIVPMEVNFNFDDPNLIILPLAFGKRQGREFIWNDLLSLETGSLKLANGRVIEKTLYNRRTRQDEPALFVALTFERREVLDSSNIKPMNLIGVDRGENIPAVIALTDPEGCPLSRFKDSLGNPTHILRIGESYKEKQRTIQAKKEVEQRRAGGYSRKYASKAKNLADDMVRNTARDLLYYAVTQDAMLIFENLSRGFGRQGKRTFMAERQYTRMEDWLTAKLAYEGLPSKTYLSKTLAQYTSKTCSNCGFTITSADYDRVLEKLKKTATGWMTTINGKELKVEGQITYYNRYKRQNVVKDLSVELDRLSEESVNNDISSWTKGRSGEALSLLKKRFSHRPVQEKFVCLNCGFETHADEQAALNIARSWLFLRSQEYKKYQTNKTTGNTDKRAFVETWQSFYRKKLKEVWKPAV

SEQ ID NO: 35809 - protein, 979 aa, synthetic construct
  REGION 1..979: note = engineered CasX variant
QEIKRINKIRRRLVKDSNTKKAGKTGPMKTLLVRVMTPDLRERLENLRKKPENIPQPISNTSRANLNKLLTDYTEMKKAILHVYWEEFQKDPVGLMSRVAQPASKKIDQNKLKPEMDEKGNLTTAGFACSQCGQPLFVYKLEQVSEKGKAYTNYFGRCNVAEHEKLILLAQLKPEKDSDEAVTYSLGKFGQRALDFYSIHVTKESTHPVKPLAQIAGNRYASYPVGKALSDACMGTIASFLSKYQDIIIEHQKVVKGNQKRLESLRELAGKENLEYPSVTLPPQPHTKEGLDAYNEVIARVRMWVNLNLWQKLKLSRDDAKPLLRLKGFPSFPLVERQANAEVDWWDMVCNVKKLINEKKEDGKVFWQNLAGYKRQEALRPYLSSEEDRKKGKKFARYQLGDLLLHLEKKHGEDWGKVYDEAWERIDKKVEGLSKHIKLEEERRSEDAQSKAALTDWLRAKASFVIEGLKEADKDEFCRCELKLQKWYGDLRGKPFAIEAENSILDISGFSKQYNCAFIWQKDGVKKLNLYLIINYFKGGKLRFKKIKPEAFEANRFYTVINKKSGEIVPMEVNFNFDDPNLIILPLAFGKRQGREFIWNDLLSLETGSLKLANGRVIEKTLYNRRTRQDEPALFVALTFERREVLDSSNIKPMNLIGVDRGENIPAVIALTDPEGCPLSRFKDSLGNPTHILRIGESYKEKQRTIQAKKEVEQRRAGGYSRKYASKAKNLADDMVRNTARDLLYYAVTQDAMLIFENLSRGFGRQGKRTFMAERQYTRMEDWLTAKLAYEGLPSKTYLSKTLAQYTSKTCSNCGFTITSADYDRVLEKLKKTATGWMTTINGKELKVEGQITYYNRYKRQNVVKDLSVELDRLSEESVNNDISSWTKGRSGEALSLLKKRFSHRPVQEKFVCLNCGFETHADEQAALNIARSWLFLRSQEYKKYQTNKTTGNTDKRAFVETWQSFYRKKLKEVWKPAV

SEQ ID NO: 35810 - protein, 979 aa, synthetic construct
  REGION 1..979: note = engineered CasX variant
QEIKRINKIRRRLVKDSNTKKAGKTGPMKTLLVRVMTPDLRERLENLRKKPENIPQPISNTSRANLNKLLTDYTEMKKAILHVYWEEFQKDPVGLMSRVAQPASKKIDQNKLKPEMDEKGNLTTAGFACSQCGQPLFVYKLEQVSEKGKAYTNYFGRCNVAEHEKLILLAQLKPEKDSDEAVTYSLGKFGQRALDFYSIHVTKESTHPVKPLAQIAGNRYASHPVGKALSDACMGTIASFLSKYQDIIIEHQKVVKGNQKRLESLRELAGKENLEYPSVTLPPQPHTKEGLDAYNEVIARVRMWVNLNLWQKLKLSRDDAKPLLRLKGFPSFPLVERQANAEVDWWDMVCNVKKLINEKKEDGKVFWQNLAGYKRQEALRPYLSSEEDRKKGKKFARYQLGDLLLHLEKKHGEDWGKVYDEAWERIDKKVEGLSKHIKLEEERRSEDAQSKAALTDWLRAKASFVIEGLKEADKDEFCRCELKLQKWYGDLRGKPFAIEAENSILDISGFSKQYNCAFIWQKDGVKKLNLYLIINYFKGGKLRFKKIKPEAFEANRFYTVINKKSGEIVPMEVNFNFDDPNLIILPLAFGKRQGREFIWNDLLSLETGSLKLANGRVIEKTLYNRRTRQDEPALFVALTFERREVLDSSNIKPMNLIGVDRGENIPAVIALTDPEGCPLSRFKDSLGNPTHILRIGESYKEKQRTIQAKKEVEQRRAGGYSRKYASKAKNLADDMVRNTARDLLYYAVTQDAMLIFENLSRGFGRQGKRTFMAERQYTRMEDWLTAKLAYEGLPSKTYLSKTLAQYTSKTCSNCGFTITSADYDRVLEKLKKTATGWMTTINGKELKVEGQITYYNRYKRQNVVKDLSVELDRLSEESVNNDISSWTKGRSGEALSLLKKRFSHRPVQEKFVCLNCGFETHADEQAALNIARSWLFLRSQEYKKYQTNKTTGNTDKRAFVETWQSFYRKKLKEVWKPAV

SEQ ID NO: 35811 - protein, 979 aa, synthetic construct
  REGION 1..979: note = engineered CasX variant
QEIKRINKIRRRLVKDSNTKKAGKTGPMKTLLVRVMTPDLRERLENLRKKPENIPQPISNTSRANLNKLLTDYTEMKKAILHVYWEEFQKDPVGLMSRVAQPASKKIDQNKLKPEMDEKGNLTTAGFACSQCGQPLFVYKLEQVSEKGKAYTNYFGRCNVAEHEKLILLAQLKPEKDSDEAVTYSLGKFGQRALDFYSIHVTKESTHPVKPLAQIAGNRYASSPVGKALSDACMGTIASFLSKYQDIIIEHQKVVKGNQKRLESLRELAGKENLEYPSVTLPPQPHTKEGLDAYNEVIARVRMWVNLNLWQKLKLSRDDAKPLLRLKGFPSFPLVERQANAEVDWWDMVCNVKKLINEKKEDGKVFWQNLAGYKRQEALRPYLSSEEDRKKGKKFARYQLGDLLLHLEKKHGEDWGKVYDEAWERIDKKVEGLSKHIKLEEERRSEDAQSKAALTDWLRAKASFVIEGLKEADKDEFCRCELKLQKWYGDLRGKPFAIEAENSILDISGFSKQYNCAFIWQKDGVKKLNLYLIINYFKGGKLRFKKIKPEAFEANRFYTVINKKSGEIVPMEVNFNFDDPNLIILPLAFGKRQGREFIWNDLLSLETGSLKLANGRVIEKTLYNRRTRQDEPALFVALTFERREVLDSSNIKPMNLIGVDRGENIPAVIALTDPEGCPLSRFKDSLGNPTHILRIGESYKEKQRTIQAKKEVEQRRAGGYSRKYASKAKNLADDMVRNTARDLLYYAVTQDAMLIFENLSRGFGRQGKRTFMAERQYTRMEDWLTAKLAYEGLPSKTYLSKTLAQYTSKTCSNCGFTITSADYDRVLEKLKKTATGWMTTINGKELKVEGQITYYNRYKRQNVVKDLSVELDRLSEESVNNDISSWTKGRSGEALSLLKKRFSHRPVQEKFVCLNCGFETHADEQAALNIARSWLFLRSQEYKKYQTNKTTGNTDKRAFVETWQSFYRKKLKEVWKPAV

SEQ ID NO: 35812 - protein, 979 aa, synthetic construct
  REGION 1..979: note = engineered CasX variant
QEIKRINKIRRRLVKDSNTKKAGKTGPMKTLLVRVMTPDLRERLENLRKKPENIPQPISNTSRANLNKLLTDYTEMKKAILHVYWEEFQKDPVGLMSRVAQPASKKIDQNKLKPEMDEKGNLTTAGFACSQCGQPLFVYKLEQVSEKGKAYTNYFGRCNVAEHEKLILLAQLKPEKDSDEAVTYSLGKFGQRALDFYSIHVTKESTHPVKPLAQIAGNRYASTPVGKALSDACMGTIASFLSKYQDIIIEHQKVVKGNQKRLESLRELAGKENLEYPSVTLPPQPHTKEGLDAYNEVIARVRMWVNLNLWQKLKLSRDDAKPLLRLKGFPSFPLVERQANAEVDWWDMVCNVKKLINEKKEDGKVFWQNLAGYKRQEALRPYLSSEEDRKKGKKFARYQLGDLLLHLEKKHGEDWGKVYDEAWERIDKKVEGLSKHIKLEEERRSEDAQSKAALTDWLRAKASFVIEGLKEADKDEFCRCELKLQKWYGDLRGKPFAIEAENSILDISGFSKQYNCAFIWQKDGVKKLNLYLIINYFKGGKLRFKKIKPEAFEANRFYTVINKKSGEIVPMEVNFNFDDPNLIILPLAFGKRQGREFIWNDLLSLETGSLKLANGRVIEKTLYNRRTRQDEPALFVALTFERREVLDSSNIKPMNLIGVDRGENIPAVIALTDPEGCPLSRFKDSLGNPTHILRIGESYKEKQRTIQAKKEVEQRRAGGYSRKYASKAKNLADDMVRNTARDLLYYAVTQDAMLIFENLSRGFGRQGKRTFMAERQYTRMEDWLTAKLAYEGLPSKTYLSKTLAQYTSKTCSNCGFTITSADYDRVLEKLKKTATGWMTTINGKELKVEGQITYYNRYKRQNVVKDLSVELDRLSEESVNNDISSWTKGRSGEALSLLKKRFSHRPVQEKFVCLNCGFETHADEQAALNIARSWLFLRSQEYKKYQTNKTTGNTDKRAFVETWQSFYRKKLKEVWKPAV

SEQ ID NO: 35813 - protein, 979 aa, synthetic construct
  REGION 1..979: note = engineered CasX variant
QEIKRINKIRRRLVKDSNTKKAGKTGPMKTLLVRVMTPDLRERLENLRKKPENIPQPISNTSRANLNKLLTDYTEMKKAILHVYWEEFQKDPVGLMSRVAQPASKKIDQNKLKPEMDEKGNLTTAGFACSQCGQPLFVYKLEQVSEKGKAYTNYFGRCNVAEHEKLILLAQLKPEKDSDEAVTYSLGKFGQRALDFYSIHVTKESTHPVKPLAQIAGNRYASAPVGKALSDACMGTIASFLSKYQDIIIEHQKVVKGNQKRLESLRELAGKENLEYPSVTLPPQPHTKEGLDAYNEVIARVRMWVNLNLWQKLKLSRDDAKPLLRLKGFPSFPLVERQANAEVDWWDMVCNVKKLINEKKEDGKVFWQNLAGYKRQEALRPYLSSEEDRKKGKKFARYQLGDLLLHLEKKHGEDWGKVYDEAWERIDKKVEGLSKHIKLEEERRSEDAQSKAALTDWLRAKASFVIEGLKEADKDEFCRCELKLQKWYGDLRGKPFAIEAENSILDISGFSKQYNCAFIWQKDGVKKLNLYLIINYFKGGKLRFKKIKPEAFEANRFYTVINKKSGEIVPMEVNFNFDDPNLIILPLAFGKRQGREFIWNDLLSLETGSLKLANGRVIEKTLYNRRTRQDEPALFVALTFERREVLDSSNIKPMNLIGVDRGENIPAVIALTDPEGCPLSRFKDSLGNPTHILRIGESYKEKQRTIQAKKEVEQRRAGGYSRKYASKAKNLADDMVRNTARDLLYYAVTQDAMLIFENLSRGFGRQGKRTFMAERQYTRMEDWLTAKLAYEGLPSKTYLSKTLAQYTSKTCSNCGFTITSADYDRVLEKLKKTATGWMTTINGKELKVEGQITYYNRYKRQNVVKDLSVELDRLSEESVNNDISSWTKGRSGEALSLLKKRFSHRPVQEKFVCLNCGFETHADEQAALNIARSWLFLRSQEYKKYQTNKTTGNTDKRAFVETWQSFYRKKLKEVWKPAV

SEQ ID NO: 35814 - protein, 979 aa, synthetic construct
  REGION 1..979: note = engineered CasX variant
QEIKRINKIRRRLVKDSNTKKAGKTGPMKTLLVRVMTPDLRERLENLRKKPENIPQPISNTSRANLNKLLTDYTEMKKAILHVYWEEFQKDPVGLMSRVAQPASKKIDQNKLKPEMDEKGNLTTAGFACSQCGQPLFVYKLEQVSEKGKAYTNYFGRCNVAEHEKLILLAQLKPEKDSDEAVTYSLGKFGQRALDFYSIHVTKESTHPVKPLAQIAGNRYASVPVGKALSDACMGTIASFLSKYQDIIIEHQKVVKGNQKRLESLRELAGKENLEYPSVTLPPQPHTKEGLDAYNEVIARVRMWVNLNLWQKLKLSRDDAKPLLRLKGFPSFPLVERQANAEVDWWDMVCNVKKLINEKKEDGKVFWQNLAGYKRQEALRPYLSSEEDRKKGKKFARYQLGDLLLHLEKKHGEDWGKVYDEAWERIDKKVEGLSKHIKLEEERRSEDAQSKAALTDWLRAKASFVIEGLKEADKDEFCRCELKLQKWYGDLRGKPFAIEAENSILDISGFSKQYNCAFIWQKDGVKKLNLYLIINYFKGGKLRFKKIKPEAFEANRFYTVINKKSGEIVPMEVNFNFDDPNLIILPLAFGKRQGREFIWNDLLSLETGSLKLANGRVIEKTLYNRRTRQDEPALFVALTFERREVLDSSNIKPMNLIGVDRGENIPAVIALTDPEGCPLSRFKDSLGNPTHILRIGESYKEKQRTIQAKKEVEQRRAGGYSRKYASKAKNLADDMVRNTARDLLYYAVTQDAMLIFENLSRGFGRQGKRTFMAERQYTRMEDWLTAKLAYEGLPSKTYLSKTLAQYTSKTCSNCGFTITSADYDRVLEKLKKTATGWMTTINGKELKVEGQITYYNRYKRQNVVKDLSVELDRLSEESVNNDISSWTKGRSGEALSLLKKRFSHRPVQEKFVCLNCGFETHADEQAALNIARSWLFLRSQEYKKYQTNKTTGNTDKRAFVETWQSFYRKKLKEVWKPAV

SEQ ID NO: 35815 - protein, 979 aa, synthetic construct
  REGION 1..979: note = engineered CasX variant
QEIKRINKIRRRLVKDSNTKKAGKTGPMKTLLVRVMTPDLRERLENLRKKPENIPQPISNTSRANLNKLLTDYTEMKKAILHVYWEEFQKDPVGLMSRVAQPASKKIDQNKLKPEMDEKGNLTTAGFACSQCGQPLFVYKLEQVSEKGKAYTNYFGRCNVAEHEKLIKLAQLKPEKDSDEAVTYSLGKFGQRALDFYSIHVTKESTHPVKPLAQIAGNRYASGPVGKALSDACMGTIASFLSKYQDIIIEHQKVVKGNQKRLESLRELAGKENLEYPSVTLPPQPHTKEGLDAYNEVIARVRMWVNLNLWQKLKLSRDDAKPLLRLKGFPSFPLVERQANAEVDWWDMVCNVKKLINEKKEDGKVFWQNLAGYKRQEALRPYLSSEEDRKKGKKFARYQLGDLLLHLEKKHGEDWGKVYDEAWERIDKKVEGLSKHIKLEEERRSEDAQSKAALTDWLRAKASFVIEGLKEADKDEFCRCELKLQKWYGDLRGKPFAIEAENSILDISGFSKQYNCAFIWQKDGVKKLNLYLIINYFKGGKLRFKKIKPEAFEANRFYTVINKKSGEIVPMEVNFNFDDPNLIILPLAFGKRQGREFIWNDLLSLETGSLKLANGRVIEKTLYNRRTRQDEPALFVALTFERREVLDSSNIKPMNLIGVDRGENIPAVIALTDPEGCPLSRFKDSLGNPTHILRIGESYKEKQRTIQAKKEVEQRRAGGYSRKYASKAKNLADDMVRNTARDLLYYAVTQDAMLIFENLSRGFGRQGKRTFMAERQYTRMEDWLTAKLAYEGLPSKTYLSKTLAQYTSKTCSNCGFTITSADYDRVLEKLKKTATGWMTTINGKELKVEGQITYYNRYKRQNVVKDLSVELDRLSEESVNNDISSWTKGRSGEALSLLKKRFSHRPVQEKFVCLNCGFETHADEQAALNIARSWLFLRSQEYKKYQTNKTTGNTDKRAFVETWQSFYRKKLKEVWKPAV

SEQ ID NO: 35816 - protein, 978 aa, synthetic construct
  REGION 1..978: note = engineered CasX variant
QEIKRINKIRRRLVKDSNTKKAGKTGPMKTLLVRVMTPDLRERLENLRKKPENIPQPISNTSRANLNKLLTDYTEMKKAILHVYWEEFQKDPVGLMSRVAQPASKKIDQNKLKPEMDEKGNLTTAGFACSQCGQPLFVYKLEQVSEKGKAYTNYFGRCNVAEHEKLILLAQLKPEKDSDEAVTYSLGKFGQRALDFYSIHVTKESTHPVKPLAQIAGNRYASPVGKALSDACMGTIASFLSKYQDIIIEHQKVVKGNQKRLESLRELAGKENLEYPSVTLPPQPHTKEGLDAYNEVIARVRMWVNLNLWQKLKLSRDDAKPLLRLKGFPSFPLVERQANAEVDWWDMVCNVKKLINEKKEDGKVFWQNLAGYKRQEALRPYLSSEEDRKKGKKFARYQLGDLLLHLEKKHGEDWGKVYDEAWERIDKKVEGLSKHIKLEEERRSEDAQSKAALTDWLRAKASFVIEGLKEADKDEFCRCELKLQKWYGDLRGKPFAIEAENSILDISGFSKQYNCAFIWQKDGVKKLNLYLIINYFKGGKLRFKKIKPEAFEANRFYTVINKKSGEIVPMEVNFNFDDPNLIILPLAFGKRQGREFIWNDLLSLETGSLKLANGRVIEKTLYNRRTRQDEPALFVALTFERREVLDSSNIKPMNLIGVDRGENIPAVIALTDPEGCPLSRFKDSLGNPTHILRIGESYKEKQRTIQAKKEVEQRRAGGYSRKYASKAKNLADDMVRNTARDLLYYAVTQDAMLIFENLSRGFGRQGKRTFMAERQYTRMEDWLTAKLAYEGLPSKTYLSKTLAQYTSKTCSNCGFTITSADYDRVLEKLKKTATGWMTTINGKELKVEGQITYYNRYKRQNVVKDLSVELDRLSEESVNNDISSWTKGRSGEALSLLKKRFSHRPVQEKFVCLNCGFETHADEQAALNIARSWLFLRSQEYKKYQTNKTTGNTDKRAFVETWQSFYRKKLKEVWKPAV

SEQ ID NO: 35817 - protein, 978 aa, synthetic construct
  REGION 1..978: note = engineered CasX variant
QEIKRINKIRRRLVKDSNTKKAGKTGPMKTLLVRVMTPDLRERLENLRKKPENIPQPISNTSRANLNKLLTDYTEMKKAILHVYWEEFQKDPVGLMSRVAQPASKKIDQNKLKPEMDEKGNLTTAGFACSQCGQPLFVYKLEQVSEKGKAYTNYFGRCNVAEHEKLILLAQLKPEKDSDEAVTYSLGKFGQRALDFYSIHVTKESTHPVKPLAQIAGNRYASYPVGKALSDACMGTIASFLSKYQDIIIEHQKVVKGNQKRLESLRELAGKENLEYPSVTLPPQPHTKEGLDAYNEVIARVRMWVNLNLWQKLKLSRDDAKPLLRLKGFPSFPLVERQANEVDWWDMVCNVKKLINEKKEDGKVFWQNLAGYKRQEALRPYLSSEEDRKKGKKFARTQLGDLLLHLEKKHGEDWGKVYDEAWERIDKKVEGLSKHIKLEEERRSEDAQSKAALTDWLRAKASFVIEGLKEADKDEFCRCELKLQKWYGDLRGKPFAIEAENSILDISGFSKQYNCAFIWQKDGVKKLNLYLIINYFKGGKLRFKKIKPEAFEANRFYTVINKKSGEIVPMEVNFNFDDPNLIILPLAFGKRQGREFIWNDLLSLETGSLKLANGRVIEKTLYNRRTRQDEPALFVALTFERREVLDSSNIKPMNLIGVDRGENIPAVIALTDPEGCPLSRFKDSLGNPTHILRIGESYKEKQRTIQAKKEVEQRRAGGYSRKYASKAKNLADDMVRNTARDLLYYAVTQDAMLIFENLSRGFGRQGKRTFMAERQYTRMEDWLTAKLAYEGLPSKTYLSKTLAQYTSKTCSNCGFTITSADYDRVLEKLKKTATGWMTTINGKELKVEGQITYYNRYKRQNVVKDLSVELDRLSEESVNNDISSWTKGRSGEALSLLKKRFSHRPVQEKFVCLNCGFETHADEQAALNIARSWLFLRSQEYKKYQTNKTTGNTDKRAFVETWQSFYRKKLKEVWKPAV

SEQ ID NO: 35818 - protein, 978 aa, synthetic construct
  REGION 1..978: note = engineered CasX variant
QEIKRINKIRRRLVKDSNTKKAGKTGPMKTLLVRVMTPDLRERLENLRKKPENIPQPISNTSRANLNKLLTDYTEMKKAILHVYWEEFQKDPVGLMSRVAQPASKKIDQNKLKPEMDEKGNLTTAGFACSQCGQPLFVYKLEQVSEKGKAYTNYFGRCNVAEHEKLILLAQLKPEKDSDEAVTYSLGKFGQRALDFYSIHVTKESTHPVKPLAQIAGNRYASHPVGKALSDACMGTIASFLSKYQDIIIEHQKVVKGNQKRLESLRELAGKENLEYPSVTLPPQPHTKEGLDAYNEVIARVRMWVNLNLWQKLKLSRDDAKPLLRLKGFPSFPLVERQANEVDWWDMVCNVKKLINEKKEDGKVFWQNLAGYKRQEALRPYLSSEEDRKKGKKFARTQLGDLLLHLEKKHGEDWGKVYDEAWERIDKKVEGLSKHIKLEEERRSEDAQSKAALTDWLRAKASFVIEGLKEADKDEFCRCELKLQKWYGDLRGKPFAIEAENSILDISGFSKQYNCAFIWQKDGVKKLNLYLIINYFKGGKLRFKKIKPEAFEANRFYTVINKKSGEIVPMEVNFNFDDPNLIILPLAFGKRQGREFIWNDLLSLETGSLKLANGRVIEKTLYNRRTRQDEPALFVALTFERREVLDSSNIKPMNLIGVDRGENIPAVIALTDPEGCPLSRFKDSLGNPTHILRIGESYKEKQRTIQAKKEVEQRRAGGYSRKYASKAKNLADDMVRNTARDLLYYAVTQDAMLIFENLSRGFGRQGKRTFMAERQYTRMEDWLTAKLAYEGLPSKTYLSKTLAQYTSKTCSNCGFTITSADYDRVLEKLKKTATGWMTTINGKELKVEGQITYYNRYKRQNVVKDLSVELDRLSEESVNNDISSWTKGRSGEALSLLKKRFSHRPVQEKFVCLNCGFETHADEQAALNIARSWLFLRSQEYKKYQTNKTTGNTDKRAFVETWQSFYRKKLKEVWKPAV

SEQ ID NO: 35819 - protein, 978 aa, synthetic construct
  REGION 1..978: note = engineered CasX variant
QEIKRINKIRRRLVKDSNTKKAGKTGPMKTLLVRVMTPDLRERLENLRKKPENIPQPISNTSRANLNKLLTDYTEMKKAILHVYWEEFQKDPVGLMSRVAQPASKKIDQNKLKPEMDEKGNLTTAGFACSQCGQPLFVYKLEQVSEKGKAYTNYFGRCNVAEHEKLILLAQLKPEKDSDEAVTYSLGKFGQRALDFYSIHVTKESTHPVKPLAQIAGNRYASSPVGKALSDACMGTIASFLSKYQDIIIEHQKVVKGNQKRLESLRELAGKENLEYPSVTLPPQPHTKEGLDAYNEVIARVRMWVNLNLWQKLKLSRDDAKPLLRLKGFPSFPLVERQANEVDWWDMVCNVKKLINEKKEDGKVFWQNLAGYKRQEALRPYLSSEEDRKKGKKFARTQLGDLLLHLEKKHGEDWGKVYDEAWERIDKKVEGLSKHIKLEEERRSEDAQSKAALTDWLRAKASFVIEGLKEADKDEFCRCELKLQKWYGDLRGKPFAIEAENSILDISGFSKQYNCAFIWQKDGVKKLNLYLIINYFKGGKLRFKKIKPEAFEANRFYTVINKKSGEIVPMEVNFNFDDPNLIILPLAFGKRQGREFIWNDLLSLETGSLKLANGRVIEKTLYNRRTRQDEPALFVALTFERREVLDSSNIKPMNLIGVDRGENIPAVIALTDPEGCPLSRFKDSLGNPTHILRIGESYKEKQRTIQAKKEVEQRRAGGYSRKYASKAKNLADDMVRNTARDLLYYAVTQDAMLIFENLSRGFGRQGKRTFMAERQYTRMEDWLTAKLAYEGLPSKTYLSKTLAQYTSKTCSNCGFTITSADYDRVLEKLKKTATGWMTTINGKELKVEGQITYYNRYKRQNVVKDLSVELDRLSEESVNNDISSWTKGRSGEALSLLKKRFSHRPVQEKFVCLNCGFETHADEQAALNIARSWLFLRSQEYKKYQTNKTTGNTDKRAFVETWQSFYRKKLKEVWKPAV

SEQ ID NO: 35820 - protein, 978 aa, synthetic construct
  REGION 1..978: note = engineered CasX variant
QEIKRINKIRRRLVKDSNTKKAGKTGPMKTLLVRVMTPDLRERLENLRKKPENIPQPISNTSRANLNKLLTDYTEMKKAILHVYWEEFQKDPVGLMSRVAQPASKKIDQNKLKPEMDEKGNLTTAGFACSQCGQPLFVYKLEQVSEKGKAYTNYFGRCNVAEHEKLILLAQLKPEKDSDEAVTYSLGKFGQRALDFYSIHVTKESTHPVKPLAQIAGNRYASTPVGKALSDACMGTIASFLSKYQDIIIEHQKVVKGNQKRLESLRELAGKENLEYPSVTLPPQPHTKEGLDAYNEVIARVRMWVNLNLWQKLKLSRDDAKPLLRLKGFPSFPLVERQANEVDWWDMVCNVKKLINEKKEDGKVFWQNLAGYKRQEALRPYLSSEEDRKKGKKFARTQLGDLLLHLEKKHGEDWGKVYDEAWERIDKKVEGLSKHIKLEEERRSEDAQSKAALTDWLRAKASFVIEGLKEADKDEFCRCELKLQKWYGDLRGKPFAIEAENSILDISGFSKQYNCAFIWQKDGVKKLNLYLIINYFKGGKLRFKKIKPEAFEANRFYTVINKKSGEIVPMEVNFNFDDPNLIILPLAFGKRQGREFIWNDLLSLETGSLKLANGRVIEKTLYNRRTRQDEPALFVALTFERREVLDSSNIKPMNLIGVDRGENIPAVIALTDPEGCPLSRFKDSLGNPTHILRIGESYKEKQRTIQAKKEVEQRRAGGYSRKYASKAKNLADDMVRNTARDLLYYAVTQDAMLIFENLSRGFGRQGKRTFMAERQYTRMEDWLTAKLAYEGLPSKTYLSKTLAQYTSKTCSNCGFTITSADYDRVLEKLKKTATGWMTTINGKELKVEGQITYYNRYKRQNVVKDLSVELDRLSEESVNNDISSWTKGRSGEALSLLKKRFSHRPVQEKFVCLNCGFETHADEQAALNIARSWLFLRSQEYKKYQTNKTTGNTDKRAFVETWQSFYRKKLKEVWKPAV

SEQ ID NO: 35821 - protein, 978 aa, synthetic construct
  REGION 1..978: note = engineered CasX variant
QEIKRINKIRRRLVKDSNTKKAGKTGPMKTLLVRVMTPDLRERLENLRKKPENIPQPISNTSRANLNKLLTDYTEMKKAILHVYWEEFQKDPVGLMSRVAQPASKKIDQNKLKPEMDEKGNLTTAGFACSQCGQPLFVYKLEQVSEKGKAYTNYFGRCNVAEHEKLILLAQLKPEKDSDEAVTYSLGKFGQRALDFYSIHVTKESTHPVKPLAQIAGNRYASAPVGKALSDACMGTIASFLSKYQDIIIEHQKVVKGNQKRLESLRELAGKENLEYPSVTLPPQPHTKEGLDAYNEVIARVRMWVNLNLWQKLKLSRDDAKPLLRLKGFPSFPLVERQANEVDWWDMVCNVKKLINEKKEDGKVFWQNLAGYKRQEALRPYLSSEEDRKKGKKFARTQLGDLLLHLEKKHGEDWGKVYDEAWERIDKKVEGLSKHIKLEEERRSEDAQSKAALTDWLRAKASFVIEGLKEADKDEFCRCELKLQKWYGDLRGKPFAIEAENSILDISGFSKQYNCAFIWQKDGVKKLNLYLIINYFKGGKLRFKKIKPEAFEANRFYTVINKKSGEIVPMEVNFNFDDPNLIILPLAFGKRQGREFIWNDLLSLETGSLKLANGRVIEKTLYNRRTRQDEPALFVALTFERREVLDSSNIKPMNLIGVDRGENIPAVIALTDPEGCPLSRFKDSLGNPTHILRIGESYKEKQRTIQAKKEVEQRRAGGYSRKYASKAKNLADDMVRNTARDLLYYAVTQDAMLIFENLSRGFGRQGKRTFMAERQYTRMEDWLTAKLAYEGLPSKTYLSKTLAQYTSKTCSNCGFTITSADYDRVLEKLKKTATGWMTTINGKELKVEGQITYYNRYKRQNVVKDLSVELDRLSEESVNNDISSWTKGRSGEALSLLKKRFSHRPVQEKFVCLNCGFETHADEQAALNIARSWLFLRSQEYKKYQTNKTTGNTDKRAFVETWQSFYRKKLKEVWKPAV

SEQ ID NO: 35822 - protein, 978 aa, synthetic construct
  REGION 1..978: note = engineered CasX variant
QEIKRINKIRRRLVKDSNTKKAGKTGPMKTLLVRVMTPDLRERLENLRKKPENIPQPISNTSRANLNKLLTDYTEMKKAILHVYWEEFQKDPVGLMSRVAQPASKKIDQNKLKPEMDEKGNLTTAGFACSQCGQPLFVYKLEQVSEKGKAYTNYFGRCNVAEHEKLILLAQLKPEKDSDEAVTYSLGKFGQRALDFYSIHVTKESTHPVKPLAQIAGNRYASVPVGKALSDACMGTIASFLSKYQDIIIEHQKVVKGNQKRLESLRELAGKENLEYPSVTLPPQPHTKEGLDAYNEVIARVRMWVNLNLWQKLKLSRDDAKPLLRLKGFPSFPLVERQANEVDWWDMVCNVKKLINEKKEDGKVFWQNLAGYKRQEALRPYLSSEEDRKKGKKFARTQLGDLLLHLEKKHGEDWGKVYDEAWERIDKKVEGLSKHIKLEEERRSEDAQSKAALTDWLRAKASFVIEGLKEADKDEFCRCELKLQKWYGDLRGKPFAIEAENSILDISGFSKQYNCAFIWQKDGVKKLNLYLIINYFKGGKLRFKKIKPEAFEANRFYTVINKKSGEIVPMEVNFNFDDPNLIILPLAFGKRQGREFIWNDLLSLETGSLKLANGRVIEKTLYNRRTRQDEPALFVALTFERREVLDSSNIKPMNLIGVDRGENIPAVIALTDPEGCPLSRFKDSLGNPTHILRIGESYKEKQRTIQAKKEVEQRRAGGYSRKYASKAKNLADDMVRNTARDLLYYAVTQDAMLIFENLSRGFGRQGKRTFMAERQYTRMEDWLTAKLAYEGLPSKTYLSKTLAQYTSKTCSNCGFTITSADYDRVLEKLKKTATGWMTTINGKELKVEGQITYYNRYKRQNVVKDLSVELDRLSEESVNNDISSWTKGRSGEALSLLKKRFSHRPVQEKFVCLNCGFETHADEQAALNIARSWLFLRSQEYKKYQTNKTTGNTDKRAFVETWQSFYRKKLKEVWKPAV

SEQ ID NO: 35823 - protein, 978 aa, synthetic construct
  REGION 1..978: note = engineered CasX variant
QEIKRINKIRRRLVKDSNTKKAGKTGPMKTLLVRVMTPDLRERLENLRKKPENIPQPISNTSRANLNKLLTDYTEMKKAILHVYWEEFQKDPVGLMSRVAQPASKKIDQNKLKPEMDEKGNLTTAGFACSQCGQPLFVYKLEQVSEKGKAYTNYFGRCNVAEHEKLIKLAQLKPEKDSDEAVTYSLGKFGQRALDFYSIHVTKESTHPVKPLAQIAGNRYASGPVGKALSDACMGTIASFLSKYQDIIIEHQKVVKGNQKRLESLRELAGKENLEYPSVTLPPQPHTKEGLDAYNEVIARVRMWVNLNLWQKLKLSRDDAKPLLRLKGFPSFPLVERQANEVDWWDMVCNVKKLINEKKEDGKVFWQNLAGYKRQEALRPYLSSEEDRKKGKKFARTQLGDLLLHLEKKHGEDWGKVYDEAWERIDKKVEGLSKHIKLEEERRSEDAQSKAALTDWLRAKASFVIEGLKEADKDEFCRCELKLQKWYGDLRGKPFAIEAENSILDISGFSKQYNCAFIWQKDGVKKLNLYLIINYFKGGKLRFKKIKPEAFEANRFYTVINKKSGEIVPMEVNFNFDDPNLIILPLAFGKRQGREFIWNDLLSLETGSLKLANGRVIEKTLYNRRTRQDEPALFVALTFERREVLDSSNIKPMNLIGVDRGENIPAVIALTDPEGCPLSRFKDSLGNPTHILRIGESYKEKQRTIQAKKEVEQRRAGGYSRKYASKAKNLADDMVRNTARDLLYYAVTQDAMLIFENLSRGFGRQGKRTFMAERQYTRMEDWLTAKLAYEGLPSKTYLSKTLAQYTSKTCSNCGFTITSADYDRVLEKLKKTATGWMTTINGKELKVEGQITYYNRYKRQNVVKDLSVELDRLSEESVNNDISSWTKGRSGEALSLLKKRFSHRPVQEKFVCLNCGFETHADEQAALNIARSWLFLRSQEYKKYQTNKTTGNTDKRAFVETWQSFYRKKLKEVWKPAV

SEQ ID NO: 35824 - protein, 977 aa, synthetic construct
  REGION 1..977: note = engineered CasX variant
QEIKRINKIRRRLVKDSNTKKAGKTGPMKTLLVRVMTPDLRERLENLRKKPENIPQPISNTSRANLNKLLTDYTEMKKAILHVYWEEFQKDPVGLMSRVAQPASKKIDQNKLKPEMDEKGNLTTAGFACSQCGQPLFVYKLEQVSEKGKAYTNYFGRCNVAEHEKLILLAQLKPEKDSDEAVTYSLGKFGQRALDFYSIHVTKESTHPVKPLAQIAGNRYASPVGKALSDACMGTIASFLSKYQDIIIEHQKVVKGNQKRLESLRELAGKENLEYPSVTLPPQPHTKEGLDAYNEVIARVRMWVNLNLWQKLKLSRDDAKPLLRLKGFPSFPLVERQANEVDWWDMVCNVKKLINEKKEDGKVFWQNLAGYKRQEALRPYLSSEEDRKKGKKFARTQLGDLLLHLEKKHGEDWGKVYDEAWERIDKKVEGLSKHIKLEEERRSEDAQSKAALTDWLRAKASFVIEGLKEADKDEFCRCELKLQKWYGDLRGKPFAIEAENSILDISGFSKQYNCAFIWQKDGVKKLNLYLIINYFKGGKLRFKKIKPEAFEANRFYTVINKKSGEIVPMEVNFNFDDPNLIILPLAFGKRQGREFIWNDLLSLETGSLKLANGRVIEKTLYNRRTRQDEPALFVALTFERREVLDSSNIKPMNLIGVDRGENIPAVIALTDPEGCPLSRFKDSLGNPTHILRIGESYKEKQRTIQAKKEVEQRRAGGYSRKYASKAKNLADDMVRNTARDLLYYAVTQDAMLIFENLSRGFGRQGKRTFMAERQYTRMEDWLTAKLAYEGLPSKTYLSKTLAQYTSKTCSNCGFTITSADYDRVLEKLKKTATGWMTTINGKELKVEGQITYYNRYKRQNVVKDLSVELDRLSEESVNNDISSWTKGRSGEALSLLKKRFSHRPVQEKFVCLNCGFETHADEQAALNIARSWLFLRSQEYKKYQTNKTTGNTDKRAFVETWQSFYRKKLKEVWKPAV

SEQ ID NO: 35825 - protein, 979 aa, synthetic construct
  REGION 1..979: note = engineered CasX variant
QEIKRINKIRRRLVKDSNTKKAGKTGPMKTLLVRVMTPDLRERLENLRKKPENIPQPISNTSRANLNKLLTDYTEMKKAILHVYWEEFQKDPVGLMSRVAQPASKKIDQNKLKPEMDEKGNLTTAGFACSQCGQPLFVYKLEQVSEKGKAYTNYFGRCNVAEHEKLILLAQLKPEKDSDEAVTYSLGKFGQRALDFYSIHVTKESTHPVKPLAQIAGNRYASYPVGKALSDACMGTIASFLSKYQDIIIEHQKVVKGNQKRLESLRELAGKENLEYPSVTLPPQPHTKEGLDAYNEVIARVRMWVNLNLWQKLKLSRDDAKPLLRLKGFPSFPLVERQANEVDWWDMVCNVKKLINEKKEDGKVFWQNLAGYKRQEALRPYLSSEEDRKKGKKFARYQLGDLLLHLEKKHEGEDWGKVYDEAWERIDKKVEGLSKHIKLEEERRSEDAQSKAALTDWLRAKASFVIEGLKEADKDEFCRCELKLQKWYGDLRGKPFAIEAENSILDISGFSKQYNCAFIWQKDGVKKLNLYLIINYFKGGKLRFKKIKPEAFEANRFYTVINKKSGEIVPMEVNFNFDDPNLIILPLAFGKRQGREFIWNDLLSLETGSLKLANGRVIEKTLYNRRTRQDEPALFVALTFERREVLDSSNIKPMNLIGVDRGENIPAVIALTDPEGCPLSRFKDSLGNPTHILRIGESYKEKQRTIQAKKEVEQRRAGGYSRKYASKAKNLADDMVRNTARDLLYYAVTQDAMLIFENLSRGFGRQGKRTFMAERQYTRMEDWLTAKLAYEGLPSKTYLSKTLAQYTSKTCSNCGFTITSADYDRVLEKLKKTATGWMTTINGKELKVEGQITYYNRYKRQNVVKDLSVELDRLSEESVNNDISSWTKGRSGEALSLLKKRFSHRPVQEKFVCLNCGFETHADEQAALNIARSWLFLRSQEYKKYQTNKTTGNTDKRAFVETWQSFYRKKLKEVWKPAV

SEQ ID NO: 35826 - protein, 979 aa, synthetic construct
  REGION 1..979: note = engineered CasX variant
QEIKRINKIRRRLVKDSNTKKAGKTGPMKTLLVRVMTPDLRERLENLRKKPENIPQPISNTSRANLNKLLTDYTEMKKAILHVYWEEFQKDPVGLMSRVAQPASKKIDQNKLKPEMDEKGNLTTAGFACSQCGQPLFVYKLEQVSEKGKAYTNYFGRCNVAEHEKLILLAQLKPEKDSDEAVTYSLGKFGQRALDFYSIHVTKESTHPVKPLAQIAGNRYASHPVGKALSDACMGTIASFLSKYQDIIIEHQKVVKGNQKRLESLRELAGKENLEYPSVTLPPQPHTKEGLDAYNEVIARVRMWVNLNLWQKLKLSRDDAKPLLRLKGFPSFPLVERQANEVDWWDMVCNVKKLINEKKEDGKVFWQNLAGYKRQEALRPYLSSEEDRKKGKKFARYQLGDLLLHLEKKHEGEDWGKVYDEAWERIDKKVEGLSKHIKLEEERRSEDAQSKAALTDWLRAKASFVIEGLKEADKDEFCRCELKLQKWYGDLRGKPFAIEAENSILDISGFSKQYNCAFIWQKDGVKKLNLYLIINYFKGGKLRFKKIKPEAFEANRFYTVINKKSGEIVPMEVNFNFDDPNLIILPLAFGKRQGREFIWNDLLSLETGSLKLANGRVIEKTLYNRRTRQDEPALFVALTFERREVLDSSNIKPMNLIGVDRGENIPAVIALTDPEGCPLSRFKDSLGNPTHILRIGESYKEKQRTIQAKKEVEQRRAGGYSRKYASKAKNLADDMVRNTARDLLYYAVTQDAMLIFENLSRGFGRQGKRTFMAERQYTRMEDWLTAKLAYEGLPSKTYLSKTLAQYTSKTCSNCGFTITSADYDRVLEKLKKTATGWMTTINGKELKVEGQITYYNRYKRQNVVKDLSVELDRLSEESVNNDISSWTKGRSGEALSLLKKRFSHRPVQEKFVCLNCGFETHADEQAALNIARSWLFLRSQEYKKYQTNKTTGNTDKRAFVETWQSFYRKKLKEVWKPAV

SEQ ID NO: 35827 - protein, 979 aa, synthetic construct
  REGION 1..979: note = engineered CasX variant
QEIKRINKIRRRLVKDSNTKKAGKTGPMKTLLVRVMTPDLRERLENLRKKPENIPQPISNTSRANLNKLLTDYTEMKKAILHVYWEEFQKDPVGLMSRVAQPASKKIDQNKLKPEMDEKGNLTTAGFACSQCGQPLFVYKLEQVSEKGKAYTNYFGRCNVAEHEKLILLAQLKPEKDSDEAVTYSLGKFGQRALDFYSIHVTKESTHPVKPLAQIAGNRYASSPVGKALSDACMGTIASFLSKYQDIIIEHQKVVKGNQKRLESLRELAGKENLEYPSVTLPPQPHTKEGLDAYNEVIARVRMWVNLNLWQKLKLSRDDAKPLLRLKGFPSFPLVERQANEVDWWDMVCNVKKLINEKKEDGKVFWQNLAGYKRQEALRPYLSSEEDRKKGKKFARYQLGDLLLHLEKKHEGEDWGKVYDEAWERIDKKVEGLSKHIKLEEERRSEDAQSKAALTDWLRAKASFVIEGLKEADKDEFCRCELKLQKWYGDLRGKPFAIEAENSILDISGFSKQYNCAFIWQKDGVKKLNLYLIINYFKGGKLRFKKIKPEAFEANRFYTVINKKSGEIVPMEVNFNFDDPNLIILPLAFGKRQGREFIWNDLLSLETGSLKLANGRVIEKTLYNRRTRQDEPALFVALTFERREVLDSSNIKPMNLIGVDRGENIPAVIALTDPEGCPLSRFKDSLGNPTHILRIGESYKEKQRTIQAKKEVEQRRAGGYSRKYASKAKNLADDMVRNTARDLLYYAVTQDAMLIFENLSRGFGRQGKRTFMAERQYTRMEDWLTAKLAYEGLPSKTYLSKTLAQYTSKTCSNCGFTITSADYDRVLEKLKKTATGWMTTINGKELKVEGQITYYNRYKRQNVVKDLSVELDRLSEESVNNDISSWTKGRSGEALSLLKKRFSHRPVQEKFVCLNCGFETHADEQAALNIARSWLFLRSQEYKKYQTNKTTGNTDKRAFVETWQSFYRKKLKEVWKPAV

SEQ ID NO: 35828 - protein, 979 aa, synthetic construct
  REGION 1..979: note = engineered CasX variant
QEIKRINKIRRRLVKDSNTKKAGKTGPMKTLLVRVMTPDLRERLENLRKKPENIPQPISNTSRANLNKLLTDYTEMKKAILHVYWEEFQKDPVGLMSRVAQPASKKIDQNKLKPEMDEKGNLTTAGFACSQCGQPLFVYKLEQVSEKGKAYTNYFGRCNVAEHEKLILLAQLKPEKDSDEAVTYSLGKFGQRALDFYSIHVTKESTHPVKPLAQIAGNRYASTPVGKALSDACMGTIASFLSKYQDIIIEHQKVVKGNQKRLESLRELAGKENLEYPSVTLPPQPHTKEGLDAYNEVIARVRMWVNLNLWQKLKLSRDDAKPLLRLKGFPSFPLVERQANEVDWWDMVCNVKKLINEKKEDGKVFWQNLAGYKRQEALRPYLSSEEDRKKGKKFARYQLGDLLLHLEKKHEGEDWGKVYDEAWERIDKKVEGLSKHIKLEEERRSEDAQSKAALTDWLRAKASFVIEGLKEADKDEFCRCELKLQKWYGDLRGKPFAIEAENSILDISGFSKQYNCAFIWQKDGVKKLNLYLIINYFKGGKLRFKKIKPEAFEANRFYTVINKKSGEIVPMEVNFNFDDPNLIILPLAFGKRQGREFIWNDLLSLETGSLKLANGRVIEKTLYNRRTRQDEPALFVALTFERREVLDSSNIKPMNLIGVDRGENIPAVIALTDPEGCPLSRFKDSLGNPTHILRIGESYKEKQRTIQAKKEVEQRRAGGYSRKYASKAKNLADDMVRNTARDLLYYAVTQDAMLIFENLSRGFGRQGKRTFMAERQYTRMEDWLTAKLAYEGLPSKTYLSKTLAQYTSKTCSNCGFTITSADYDRVLEKLKKTATGWMTTINGKELKVEGQITYYNRYKRQNVVKDLSVELDRLSEESVNNDISSWTKGRSGEALSLLKKRFSHRPVQEKFVCLNCGFETHADEQAALNIARSWLFLRSQEYKKYQTNKTTGNTDKRAFVETWQSFYRKKLKEVWKPAV

SEQ ID NO: 35829 - protein, 979 aa, synthetic construct
  REGION 1..979: note = engineered CasX variant
QEIKRINKIRRRLVKDSNTKKAGKTGPMKTLLVRVMTPDLRERLENLRKKPENIPQPISNTSRANLNKLLTDYTEMKKAILHVYWEEFQKDPVGLMSRVAQPASKKIDQNKLKPEMDEKGNLTTAGFACSQCGQPLFVYKLEQVSEKGKAYTNYFGRCNVAEHEKLILLAQLKPEKDSDEAVTYSLGKFGQRALDFYSIHVTKESTHPVKPLAQIAGNRYASAPVGKALSDACMGTIASFLSKYQDIIIEHQKVVKGNQKRLESLRELAGKENLEYPSVTLPPQPHTKEGLDAYNEVIARVRMWVNLNLWQKLKLSRDDAKPLLRLKGFPSFPLVERQANEVDWWDMVCNVKKLINEKKEDGKVFWQNLAGYKRQEALRPYLSSEEDRKKGKKFARYQLGDLLLHLEKKHEGEDWGKVYDEAWERIDKKVEGLSKHIKLEEERRSEDAQSKAALTDWLRAKASFVIEGLKEADKDEFCRCELKLQKWYGDLRGKPFAIEAENSILDISGFSKQYNCAFIWQKDGVKKLNLYLIINYFKGGKLRFKKIKPEAFEANRFYTVINKKSGEIVPMEVNFNFDDPNLIILPLAFGKRQGREFIWNDLLSLETGSLKLANGRVIEKTLYNRRTRQDEPALFVALTFERREVLDSSNIKPMNLIGVDRGENIPAVIALTDPEGCPLSRFKDSLGNPTHILRIGESYKEKQRTIQAKKEVEQRRAGGYSRKYASKAKNLADDMVRNTARDLLYYAVTQDAMLIFENLSRGFGRQGKRTFMAERQYTRMEDWLTAKLAYEGLPSKTYLSKTLAQYTSKTCSNCGFTITSADYDRVLEKLKKTATGWMTTINGKELKVEGQITYYNRYKRQNVVKDLSVELDRLSEESVNNDISSWTKGRSGEALSLLKKRFSHRPVQEKFVCLNCGFETHADEQAALNIARSWLFLRSQEYKKYQTNKTTGNTDKRAFVETWQSFYRKKLKEVWKPAV

SEQ ID NO: 35830 - protein, 979 aa, synthetic construct
  REGION 1..979: note = engineered CasX variant
QEIKRINKIRRRLVKDSNTKKAGKTGPMKTLLVRVMTPDLRERLENLRKKPENIPQPISNTSRANLNKLLTDYTEMKKAILHVYWEEFQKDPVGLMSRVAQPASKKIDQNKLKPEMDEKGNLTTAGFACSQCGQPLFVYKLEQVSEKGKAYTNYFGRCNVAEHEKLILLAQLKPEKDSDEAVTYSLGKFGQRALDFYSIHVTKESTHPVKPLAQIAGNRYASVPVGKALSDACMGTIASFLSKYQDIIIEHQKVVKGNQKRLESLRELAGKENLEYPSVTLPPQPHTKEGLDAYNEVIARVRMWVNLNLWQKLKLSRDDAKPLLRLKGFPSFPLVERQANEVDWWDMVCNVKKLINEKKEDGKVFWQNLAGYKRQEALRPYLSSEEDRKKGKKFARYQLGDLLLHLEKKHEGEDWGKVYDEAWERIDKKVEGLSKHIKLEEERRSEDAQSKAALTDWLRAKASFVIEGLKEADKDEFCRCELKLQKWYGDLRGKPFAIEAENSILDISGFSKQYNCAFIWQKDGVKKLNLYLIINYFKGGKLRFKKIKPEAFEANRFYTVINKKSGEIVPMEVNFNFDDPNLIILPLAFGKRQGREFIWNDLLSLETGSLKLANGRVIEKTLYNRRTRQDEPALFVALTFERREVLDSSNIKPMNLIGVDRGENIPAVIALTDPEGCPLSRFKDSLGNPTHILRIGESYKEKQRTIQAKKEVEQRRAGGYSRKYASKAKNLADDMVRNTARDLLYYAVTQDAMLIFENLSRGFGRQGKRTFMAERQYTRMEDWLTAKLAYEGLPSKTYLSKTLAQYTSKTCSNCGFTITSADYDRVLEKLKKTATGWMTTINGKELKVEGQITYYNRYKRQNVVKDLSVELDRLSEESVNNDISSWTKGRSGEALSLLKKRFSHRPVQEKFVCLNCGFETHADEQAALNIARSWLFLRSQEYKKYQTNKTTGNTDKRAFVETWQSFYRKKLKEVWKPAV

SEQ ID NO: 35831 - protein, 979 aa, synthetic construct
  REGION 1..979: note = engineered CasX variant
QEIKRINKIRRRLVKDSNTKKAGKTGPMKTLLVRVMTPDLRERLENLRKKPENIPQPISNTSRANLNKLLTDYTEMKKAILHVYWEEFQKDPVGLMSRVAQPASKKIDQNKLKPEMDEKGNLTTAGFACSQCGQPLFVYKLEQVSEKGKAYTNYFGRCNVAEHEKLIKLAQLKPEKDSDEAVTYSLGKFGQRALDFYSIHVTKESTHPVKPLAQIAGNRYASGPVGKALSDACMGTIASFLSKYQDIIIEHQKVVKGNQKRLESLRELAGKENLEYPSVTLPPQPHTKEGLDAYNEVIARVRMWVNLNLWQKLKLSRDDAKPLLRLKGFPSFPLVERQANEVDWWDMVCNVKKLINEKKEDGKVFWQNLAGYKRQEALRPYLSSEEDRKKGKKFARYQLGDLLLHLEKKHEGEDWGKVYDEAWERIDKKVEGLSKHIKLEEERRSEDAQSKAALTDWLRAKASFVIEGLKEADKDEFCRCELKLQKWYGDLRGKPFAIEAENSILDISGFSKQYNCAFIWQKDGVKKLNLYLIINYFKGGKLRFKKIKPEAFEANRFYTVINKKSGEIVPMEVNFNFDDPNLIILPLAFGKRQGREFIWNDLLSLETGSLKLANGRVIEKTLYNRRTRQDEPALFVALTFERREVLDSSNIKPMNLIGVDRGENIPAVIALTDPEGCPLSRFKDSLGNPTHILRIGESYKEKQRTIQAKKEVEQRRAGGYSRKYASKAKNLADDMVRNTARDLLYYAVTQDAMLIFENLSRGFGRQGKRTFMAERQYTRMEDWLTAKLAYEGLPSKTYLSKTLAQYTSKTCSNCGFTITSADYDRVLEKLKKTATGWMTTINGKELKVEGQITYYNRYKRQNVVKDLSVELDRLSEESVNNDISSWTKGRSGEALSLLKKRFSHRPVQEKFVCLNCGFETHADEQAALNIARSWLFLRSQEYKKYQTNKTTGNTDKRAFVETWQSFYRKKLKEVWKPAV

SEQ ID NO: 35832 - protein, 978 aa, synthetic construct
  REGION 1..978: note = engineered CasX variant
QEIKRINKIRRRLVKDSNTKKAGKTGPMKTLLVRVMTPDLRERLENLRKKPENIPQPISNTSRANLNKLLTDYTEMKKAILHVYWEEFQKDPVGLMSRVAQPASKKIDQNKLKPEMDEKGNLTTAGFACSQCGQPLFVYKLEQVSEKGKAYTNYFGRCNVAEHEKLILLAQLKPEKDSDEAVTYSLGKFGQRALDFYSIHVTKESTHPVKPLAQIAGNRYASPVGKALSDACMGTIASFLSKYQDIIIEHQKVVKGNQKRLESLRELAGKENLEYPSVTLPPQPHTKEGLDAYNEVIARVRMWVNLNLWQKLKLSRDDAKPLLRLKGFPSFPLVERQANEVDWWDMVCNVKKLINEKKEDGKVFWQNLAGYKRQEALRPYLSSEEDRKKGKKFARYQLGDLLLHLEKKHEGEDWGKVYDEAWERIDKKVEGLSKHIKLEEERRSEDAQSKAALTDWLRAKASFVIEGLKEADKDEFCRCELKLQKWYGDLRGKPFAIEAENSILDISGFSKQYNCAFIWQKDGVKKLNLYLIINYFKGGKLRFKKIKPEAFEANRFYTVINKKSGEIVPMEVNFNFDDPNLIILPLAFGKRQGREFIWNDLLSLETGSLKLANGRVIEKTLYNRRTRQDEPALFVALTFERREVLDSSNIKPMNLIGVDRGENIPAVIALTDPEGCPLSRFKDSLGNPTHILRIGESYKEKQRTIQAKKEVEQRRAGGYSRKYASKAKNLADDMVRNTARDLLYYAVTQDAMLIFENLSRGFGRQGKRTFMAERQYTRMEDWLTAKLAYEGLPSKTYLSKTLAQYTSKTCSNCGFTITSADYDRVLEKLKKTATGWMTTINGKELKVEGQITYYNRYKRQNVVKDLSVELDRLSEESVNNDISSWTKGRSGEALSLLKKRFSHRPVQEKFVCLNCGFETHADEQAALNIARSWLFLRSQEYKKYQTNKTTGNTDKRAFVETWQSFYRKKLKEVWKPAV

SEQ ID NO: 35833 - protein, 978 aa, synthetic construct
  REGION 1..978: note = engineered CasX variant
QEIKRINKIRRRLVKDSNTKKAGKTGPMKTLLVRVMTPDLRERLENLRKKPENIPQPISNTSRANLNKLLTDYTEMKKAILHVYWEEFQKDPVGLMSRVAQPASKKIDQNKLKPEMDEKGNLTTAGFACSQCGQPLFVYKLEQVSEKGKAYTNYFGRCNVAEHEKLILLAQLKPEKDSDEAVTYSLGKFGQRALDFYSIHVTKESTHPVKPLAQIAGNRYASYPVGKALSDACMGTIASFLSKYQDIIIEHQKVVKGNQKRLESLRELAGKENLEYPSVTLPPQPHTKEGLDAYNEVIARVRMWVNLNLWQKLKLSRDDAKPLLRLKGFPSFPLVERQANEVDWWDMVCNVKKLINEKKEDGKVFWQNLAGYKRQEALRPYLSSEEDRKKGKKFARYQLGDLLLHLEKKHGEDWGKVYDEAWERIDKKVEGLSKHIKLEEERRSEDAQSKAALTDWLRAKASFVIEGLKEADKDEFCRCDLKLQKWYGDLRGKPFAIEAENSILDISGFSKQYNCAFIWQKDGVKKLNLYLIINYFKGGKLRFKKIKPEAFEANRFYTVINKKSGEIVPMEVNFNFDDPNLIILPLAFGKRQGREFIWNDLLSLETGSLKLANGRVIEKTLYNRRTRQDEPALFVALTFERREVLDSSNIKPMNLIGVDRGENIPAVIALTDPEGCPLSRFKDSLGNPTHILRIGESYKEKQRTIQAKKEVEQRRAGGYSRKYASKAKNLADDMVRNTARDLLYYAVTQDAMLIFENLSRGFGRQGKRTFMAERQYTRMEDWLTAKLAYEGLPSKTYLSKTLAQYTSKTCSNCGFTITSADYDRVLEKLKKTATGWMTTINGKELKVEGQITYYNRYKRQNVVKDLSVELDRLSEESVNNDISSWTKGRSGEALSLLKKRFSHRPVQEKFVCLNCGFETHADEQAALNIARSWLFLRSQEYKKYQTNKTTGNTDKRAFVETWQSFYRKKLKEVWKPAV

SEQ ID NO: 35834 - protein, 978 aa, synthetic construct
  REGION 1..978: note = engineered CasX variant
QEIKRINKIRRRLVKDSNTKKAGKTGPMKTLLVRVMTPDLRERLENLRKKPENIPQPISNTSRANLNKLLTDYTEMKKAILHVYWEEFQKDPVGLMSRVAQPASKKIDQNKLKPEMDEKGNLTTAGFACSQCGQPLFVYKLEQVSEKGKAYTNYFGRCNVAEHEKLILLAQLKPEKDSDEAVTYSLGKFGQRALDFYSIHVTKESTHPVKPLAQIAGNRYASHPVGKALSDACMGTIASFLSKYQDIIIEHQKVVKGNQKRLESLRELAGKENLEYPSVTLPPQPHTKEGLDAYNEVIARVRMWVNLNLWQKLKLSRDDAKPLLRLKGFPSFPLVERQANEVDWWDMVCNVKKLINEKKEDGKVFWQNLAGYKRQEALRPYLSSEEDRKKGKKFARYQLGDLLLHLEKKHGEDWGKVYDEAWERIDKKVEGLSKHIKLEEERRSEDAQSKAALTDWLRAKASFVIEGLKEADKDEFCRCDLKLQKWYGDLRGKPFAIEAENSILDISGFSKQYNCAFIWQKDGVKKLNLYLIINYFKGGKLRFKKIKPEAFEANRFYTVINKKSGEIVPMEVNFNFDDPNLIILPLAFGKRQGREFIWNDLLSLETGSLKLANGRVIEKTLYNRRTRQDEPALFVALTFERREVLDSSNIKPMNLIGVDRGENIPAVIALTDPEGCPLSRFKDSLGNPTHILRIGESYKEKQRTIQAKKEVEQRRAGGYSRKYASKAKNLADDMVRNTARDLLYYAVTQDAMLIFENLSRGFGRQGKRTFMAERQYTRMEDWLTAKLAYEGLPSKTYLSKTLAQYTSKTCSNCGFTITSADYDRVLEKLKKTATGWMTTINGKELKVEGQITYYNRYKRQNVVKDLSVELDRLSEESVNNDISSWTKGRSGEALSLLKKRFSHRPVQEKFVCLNCGFETHADEQAALNIARSWLFLRSQEYKKYQTNKTTGNTDKRAFVETWQSFYRKKLKEVWKPAV

SEQ ID NO: 35835 - protein, 978 aa, synthetic construct
  REGION 1..978: note = engineered CasX variant
QEIKRINKIRRRLVKDSNTKKAGKTGPMKTLLVRVMTPDLRERLENLRKKPENIPQPISNTSRANLNKLLTDYTEMKKAILHVYWEEFQKDPVGLMSRVAQPASKKIDQNKLKPEMDEKGNLTTAGFACSQCGQPLFVYKLEQVSEKGKAYTNYFGRCNVAEHEKLILLAQLKPEKDSDEAVTYSLGKFGQRALDFYSIHVTKESTHPVKPLAQIAGNRYASSPVGKALSDACMGTIASFLSKYQDIIIEHQKVVKGNQKRLESLRELAGKENLEYPSVTLPPQPHTKEGLDAYNEVIARVRMWVNLNLWQKLKLSRDDAKPLLRLKGFPSFPLVERQANEVDWWDMVCNVKKLINEKKEDGKVFWQNLAGYKRQEALRPYLSSEEDRKKGKKFARYQLGDLLLHLEKKHGEDWGKVYDEAWERIDKKVEGLSKHIKLEEERRSEDAQSKAALTDWLRAKASFVIEGLKEADKDEFCRCDLKLQKWYGDLRGKPFAIEAENSILDISGFSKQYNCAFIWQKDGVKKLNLYLIINYFKGGKLRFKKIKPEAFEANRFYTVINKKSGEIVPMEVNFNFDDPNLIILPLAFGKRQGREFIWNDLLSLETGSLKLANGRVIEKTLYNRRTRQDEPALFVALTFERREVLDSSNIKPMNLIGVDRGENIPAVIALTDPEGCPLSRFKDSLGNPTHILRIGESYKEKQRTIQAKKEVEQRRAGGYSRKYASKAKNLADDMVRNTARDLLYYAVTQDAMLIFENLSRGFGRQGKRTFMAERQYTRMEDWLTAKLAYEGLPSKTYLSKTLAQYTSKTCSNCGFTITSADYDRVLEKLKKTATGWMTTINGKELKVEGQITYYNRYKRQNVVKDLSVELDRLSEESVNNDISSWTKGRSGEALSLLKKRFSHRPVQEKFVCLNCGFETHADEQAALNIARSWLFLRSQEYKKYQTNKTTGNTDKRAFVETWQSFYRKKLKEVWKPAV

SEQ ID NO: 35836 - protein, 978 aa, synthetic construct
  REGION 1..978: note = engineered CasX variant
QEIKRINKIRRRLVKDSNTKKAGKTGPMKTLLVRVMTPDLRERLENLRKKPENIPQPISNTSRANLNKLLTDYTEMKKAILHVYWEEFQKDPVGLMSRVAQPASKKIDQNKLKPEMDEKGNLTTAGFACSQCGQPLFVYKLEQVSEKGKAYTNYFGRCNVAEHEKLILLAQLKPEKDSDEAVTYSLGKFGQRALDFYSIHVTKESTHPVKPLAQIAGNRYASTPVGKALSDACMGTIASFLSKYQDIIIEHQKVVKGNQKRLESLRELAGKENLEYPSVTLPPQPHTKEGLDAYNEVIARVRMWVNLNLWQKLKLSRDDAKPLLRLKGFPSFPLVERQANEVDWWDMVCNVKKLINEKKEDGKVFWQNLAGYKRQEALRPYLSSEEDRKKGKKFARYQLGDLLLHLEKKHGEDWGKVYDEAWERIDKKVEGLSKHIKLEEERRSEDAQSKAALTDWLRAKASFVIEGLKEADKDEFCRCDLKLQKWYGDLRGKPFAIEAENSILDISGFSKQYNCAFIWQKDGVKKLNLYLIINYFKGGKLRFKKIKPEAFEANRFYTVINKKSGEIVPMEVNFNFDDPNLIILPLAFGKRQGREFIWNDLLSLETGSLKLANGRVIEKTLYNRRTRQDEPALFVALTFERREVLDSSNIKPMNLIGVDRGENIPAVIALTDPEGCPLSRFKDSLGNPTHILRIGESYKEKQRTIQAKKEVEQRRAGGYSRKYASKAKNLADDMVRNTARDLLYYAVTQDAMLIFENLSRGFGRQGKRTFMAERQYTRMEDWLTAKLAYEGLPSKTYLSKTLAQYTSKTCSNCGFTITSADYDRVLEKLKKTATGWMTTINGKELKVEGQITYYNRYKRQNVVKDLSVELDRLSEESVNNDISSWTKGRSGEALSLLKKRFSHRPVQEKFVCLNCGFETHADEQAALNIARSWLFLRSQEYKKYQTNKTTGNTDKRAFVETWQSFYRKKLKEVWKPAV

SEQ ID NO: 35837 - protein, 978 aa, synthetic construct
  REGION 1..978: note = engineered CasX variant
QEIKRINKIRRRLVKDSNTKKAGKTGPMKTLLVRVMTPDLRERLENLRKKPENIPQPISNTSRANLNKLLTDYTEMKKAILHVYWEEFQKDPVGLMSRVAQPASKKIDQNKLKPEMDEKGNLTTAGFACSQCGQPLFVYKLEQVSEKGKAYTNYFGRCNVAEHEKLILLAQLKPEKDSDEAVTYSLGKFGQRALDFYSIHVTKESTHPVKPLAQIAGNRYASAPVGKALSDACMGTIASFLSKYQDIIIEHQKVVKGNQKRLESLRELAGKENLEYPSVTLPPQPHTKEGLDAYNEVIARVRMWVNLNLWQKLKLSRDDAKPLLRLKGFPSFPLVERQANEVDWWDMVCNVKKLINEKKEDGKVFWQNLAGYKRQEALRPYLSSEEDRKKGKKFARYQLGDLLLHLEKKHGEDWGKVYDEAWERIDKKVEGLSKHIKLEEERRSEDAQSKAALTDWLRAKASFVIEGLKEADKDEFCRCDLKLQKWYGDLRGKPFAIEAENSILDISGFSKQYNCAFIWQKDGVKKLNLYLIINYFKGGKLRFKKIKPEAFEANRFYTVINKKSGEIVPMEVNFNFDDPNLIILPLAFGKRQGREFIWNDLLSLETGSLKLANGRVIEKTLYNRRTRQDEPALFVALTFERREVLDSSNIKPMNLIGVDRGENIPAVIALTDPEGCPLSRFKDSLGNPTHILRIGESYKEKQRTIQAKKEVEQRRAGGYSRKYASKAKNLADDMVRNTARDLLYYAVTQDAMLIFENLSRGFGRQGKRTFMAERQYTRMEDWLTAKLAYEGLPSKTYLSKTLAQYTSKTCSNCGFTITSADYDRVLEKLKKTATGWMTTINGKELKVEGQITYYNRYKRQNVVKDLSVELDRLSEESVNNDISSWTKGRSGEALSLLKKRFSHRPVQEKFVCLNCGFETHADEQAALNIARSWLFLRSQEYKKYQTNKTTGNTDKRAFVETWQSFYRKKLKEVWKPAV

SEQ ID NO: 35838 - protein, 978 aa, synthetic construct
  REGION 1..978: note = engineered CasX variant
QEIKRINKIRRRLVKDSNTKKAGKTGPMKTLLVRVMTPDLRERLENLRKKPENIPQPISNTSRANLNKLLTDYTEMKKAILHVYWEEFQKDPVGLMSRVAQPASKKIDQNKLKPEMDEKGNLTTAGFACSQCGQPLFVYKLEQVSEKGKAYTNYFGRCNVAEHEKLILLAQLKPEKDSDEAVTYSLGKFGQRALDFYSIHVTKESTHPVKPLAQIAGNRYASVPVGKALSDACMGTIASFLSKYQDIIIEHQKVVKGNQKRLESLRELAGKENLEYPSVTLPPQPHTKEGLDAYNEVIARVRMWVNLNLWQKLKLSRDDAKPLLRLKGFPSFPLVERQANEVDWWDMVCNVKKLINEKKEDGKVFWQNLAGYKRQEALRPYLSSEEDRKKGKKFARYQLGDLLLHLEKKHGEDWGKVYDEAWERIDKKVEGLSKHIKLEEERRSEDAQSKAALTDWLRAKASFVIEGLKEADKDEFCRCDLKLQKWYGDLRGKPFAIEAENSILDISGFSKQYNCAFIWQKDGVKKLNLYLIINYFKGGKLRFKKIKPEAFEANRFYTVINKKSGEIVPMEVNFNFDDPNLIILPLAFGKRQGREFIWNDLLSLETGSLKLANGRVIEKTLYNRRTRQDEPALFVALTFERREVLDSSNIKPMNLIGVDRGENIPAVIALTDPEGCPLSRFKDSLGNPTHILRIGESYKEKQRTIQAKKEVEQRRAGGYSRKYASKAKNLADDMVRNTARDLLYYAVTQDAMLIFENLSRGFGRQGKRTFMAERQYTRMEDWLTAKLAYEGLPSKTYLSKTLAQYTSKTCSNCGFTITSADYDRVLEKLKKTATGWMTTINGKELKVEGQITYYNRYKRQNVVKDLSVELDRLSEESVNNDISSWTKGRSGEALSLLKKRFSHRPVQEKFVCLNCGFETHADEQAALNIARSWLFLRSQEYKKYQTNKTTGNTDKRAFVETWQSFYRKKLKEVWKPAV

SEQ ID NO: 35839 - protein, 978 aa, synthetic construct
  REGION 1..978: note = engineered CasX variant
QEIKRINKIRRRLVKDSNTKKAGKTGPMKTLLVRVMTPDLRERLENLRKKPENIPQPISNTSRANLNKLLTDYTEMKKAILHVYWEEFQKDPVGLMSRVAQPASKKIDQNKLKPEMDEKGNLTTAGFACSQCGQPLFVYKLEQVSEKGKAYTNYFGRCNVAEHEKLIKLAQLKPEKDSDEAVTYSLGKFGQRALDFYSIHVTKESTHPVKPLAQIAGNRYASGPVGKALSDACMGTIASFLSKYQDIIIEHQKVVKGNQKRLESLRELAGKENLEYPSVTLPPQPHTKEGLDAYNEVIARVRMWVNLNLWQKLKLSRDDAKPLLRLKGFPSFPLVERQANEVDWWDMVCNVKKLINEKKEDGKVFWQNLAGYKRQEALRPYLSSEEDRKKGKKFARYQLGDLLLHLEKKHGEDWGKVYDEAWERIDKKVEGLSKHIKLEEERRSEDAQSKAALTDWLRAKASFVIEGLKEADKDEFCRCDLKLQKWYGDLRGKPFAIEAENSILDISGFSKQYNCAFIWQKDGVKKLNLYLIINYFKGGKLRFKKIKPEAFEANRFYTVINKKSGEIVPMEVNFNFDDPNLIILPLAFGKRQGREFIWNDLLSLETGSLKLANGRVIEKTLYNRRTRQDEPALFVALTFERREVLDSSNIKPMNLIGVDRGENIPAVIALTDPEGCPLSRFKDSLGNPTHILRIGESYKEKQRTIQAKKEVEQRRAGGYSRKYASKAKNLADDMVRNTARDLLYYAVTQDAMLIFENLSRGFGRQGKRTFMAERQYTRMEDWLTAKLAYEGLPSKTYLSKTLAQYTSKTCSNCGFTITSADYDRVLEKLKKTATGWMTTINGKELKVEGQITYYNRYKRQNVVKDLSVELDRLSEESVNNDISSWTKGRSGEALSLLKKRFSHRPVQEKFVCLNCGFETHADEQAALNIARSWLFLRSQEYKKYQTNKTTGNTDKRAFVETWQSFYRKKLKEVWKPAV

SEQ ID NO: 35840 - protein, 977 aa, synthetic construct
  REGION 1..977: note = engineered CasX variant
QEIKRINKIRRRLVKDSNTKKAGKTGPMKTLLVRVMTPDLRERLENLRKKPENIPQPISNTSRANLNKLLTDYTEMKKAILHVYWEEFQKDPVGLMSRVAQPASKKIDQNKLKPEMDEKGNLTTAGFACSQCGQPLFVYKLEQVSEKGKAYTNYFGRCNVAEHEKLILLAQLKPEKDSDEAVTYSLGKFGQRALDFYSIHVTKESTHPVKPLAQIAGNRYASPVGKALSDACMGTIASFLSKYQDIIIEHQKVVKGNQKRLESLRELAGKENLEYPSVTLPPQPHTKEGLDAYNEVIARVRMWVNLNLWQKLKLSRDDAKPLLRLKGFPSFPLVERQANEVDWWDMVCNVKKLINEKKEDGKVFWQNLAGYKRQEALRPYLSSEEDRKKGKKFARYQLGDLLLHLEKKHGEDWGKVYDEAWERIDKKVEGLSKHIKLEEERRSEDAQSKAALTDWLRAKASFVIEGLKEADKDEFCRCDLKLQKWYGDLRGKPFAIEAENSILDISGFSKQYNCAFIWQKDGVKKLNLYLIINYFKGGKLRFKKIKPEAFEANRFYTVINKKSGEIVPMEVNFNFDDPNLIILPLAFGKRQGREFIWNDLLSLETGSLKLANGRVIEKTLYNRRTRQDEPALFVALTFERREVLDSSNIKPMNLIGVDRGENIPAVIALTDPEGCPLSRFKDSLGNPTHILRIGESYKEKQRTIQAKKEVEQRRAGGYSRKYASKAKNLADDMVRNTARDLLYYAVTQDAMLIFENLSRGFGRQGKRTFMAERQYTRMEDWLTAKLAYEGLPSKTYLSKTLAQYTSKTCSNCGFTITSADYDRVLEKLKKTATGWMTTINGKELKVEGQITYYNRYKRQNVVKDLSVELDRLSEESVNNDISSWTKGRSGEALSLLKKRFSHRPVQEKFVCLNCGFETHADEQAALNIARSWLFLRSQEYKKYQTNKTTGNTDKRAFVETWQSFYRKKLKEVWKPAV

SEQ ID NO: 35841 - protein, 978 aa, synthetic construct
  REGION 1..978: note = engineered CasX variant
QEIKRINKIRRRLVKDSNTKKAGKTGPMKTLLVRVMTPDLRERLENLRKKPENIPQPISNTSRANLNKLLTDYTEMKKAILHVYWEEFQKDPVGLMSRVAQPASKKIDQNKLKPEMDEKGNLTTAGFACSQCGQPLFVYKLEQVSEKGKAYTNYFGRCNVAEHEKLILLAQLKPEKDSDEAVTYSLGKFGQRALDFYSIHVTKESTHPVKPLAQIAGNRYASYPVGKALSDACMGTIASFLSKYQDIIIEHQKVVKGNQKRLESLRELAGKENLEYPSVTLPPQPHTKEGLDAYNEVIARVRMWVNLNLWQKLKLSRDDAKPLLRLKGFPSFPLVERQANEVDWWDMVCNVKKLINEKKEDGKVFWQNLAGYKRQEALRPYLSSEEDRKKGKKFARYQLGDLLLHLEKKHGEDWGKVYDEAWERIDKKVEGLSKHIKLEEERRSEDAQSKAALTDWLRAKASFVIEGLKEADKDEFCRCELKLQKWYGDLRGKPFAIEAENSILDISGFSKQYNCAFIWQKDGVKKLNLYLIINYFKGGKLRFKKIKPEAFEANRFYTVINKKSGEIVPMEVNFNFDDPNLIILPLAFGKRFGREFIWNDLLSLETGSLKLANGRVIEKTLYNRRTRQDEPALFVALTFERREVLDSSNIKPMNLIGVDRGENIPAVIALTDPEGCPLSRFKDSLGNPTHILRIGESYKEKQRTIQAKKEVEQRRAGGYSRKYASKAKNLADDMVRNTARDLLYYAVTQDAMLIFENLSRGFGRQGKRTFMAERQYTRMEDWLTAKLAYEGLPSKTYLSKTLAQYTSKTCSNCGFTITSADYDRVLEKLKKTATGWMTTINGKELKVEGQITYYNRYKRQNVVKDLSVELDRLSEESVNNDISSWTKGRSGEALSLLKKRFSHRPVQEKFVCLNCGFETHADEQAALNIARSWLFLRSQEYKKYQTNKTTGNTDKRAFVETWQSFYRKKLKEVWKPAV

SEQ ID NO: 35842 - protein, 978 aa, synthetic construct
  REGION 1..978: note = engineered CasX variant
QEIKRINKIRRRLVKDSNTKKAGKTGPMKTLLVRVMTPDLRERLENLRKKPENIPQPISNTSRANLNKLLTDYTEMKKAILHVYWEEFQKDPVGLMSRVAQPASKKIDQNKLKPEMDEKGNLTTAGFACSQCGQPLFVYKLEQVSEKGKAYTNYFGRCNVAEHEKLILLAQLKPEKDSDEAVTYSLGKFGQRALDFYSIHVTKESTHPVKPLAQIAGNRYASHPVGKALSDACMGTIASFLSKYQDIIIEHQKVVKGNQKRLESLRELAGKENLEYPSVTLPPQPHTKEGLDAYNEVIARVRMWVNLNLWQKLKLSRDDAKPLLRLKGFPSFPLVERQANEVDWWDMVCNVKKLINEKKEDGKVFWQNLAGYKRQEALRPYLSSEEDRKKGKKFARYQLGDLLLHLEKKHGEDWGKVYDEAWERIDKKVEGLSKHIKLEEERRSEDAQSKAALTDWLRAKASFVIEGLKEADKDEFCRCELKLQKWYGDLRGKPFAIEAENSILDISGFSKQYNCAFIWQKDGVKKLNLYLIINYFKGGKLRFKKIKPEAFEANRFYTVINKKSGEIVPMEVNFNFDDPNLIILPLAFGKRFGREFIWNDLLSLETGSLKLANGRVIEKTLYNRRTRQDEPALFVALTFERREVLDSSNIKPMNLIGVDRGENIPAVIALTDPEGCPLSRFKDSLGNPTHILRIGESYKEKQRTIQAKKEVEQRRAGGYSRKYASKAKNLADDMVRNTARDLLYYAVTQDAMLIFENLSRGFGRQGKRTFMAERQYTRMEDWLTAKLAYEGLPSKTYLSKTLAQYTSKTCSNCGFTITSADYDRVLEKLKKTATGWMTTINGKELKVEGQITYYNRYKRQNVVKDLSVELDRLSEESVNNDISSWTKGRSGEALSLLKKRFSHRPVQEKFVCLNCGFETHADEQAALNIARSWLFLRSQEYKKYQTNKTTGNTDKRAFVETWQSFYRKKLKEVWKPAV

SEQ ID NO: 35843 - protein, 978 aa, synthetic construct
  REGION 1..978: note = engineered CasX variant
QEIKRINKIRRRLVKDSNTKKAGKTGPMKTLLVRVMTPDLRERLENLRKKPENIPQPISNTSRANLNKLLTDYTEMKKAILHVYWEEFQKDPVGLMSRVAQPASKKIDQNKLKPEMDEKGNLTTAGFACSQCGQPLFVYKLEQVSEKGKAYTNYFGRCNVAEHEKLILLAQLKPEKDSDEAVTYSLGKFGQRALDFYSIHVTKESTHPVKPLAQIAGNRYASSPVGKALSDACMGTIASFLSKYQDIIIEHQKVVKGNQKRLESLRELAGKENLEYPSVTLPPQPHTKEGLDAYNEVIARVRMWVNLNLWQKLKLSRDDAKPLLRLKGFPSFPLVERQANEVDWWDMVCNVKKLINEKKEDGKVFWQNLAGYKRQEALRPYLSSEEDRKKGKKFARYQLGDLLLHLEKKHGEDWGKVYDEAWERIDKKVEGLSKHIKLEEERRSEDAQSKAALTDWLRAKASFVIEGLKEADKDEFCRCELKLQKWYGDLRGKPFAIEAENSILDISGFSKQYNCAFIWQKDGVKKLNLYLIINYFKGGKLRFKKIKPEAFEANRFYTVINKKSGEIVPMEVNFNFDDPNLIILPLAFGKRFGREFIWNDLLSLETGSLKLANGRVIEKTLYNRRTRQDEPALFVALTFERREVLDSSNIKPMNLIGVDRGENIPAVIALTDPEGCPLSRFKDSLGNPTHILRIGESYKEKQRTIQAKKEVEQRRAGGYSRKYASKAKNLADDMVRNTARDLLYYAVTQDAMLIFENLSRGFGRQGKRTFMAERQYTRMEDWLTAKLAYEGLPSKTYLSKTLAQYTSKTCSNCGFTITSADYDRVLEKLKKTATGWMTTINGKELKVEGQITYYNRYKRQNVVKDLSVELDRLSEESVNNDISSWTKGRSGEALSLLKKRFSHRPVQEKFVCLNCGFETHADEQAALNIARSWLFLRSQEYKKYQTNKTTGNTDKRAFVETWQSFYRKKLKEVWKPAV

SEQ ID NO: 35844 - protein, 978 aa, synthetic construct
  REGION 1..978: note = engineered CasX variant
QEIKRINKIRRRLVKDSNTKKAGKTGPMKTLLVRVMTPDLRERLENLRKKPENIPQPISNTSRANLNKLLTDYTEMKKAILHVYWEEFQKDPVGLMSRVAQPASKKIDQNKLKPEMDEKGNLTTAGFACSQCGQPLFVYKLEQVSEKGKAYTNYFGRCNVAEHEKLILLAQLKPEKDSDEAVTYSLGKFGQRALDFYSIHVTKESTHPVKPLAQIAGNRYASTPVGKALSDACMGTIASFLSKYQDIIIEHQKVVKGNQKRLESLRELAGKENLEYPSVTLPPQPHTKEGLDAYNEVIARVRMWVNLNLWQKLKLSRDDAKPLLRLKGFPSFPLVERQANEVDWWDMVCNVKKLINEKKEDGKVFWQNLAGYKRQEALRPYLSSEEDRKKGKKFARYQLGDLLLHLEKKHGEDWGKVYDEAWERIDKKVEGLSKHIKLEEERRSEDAQSKAALTDWLRAKASFVIEGLKEADKDEFCRCELKLQKWYGDLRGKPFAIEAENSILDISGFSKQYNCAFIWQKDGVKKLNLYLIINYFKGGKLRFKKIKPEAFEANRFYTVINKKSGEIVPMEVNFNFDDPNLIILPLAFGKRFGREFIWNDLLSLETGSLKLANGRVIEKTLYNRRTRQDEPALFVALTFERREVLDSSNIKPMNLIGVDRGENIPAVIALTDPEGCPLSRFKDSLGNPTHILRIGESYKEKQRTIQAKKEVEQRRAGGYSRKYASKAKNLADDMVRNTARDLLYYAVTQDAMLIFENLSRGFGRQGKRTFMAERQYTRMEDWLTAKLAYEGLPSKTYLSKTLAQYTSKTCSNCGFTITSADYDRVLEKLKKTATGWMTTINGKELKVEGQITYYNRYKRQNVVKDLSVELDRLSEESVNNDISSWTKGRSGEALSLLKKRFSHRPVQEKFVCLNCGFETHADEQAALNIARSWLFLRSQEYKKYQTNKTTGNTDKRAFVETWQSFYRKKLKEVWKPAV

SEQ ID NO: 35845 - protein, 978 aa, synthetic construct
  REGION 1..978: note = engineered CasX variant
QEIKRINKIRRRLVKDSNTKKAGKTGPMKTLLVRVMTPDLRERLENLRKKPENIPQPISNTSRANLNKLLTDYTEMKKAILHVYWEEFQKDPVGLMSRVAQPASKKIDQNKLKPEMDEKGNLTTAGFACSQCGQPLFVYKLEQVSEKGKAYTNYFGRCNVAEHEKLILLAQLKPEKDSDEAVTYSLGKFGQRALDFYSIHVTKESTHPVKPLAQIAGNRYASAPVGKALSDACMGTIASFLSKYQDIIIEHQKVVKGNQKRLESLRELAGKENLEYPSVTLPPQPHTKEGLDAYNEVIARVRMWVNLNLWQKLKLSRDDAKPLLRLKGFPSFPLVERQANEVDWWDMVCNVKKLINEKKEDGKVFWQNLAGYKRQEALRPYLSSEEDRKKGKKFARYQLGDLLLHLEKKHGEDWGKVYDEAWERIDKKVEGLSKHIKLEEERRSEDAQSKAALTDWLRAKASFVIEGLKEADKDEFCRCELKLQKWYGDLRGKPFAIEAENSILDISGFSKQYNCAFIWQKDGVKKLNLYLIINYFKGGKLRFKKIKPEAFEANRFYTVINKKSGEIVPMEVNFNFDDPNLIILPLAFGKRFGREFIWNDLLSLETGSLKLANGRVIEKTLYNRRTRQDEPALFVALTFERREVLDSSNIKPMNLIGVDRGENIPAVIALTDPEGCPLSRFKDSLGNPTHILRIGESYKEKQRTIQAKKEVEQRRAGGYSRKYASKAKNLADDMVRNTARDLLYYAVTQDAMLIFENLSRGFGRQGKRTFMAERQYTRMEDWLTAKLAYEGLPSKTYLSKTLAQYTSKTCSNCGFTITSADYDRVLEKLKKTATGWMTTINGKELKVEGQITYYNRYKRQNVVKDLSVELDRLSEESVNNDISSWTKGRSGEALSLLKKRFSHRPVQEKFVCLNCGFETHADEQAALNIARSWLFLRSQEYKKYQTNKTTGNTDKRAFVETWQSFYRKKLKEVWKPAV

SEQ ID NO: 35846 - protein, 978 aa, synthetic construct
  REGION 1..978: note = engineered CasX variant
QEIKRINKIRRRLVKDSNTKKAGKTGPMKTLLVRVMTPDLRERLENLRKKPENIPQPISNTSRANLNKLLTDYTEMKKAILHVYWEEFQKDPVGLMSRVAQPASKKIDQNKLKPEMDEKGNLTTAGFACSQCGQPLFVYKLEQVSEKGKAYTNYFGRCNVAEHEKLILLAQLKPEKDSDEAVTYSLGKFGQRALDFYSIHVTKESTHPVKPLAQIAGNRYASVPVGKALSDACMGTIASFLSKYQDIIIEHQKVVKGNQKRLESLRELAGKENLEYPSVTLPPQPHTKEGLDAYNEVIARVRMWVNLNLWQKLKLSRDDAKPLLRLKGFPSFPLVERQANEVDWWDMVCNVKKLINEKKEDGKVFWQNLAGYKRQEALRPYLSSEEDRKKGKKFARYQLGDLLLHLEKKHGEDWGKVYDEAWERIDKKVEGLSKHIKLEEERRSEDAQSKAALTDWLRAKASFVIEGLKEADKDEFCRCELKLQKWYGDLRGKPFAIEAENSILDISGFSKQYNCAFIWQKDGVKKLNLYLIINYFKGGKLRFKKIKPEAFEANRFYTVINKKSGEIVPMEVNFNFDDPNLIILPLAFGKRFGREFIWNDLLSLETGSLKLANGRVIEKTLYNRRTRQDEPALFVALTFERREVLDSSNIKPMNLIGVDRGENIPAVIALTDPEGCPLSRFKDSLGNPTHILRIGESYKEKQRTIQAKKEVEQRRAGGYSRKYASKAKNLADDMVRNTARDLLYYAVTQDAMLIFENLSRGFGRQGKRTFMAERQYTRMEDWLTAKLAYEGLPSKTYLSKTLAQYTSKTCSNCGFTITSADYDRVLEKLKKTATGWMTTINGKELKVEGQITYYNRYKRQNVVKDLSVELDRLSEESVNNDISSWTKGRSGEALSLLKKRFSHRPVQEKFVCLNCGFETHADEQAALNIARSWLFLRSQEYKKYQTNKTTGNTDKRAFVETWQSFYRKKLKEVWKPAV

SEQ ID NO: 35847 - protein, 978 aa, synthetic construct
  REGION 1..978: note = engineered CasX variant
QEIKRINKIRRRLVKDSNTKKAGKTGPMKTLLVRVMTPDLRERLENLRKKPENIPQPISNTSRANLNKLLTDYTEMKKAILHVYWEEFQKDPVGLMSRVAQPASKKIDQNKLKPEMDEKGNLTTAGFACSQCGQPLFVYKLEQVSEKGKAYTNYFGRCNVAEHEKLIKLAQLKPEKDSDEAVTYSLGKFGQRALDFYSIHVTKESTHPVKPLAQIAGNRYASGPVGKALSDACMGTIASFLSKYQDIIIEHQKVVKGNQKRLESLRELAGKENLEYPSVTLPPQPHTKEGLDAYNEVIARVRMWVNLNLWQKLKLSRDDAKPLLRLKGFPSFPLVERQANEVDWWDMVCNVKKLINEKKEDGKVFWQNLAGYKRQEALRPYLSSEEDRKKGKKFARYQLGDLLLHLEKKHGEDWGKVYDEAWERIDKKVEGLSKHIKLEEERRSEDAQSKAALTDWLRAKASFVIEGLKEADKDEFCRCELKLQKWYGDLRGKPFAIEAENSILDISGFSKQYNCAFIWQKDGVKKLNLYLIINYFKGGKLRFKKIKPEAFEANRFYTVINKKSGEIVPMEVNFNFDDPNLIILPLAFGKRFGREFIWNDLLSLETGSLKLANGRVIEKTLYNRRTRQDEPALFVALTFERREVLDSSNIKPMNLIGVDRGENIPAVIALTDPEGCPLSRFKDSLGNPTHILRIGESYKEKQRTIQAKKEVEQRRAGGYSRKYASKAKNLADDMVRNTARDLLYYAVTQDAMLIFENLSRGFGRQGKRTFMAERQYTRMEDWLTAKLAYEGLPSKTYLSKTLAQYTSKTCSNCGFTITSADYDRVLEKLKKTATGWMTTINGKELKVEGQITYYNRYKRQNVVKDLSVELDRLSEESVNNDISSWTKGRSGEALSLLKKRFSHRPVQEKFVCLNCGFETHADEQAALNIARSWLFLRSQEYKKYQTNKTTGNTDKRAFVETWQSFYRKKLKEVWKPAV

SEQ ID NO: 35848 - protein, 977 aa, synthetic construct
  REGION 1..977: note = engineered CasX variant
QEIKRINKIRRRLVKDSNTKKAGKTGPMKTLLVRVMTPDLRERLENLRKKPENIPQPISNTSRANLNKLLTDYTEMKKAILHVYWEEFQKDPVGLMSRVAQPASKKIDQNKLKPEMDEKGNLTTAGFACSQCGQPLFVYKLEQVSEKGKAYTNYFGRCNVAEHEKLILLAQLKPEKDSDEAVTYSLGKFGQRALDFYSIHVTKESTHPVKPLAQIAGNRYASPVGKALSDACMGTIASFLSKYQDIIIEHQKVVKGNQKRLESLRELAGKENLEYPSVTLPPQPHTKEGLDAYNEVIARVRMWVNLNLWQKLKLSRDDAKPLLRLKGFPSFPLVERQANEVDWWDMVCNVKKLINEKKEDGKVFWQNLAGYKRQEALRPYLSSEEDRKKGKKFARYQLGDLLLHLEKKHGEDWGKVYDEAWERIDKKVEGLSKHIKLEEERRSEDAQSKAALTDWLRAKASFVIEGLKEADKDEFCRCELKLQKWYGDLRGKPFAIEAENSILDISGFSKQYNCAFIWQKDGVKKLNLYLIINYFKGGKLRFKKIKPEAFEANRFYTVINKKSGEIVPMEVNFNFDDPNLIILPLAFGKRFGREFIWNDLLSLETGSLKLANGRVIEKTLYNRRTRQDEPALFVALTFERREVLDSSNIKPMNLIGVDRGENIPAVIALTDPEGCPLSRFKDSLGNPTHILRIGESYKEKQRTIQAKKEVEQRRAGGYSRKYASKAKNLADDMVRNTARDLLYYAVTQDAMLIFENLSRGFGRQGKRTFMAERQYTRMEDWLTAKLAYEGLPSKTYLSKTLAQYTSKTCSNCGFTITSADYDRVLEKLKKTATGWMTTINGKELKVEGQITYYNRYKRQNVVKDLSVELDRLSEESVNNDISSWTKGRSGEALSLLKKRFSHRPVQEKFVCLNCGFETHADEQAALNIARSWLFLRSQEYKKYQTNKTTGNTDKRAFVETWQSFYRKKLKEVWKPAV

SEQ ID NO: 35849 - protein, 978 aa, synthetic construct
  REGION 1..978: note = engineered CasX variant
QEIKRINKIRRRLVKDSNTKKAGKTGPMKTLLVRVMTPDLRERLENLRKKPENIPQPISNTSRANLNKLLTDYTEMKKAILHVYWEEFQKDPVGLMSRVAQPASKKIDQNKLKPEMDEKGNLTTAGFACSQCGQPLFVYKLEQVSEKGKAYTNYFGRCNVAEHEKLILLAQLKPEKDSDEAVTYSLGKFGQRALDFYSIHVTKESTHPVKPLAQIAGNRYASYPVGKALSDACMGTIASFLSKYQDIIIEHQKVVKGNQKRLESLRELAGKENLEYPSVTLPPQPHTKEGLDAYNEVIARVRMWVNLNLWQKLKLSRDDAKPLLRLKGFPSFPLVERQANEVDWWDMVCNVKKLINEKKEDGKVFWQNLAGYKRQEALRPYLSSEEDRKKGKKFARYQLGDLLLHLEKKHGEDWGKVYDEAWERIDKKVEGLSKHIKLEEERRSEDAQSKAALTDWLRAKASFVIEGLKEADKDEFCRCELKLQKWYGDLRGKPFAIEAENSILDISGFSKQYNCAFIWQKDGVKKLNLYLIINYFKGGKLRFKKIKPEAFEANRFYTVINKKSGEIVPMEVNFNFDDPNLIILPLAFGKRVGREFIWNDLLSLETGSLKLANGRVIEKTLYNRRTRQDEPALFVALTFERREVLDSSNIKPMNLIGVDRGENIPAVIALTDPEGCPLSRFKDSLGNPTHILRIGESYKEKQRTIQAKKEVEQRRAGGYSRKYASKAKNLADDMVRNTARDLLYYAVTQDAMLIFENLSRGFGRQGKRTFMAERQYTRMEDWLTAKLAYEGLPSKTYLSKTLAQYTSKTCSNCGFTITSADYDRVLEKLKKTATGWMTTINGKELKVEGQITYYNRYKRQNVVKDLSVELDRLSEESVNNDISSWTKGRSGEALSLLKKRFSHRPVQEKFVCLNCGFETHADEQAALNIARSWLFLRSQEYKKYQTNKTTGNTDKRAFVETWQSFYRKKLKEVWKPAV

SEQ ID NO: 35850 - protein, 978 aa, synthetic construct
  REGION 1..978: note = engineered CasX variant
QEIKRINKIRRRLVKDSNTKKAGKTGPMKTLLVRVMTPDLRERLENLRKKPENIPQPISNTSRANLNKLLTDYTEMKKAILHVYWEEFQKDPVGLMSRVAQPASKKIDQNKLKPEMDEKGNLTTAGFACSQCGQPLFVYKLEQVSEKGKAYTNYFGRCNVAEHEKLILLAQLKPEKDSDEAVTYSLGKFGQRALDFYSIHVTKESTHPVKPLAQIAGNRYASHPVGKALSDACMGTIASFLSKYQDIIIEHQKVVKGNQKRLESLRELAGKENLEYPSVTLPPQPHTKEGLDAYNEVIARVRMWVNLNLWQKLKLSRDDAKPLLRLKGFPSFPLVERQANEVDWWDMVCNVKKLINEKKEDGKVFWQNLAGYKRQEALRPYLSSEEDRKKGKKFARYQLGDLLLHLEKKHGEDWGKVYDEAWERIDKKVEGLSKHIKLEEERRSEDAQSKAALTDWLRAKASFVIEGLKEADKDEFCRCELKLQKWYGDLRGKPFAIEAENSILDISGFSKQYNCAFIWQKDGVKKLNLYLIINYFKGGKLRFKKIKPEAFEANRFYTVINKKSGEIVPMEVNFNFDDPNLIILPLAFGKRVGREFIWNDLLSLETGSLKLANGRVIEKTLYNRRTRQDEPALFVALTFERREVLDSSNIKPMNLIGVDRGENIPAVIALTDPEGCPLSRFKDSLGNPTHILRIGESYKEKQRTIQAKKEVEQRRAGGYSRKYASKAKNLADDMVRNTARDLLYYAVTQDAMLIFENLSRGFGRQGKRTFMAERQYTRMEDWLTAKLAYEGLPSKTYLSKTLAQYTSKTCSNCGFTITSADYDRVLEKLKKTATGWMTTINGKELKVEGQITYYNRYKRQNVVKDLSVELDRLSEESVNNDISSWTKGRSGEALSLLKKRFSHRPVQEKFVCLNCGFETHADEQAALNIARSWLFLRSQEYKKYQTNKTTGNTDKRAFVETWQSFYRKKLKEVWKPAV

SEQ ID NO: 35851 - protein, 978 aa, synthetic construct
  REGION 1..978: note = engineered CasX variant
QEIKRINKIRRRLVKDSNTKKAGKTGPMKTLLVRVMTPDLRERLENLRKKPENIPQPISNTSRANLNKLLTDYTEMKKAILHVYWEEFQKDPVGLMSRVAQPASKKIDQNKLKPEMDEKGNLTTAGFACSQCGQPLFVYKLEQVSEKGKAYTNYFGRCNVAEHEKLILLAQLKPEKDSDEAVTYSLGKFGQRALDFYSIHVTKESTHPVKPLAQIAGNRYASSPVGKALSDACMGTIASFLSKYQDIIIEHQKVVKGNQKRLESLRELAGKENLEYPSVTLPPQPHTKEGLDAYNEVIARVRMWVNLNLWQKLKLSRDDAKPLLRLKGFPSFPLVERQANEVDWWDMVCNVKKLINEKKEDGKVFWQNLAGYKRQEALRPYLSSEEDRKKGKKFARYQLGDLLLHLEKKHGEDWGKVYDEAWERIDKKVEGLSKHIKLEEERRSEDAQSKAALTDWLRAKASFVIEGLKEADKDEFCRCELKLQKWYGDLRGKPFAIEAENSILDISGFSKQYNCAFIWQKDGVKKLNLYLIINYFKGGKLRFKKIKPEAFEANRFYTVINKKSGEIVPMEVNFNFDDPNLIILPLAFGKRVGREFIWNDLLSLETGSLKLANGRVIEKTLYNRRTRQDEPALFVALTFERREVLDSSNIKPMNLIGVDRGENIPAVIALTDPEGCPLSRFKDSLGNPTHILRIGESYKEKQRTIQAKKEVEQRRAGGYSRKYASKAKNLADDMVRNTARDLLYYAVTQDAMLIFENLSRGFGRQGKRTFMAERQYTRMEDWLTAKLAYEGLPSKTYLSKTLAQYTSKTCSNCGFTITSADYDRVLEKLKKTATGWMTTINGKELKVEGQITYYNRYKRQNVVKDLSVELDRLSEESVNNDISSWTKGRSGEALSLLKKRFSHRPVQEKFVCLNCGFETHADEQAALNIARSWLFLRSQEYKKYQTNKTTGNTDKRAFVETWQSFYRKKLKEVWKPAV

SEQ ID NO: 35852 - protein, 978 aa, synthetic construct
  REGION 1..978: note = engineered CasX variant
QEIKRINKIRRRLVKDSNTKKAGKTGPMKTLLVRVMTPDLRERLENLRKKPENIPQPISNTSRANLNKLLTDYTEMKKAILHVYWEEFQKDPVGLMSRVAQPASKKIDQNKLKPEMDEKGNLTTAGFACSQCGQPLFVYKLEQVSEKGKAYTNYFGRCNVAEHEKLILLAQLKPEKDSDEAVTYSLGKFGQRALDFYSIHVTKESTHPVKPLAQIAGNRYASTPVGKALSDACMGTIASFLSKYQDIIIEHQKVVKGNQKRLESLRELAGKENLEYPSVTLPPQPHTKEGLDAYNEVIARVRMWVNLNLWQKLKLSRDDAKPLLRLKGFPSFPLVERQANEVDWWDMVCNVKKLINEKKEDGKVFWQNLAGYKRQEALRPYLSSEEDRKKGKKFARYQLGDLLLHLEKKHGEDWGKVYDEAWERIDKKVEGLSKHIKLEEERRSEDAQSKAALTDWLRAKASFVIEGLKEADKDEFCRCELKLQKWYGDLRGKPFAIEAENSILDISGFSKQYNCAFIWQKDGVKKLNLYLIINYFKGGKLRFKKIKPEAFEANRFYTVINKKSGEIVPMEVNFNFDDPNLIILPLAFGKRVGREFIWNDLLSLETGSLKLANGRVIEKTLYNRRTRQDEPALFVALTFERREVLDSSNIKPMNLIGVDRGENIPAVIALTDPEGCPLSRFKDSLGNPTHILRIGESYKEKQRTIQAKKEVEQRRAGGYSRKYASKAKNLADDMVRNTARDLLYYAVTQDAMLIFENLSRGFGRQGKRTFMAERQYTRMEDWLTAKLAYEGLPSKTYLSKTLAQYTSKTCSNCGFTITSADYDRVLEKLKKTATGWMTTINGKELKVEGQITYYNRYKRQNVVKDLSVELDRLSEESVNNDISSWTKGRSGEALSLLKKRFSHRPVQEKFVCLNCGFETHADEQAALNIARSWLFLRSQEYKKYQTNKTTGNTDKRAFVETWQSFYRKKLKEVWKPAV

SEQ ID NO: 35853 - protein, 978 aa, synthetic construct
  REGION 1..978: note = engineered CasX variant
QEIKRINKIRRRLVKDSNTKKAGKTGPMKTLLVRVMTPDLRERLENLRKKPENIPQPISNTSRANLNKLLTDYTEMKKAILHVYWEEFQKDPVGLMSRVAQPASKKIDQNKLKPEMDEKGNLTTAGFACSQCGQPLFVYKLEQVSEKGKAYTNYFGRCNVAEHEKLILLAQLKPEKDSDEAVTYSLGKFGQRALDFYSIHVTKESTHPVKPLAQIAGNRYASAPVGKALSDACMGTIASFLSKYQDIIIEHQKVVKGNQKRLESLRELAGKENLEYPSVTLPPQPHTKEGLDAYNEVIARVRMWVNLNLWQKLKLSRDDAKPLLRLKGFPSFPLVERQANEVDWWDMVCNVKKLINEKKEDGKVFWQNLAGYKRQEALRPYLSSEEDRKKGKKFARYQLGDLLLHLEKKHGEDWGKVYDEAWERIDKKVEGLSKHIKLEEERRSEDAQSKAALTDWLRAKASFVIEGLKEADKDEFCRCELKLQKWYGDLRGKPFAIEAENSILDISGFSKQYNCAFIWQKDGVKKLNLYLIINYFKGGKLRFKKIKPEAFEANRFYTVINKKSGEIVPMEVNFNFDDPNLIILPLAFGKRVGREFIWNDLLSLETGSLKLANGRVIEKTLYNRRTRQDEPALFVALTFERREVLDSSNIKPMNLIGVDRGENIPAVIALTDPEGCPLSRFKDSLGNPTHILRIGESYKEKQRTIQAKKEVEQRRAGGYSRKYASKAKNLADDMVRNTARDLLYYAVTQDAMLIFENLSRGFGRQGKRTFMAERQYTRMEDWLTAKLAYEGLPSKTYLSKTLAQYTSKTCSNCGFTITSADYDRVLEKLKKTATGWMTTINGKELKVEGQITYYNRYKRQNVVKDLSVELDRLSEESVNNDISSWTKGRSGEALSLLKKRFSHRPVQEKFVCLNCGFETHADEQAALNIARSWLFLRSQEYKKYQTNKTTGNTDKRAFVETWQSFYRKKLKEVWKPAV

SEQ ID NO: 35854 - protein, 978 aa, synthetic construct
  REGION 1..978: note = engineered CasX variant
QEIKRINKIRRRLVKDSNTKKAGKTGPMKTLLVRVMTPDLRERLENLRKKPENIPQPISNTSRANLNKLLTDYTEMKKAILHVYWEEFQKDPVGLMSRVAQPASKKIDQNKLKPEMDEKGNLTTAGFACSQCGQPLFVYKLEQVSEKGKAYTNYFGRCNVAEHEKLILLAQLKPEKDSDEAVTYSLGKFGQRALDFYSIHVTKESTHPVKPLAQIAGNRYASVPVGKALSDACMGTIASFLSKYQDIIIEHQKVVKGNQKRLESLRELAGKENLEYPSVTLPPQPHTKEGLDAYNEVIARVRMWVNLNLWQKLKLSRDDAKPLLRLKGFPSFPLVERQANEVDWWDMVCNVKKLINEKKEDGKVFWQNLAGYKRQEALRPYLSSEEDRKKGKKFARYQLGDLLLHLEKKHGEDWGKVYDEAWERIDKKVEGLSKHIKLEEERRSEDAQSKAALTDWLRAKASFVIEGLKEADKDEFCRCELKLQKWYGDLRGKPFAIEAENSILDISGFSKQYNCAFIWQKDGVKKLNLYLIINYFKGGKLRFKKIKPEAFEANRFYTVINKKSGEIVPMEVNFNFDDPNLIILPLAFGKRVGREFIWNDLLSLETGSLKLANGRVIEKTLYNRRTRQDEPALFVALTFERREVLDSSNIKPMNLIGVDRGENIPAVIALTDPEGCPLSRFKDSLGNPTHILRIGESYKEKQRTIQAKKEVEQRRAGGYSRKYASKAKNLADDMVRNTARDLLYYAVTQDAMLIFENLSRGFGRQGKRTFMAERQYTRMEDWLTAKLAYEGLPSKTYLSKTLAQYTSKTCSNCGFTITSADYDRVLEKLKKTATGWMTTINGKELKVEGQITYYNRYKRQNVVKDLSVELDRLSEESVNNDISSWTKGRSGEALSLLKKRFSHRPVQEKFVCLNCGFETHADEQAALNIARSWLFLRSQEYKKYQTNKTTGNTDKRAFVETWQSFYRKKLKEVWKPAV

SEQ ID NO: 35855 - protein, 978 aa, synthetic construct
  REGION 1..978: note = engineered CasX variant
QEIKRINKIRRRLVKDSNTKKAGKTGPMKTLLVRVMTPDLRERLENLRKKPENIPQPISNTSRANLNKLLTDYTEMKKAILHVYWEEFQKDPVGLMSRVAQPASKKIDQNKLKPEMDEKGNLTTAGFACSQCGQPLFVYKLEQVSEKGKAYTNYFGRCNVAEHEKLIKLAQLKPEKDSDEAVTYSLGKFGQRALDFYSIHVTKESTHPVKPLAQIAGNRYASGPVGKALSDACMGTIASFLSKYQDIIIEHQKVVKGNQKRLESLRELAGKENLEYPSVTLPPQPHTKEGLDAYNEVIARVRMWVNLNLWQKLKLSRDDAKPLLRLKGFPSFPLVERQANEVDWWDMVCNVKKLINEKKEDGKVFWQNLAGYKRQEALRPYLSSEEDRKKGKKFARYQLGDLLLHLEKKHGEDWGKVYDEAWERIDKKVEGLSKHIKLEEERRSEDAQSKAALTDWLRAKASFVIEGLKEADKDEFCRCELKLQKWYGDLRGKPFAIEAENSILDISGFSKQYNCAFIWQKDGVKKLNLYLIINYFKGGKLRFKKIKPEAFEANRFYTVINKKSGEIVPMEVNFNFDDPNLIILPLAFGKRVGREFIWNDLLSLETGSLKLANGRVIEKTLYNRRTRQDEPALFVALTFERREVLDSSNIKPMNLIGVDRGENIPAVIALTDPEGCPLSRFKDSLGNPTHILRIGESYKEKQRTIQAKKEVEQRRAGGYSRKYASKAKNLADDMVRNTARDLLYYAVTQDAMLIFENLSRGFGRQGKRTFMAERQYTRMEDWLTAKLAYEGLPSKTYLSKTLAQYTSKTCSNCGFTITSADYDRVLEKLKKTATGWMTTINGKELKVEGQITYYNRYKRQNVVKDLSVELDRLSEESVNNDISSWTKGRSGEALSLLKKRFSHRPVQEKFVCLNCGFETHADEQAALNIARSWLFLRSQEYKKYQTNKTTGNTDKRAFVETWQSFYRKKLKEVWKPAV

SEQ ID NO: 35856 - protein, 977 aa, synthetic construct
  REGION 1..977: note = engineered CasX variant
QEIKRINKIRRRLVKDSNTKKAGKTGPMKTLLVRVMTPDLRERLENLRKKPENIPQPISNTSRANLNKLLTDYTEMKKAILHVYWEEFQKDPVGLMSRVAQPASKKIDQNKLKPEMDEKGNLTTAGFACSQCGQPLFVYKLEQVSEKGKAYTNYFGRCNVAEHEKLILLAQLKPEKDSDEAVTYSLGKFGQRALDFYSIHVTKESTHPVKPLAQIAGNRYASPVGKALSDACMGTIASFLSKYQDIIIEHQKVVKGNQKRLESLRELAGKENLEYPSVTLPPQPHTKEGLDAYNEVIARVRMWVNLNLWQKLKLSRDDAKPLLRLKGFPSFPLVERQANEVDWWDMVCNVKKLINEKKEDGKVFWQNLAGYKRQEALRPYLSSEEDRKKGKKFARYQLGDLLLHLEKKHGEDWGKVYDEAWERIDKKVEGLSKHIKLEEERRSEDAQSKAALTDWLRAKASFVIEGLKEADKDEFCRCELKLQKWYGDLRGKPFAIEAENSILDISGFSKQYNCAFIWQKDGVKKLNLYLIINYFKGGKLRFKKIKPEAFEANRFYTVINKKSGEIVPMEVNFNFDDPNLIILPLAFGKRVGREFIWNDLLSLETGSLKLANGRVIEKTLYNRRTRQDEPALFVALTFERREVLDSSNIKPMNLIGVDRGENIPAVIALTDPEGCPLSRFKDSLGNPTHILRIGESYKEKQRTIQAKKEVEQRRAGGYSRKYASKAKNLADDMVRNTARDLLYYAVTQDAMLIFENLSRGFGRQGKRTFMAERQYTRMEDWLTAKLAYEGLPSKTYLSKTLAQYTSKTCSNCGFTITSADYDRVLEKLKKTATGWMTTINGKELKVEGQITYYNRYKRQNVVKDLSVELDRLSEESVNNDISSWTKGRSGEALSLLKKRFSHRPVQEKFVCLNCGFETHADEQAALNIARSWLFLRSQEYKKYQTNKTTGNTDKRAFVETWQSFYRKKLKEVWKPAV

SEQ ID NO: 35857 - protein, 979 aa, synthetic construct
  REGION 1..979: note = engineered CasX variant
QEIKRINKIRRRLVKDSNTKKAGKTGPMKTLLVRVMTPDLRERLENLRKKPENIPQPISNTSRANLNKLLTDYTEMKKAILHVYWEEFQKDPVGLMSRVAQPASKKIDQNKLKPEMDEKGNLTTAGFACSQCGQPLFVYKLEQVSEKGKAYTNYFGRCNVAEHEKLILLAQLKPEKDSDEAVTYSLGKFGQRALDFYSIHVTKESTHPVKPLAQIAGNRYASYPVGKALSDACMGTIASFLSKYQDIIIEHQKVVKGNQKRLESLRELAGKENLEYPSVTLPPQPHTKEGLDAYNEVIARVRMWVNLNLWQKLKLSRDDAKPLLRLKGFPSFPLVERQANEVDWWDMVCNVKKLINEKKEDGKVFWQNLAGYKRQEALRPYLSSEEDRKKGKKFARYQLGDLLLHLEKKHGEDWGKVYDEAWERIDKKVEGLSKHIKLEEERRSEDAQSKAALTDWLRAKASFVIEGLKEADKDEFCRCELKLQKWYGDLRGKPFAIEAENSILDISGFSKQYNCAFIWQKDGVKKLNLYLIINYFKGGKLRFKKIKPEAFEANRFYTVINKKSGEIVPMEVNFNFDDPNLIILPLAFGKRQGREFIWNDLLSLETGSLKLANGRVIEKTLYNRRTRQDEPALFVALTFERREVLDSSNIKTPMNLIGVDRGENIPAVIALTDPEGCPLSRFKDSLGNPTHILRIGESYKEKQRTIQAKKEVEQRRAGGYSRKYASKAKNLADDMVRNTARDLLYYAVTQDAMLIFENLSRGFGRQGKRTFMAERQYTRMEDWLTAKLAYEGLPSKTYLSKTLAQYTSKTCSNCGFTITSADYDRVLEKLKKTATGWMTTINGKELKVEGQITYYNRYKRQNVVKDLSVELDRLSEESVNNDISSWTKGRSGEALSLLKKRFSHRPVQEKFVCLNCGFETHADEQAALNIARSWLFLRSQEYKKYQTNKTTGNTDKRAFVETWQSFYRKKLKEVWKPAV

SEQ ID NO: 35858 - protein, 979 aa, synthetic construct
  REGION 1..979: note = engineered CasX variant
QEIKRINKIRRRLVKDSNTKKAGKTGPMKTLLVRVMTPDLRERLENLRKKPENIPQPISNTSRANLNKLLTDYTEMKKAILHVYWEEFQKDPVGLMSRVAQPASKKIDQNKLKPEMDEKGNLTTAGFACSQCGQPLFVYKLEQVSEKGKAYTNYFGRCNVAEHEKLILLAQLKPEKDSDEAVTYSLGKFGQRALDFYSIHVTKESTHPVKPLAQIAGNRYASHPVGKALSDACMGTIASFLSKYQDIIIEHQKVVKGNQKRLESLRELAGKENLEYPSVTLPPQPHTKEGLDAYNEVIARVRMWVNLNLWQKLKLSRDDAKPLLRLKGFPSFPLVERQANEVDWWDMVCNVKKLINEKKEDGKVFWQNLAGYKRQEALRPYLSSEEDRKKGKKFARYQLGDLLLHLEKKHGEDWGKVYDEAWERIDKKVEGLSKHIKLEEERRSEDAQSKAALTDWLRAKASFVIEGLKEADKDEFCRCELKLQKWYGDLRGKPFAIEAENSILDISGFSKQYNCAFIWQKDGVKKLNLYLIINYFKGGKLRFKKIKPEAFEANRFYTVINKKSGEIVPMEVNFNFDDPNLIILPLAFGKRQGREFIWNDLLSLETGSLKLANGRVIEKTLYNRRTRQDEPALFVALTFERREVLDSSNIKTPMNLIGVDRGENIPAVIALTDPEGCPLSRFKDSLGNPTHILRIGESYKEKQRTIQAKKEVEQRRAGGYSRKYASKAKNLADDMVRNTARDLLYYAVTQDAMLIFENLSRGFGRQGKRTFMAERQYTRMEDWLTAKLAYEGLPSKTYLSKTLAQYTSKTCSNCGFTITSADYDRVLEKLKKTATGWMTTINGKELKVEGQITYYNRYKRQNVVKDLSVELDRLSEESVNNDISSWTKGRSGEALSLLKKRFSHRPVQEKFVCLNCGFETHADEQAALNIARSWLFLRSQEYKKYQTNKTTGNTDKRAFVETWQSFYRKKLKEVWKPAV

SEQ ID NO: 35859 - protein, 979 aa, synthetic construct
  REGION 1..979: note = engineered CasX variant
QEIKRINKIRRRLVKDSNTKKAGKTGPMKTLLVRVMTPDLRERLENLRKKPENIPQPISNTSRANLNKLLTDYTEMKKAILHVYWEEFQKDPVGLMSRVAQPASKKIDQNKLKPEMDEKGNLTTAGFACSQCGQPLFVYKLEQVSEKGKAYTNYFGRCNVAEHEKLILLAQLKPEKDSDEAVTYSLGKFGQRALDFYSIHVTKESTHPVKPLAQIAGNRYASSPVGKALSDACMGTIASFLSKYQDIIIEHQKVVKGNQKRLESLRELAGKENLEYPSVTLPPQPHTKEGLDAYNEVIARVRMWVNLNLWQKLKLSRDDAKPLLRLKGFPSFPLVERQANEVDWWDMVCNVKKLINEKKEDGKVFWQNLAGYKRQEALRPYLSSEEDRKKGKKFARYQLGDLLLHLEKKHGEDWGKVYDEAWERIDKKVEGLSKHIKLEEERRSEDAQSKAALTDWLRAKASFVIEGLKEADKDEFCRCELKLQKWYGDLRGKPFAIEAENSILDISGFSKQYNCAFIWQKDGVKKLNLYLIINYFKGGKLRFKKIKPEAFEANRFYTVINKKSGEIVPMEVNFNFDDPNLIILPLAFGKRQGREFIWNDLLSLETGSLKLANGRVIEKTLYNRRTRQDEPALFVALTFERREVLDSSNIKTPMNLIGVDRGENIPAVIALTDPEGCPLSRFKDSLGNPTHILRIGESYKEKQRTIQAKKEVEQRRAGGYSRKYASKAKNLADDMVRNTARDLLYYAVTQDAMLIFENLSRGFGRQGKRTFMAERQYTRMEDWLTAKLAYEGLPSKTYLSKTLAQYTSKTCSNCGFTITSADYDRVLEKLKKTATGWMTTINGKELKVEGQITYYNRYKRQNVVKDLSVELDRLSEESVNNDISSWTKGRSGEALSLLKKRFSHRPVQEKFVCLNCGFETHADEQAALNIARSWLFLRSQEYKKYQTNKTTGNTDKRAFVETWQSFYRKKLKEVWKPAV

SEQ ID NO: 35860 - protein, 979 aa, synthetic construct
  REGION 1..979: note = engineered CasX variant
QEIKRINKIRRRLVKDSNTKKAGKTGPMKTLLVRVMTPDLRERLENLRKKPENIPQPISNTSRANLNKLLTDYTEMKKAILHVYWEEFQKDPVGLMSRVAQPASKKIDQNKLKPEMDEKGNLTTAGFACSQCGQPLFVYKLEQVSEKGKAYTNYFGRCNVAEHEKLILLAQLKPEKDSDEAVTYSLGKFGQRALDFYSIHVTKESTHPVKPLAQIAGNRYASTPVGKALSDACMGTIASFLSKYQDIIIEHQKVVKGNQKRLESLRELAGKENLEYPSVTLPPQPHTKEGLDAYNEVIARVRMWVNLNLWQKLKLSRDDAKPLLRLKGFPSFPLVERQANEVDWWDMVCNVKKLINEKKEDGKVFWQNLAGYKRQEALRPYLSSEEDRKKGKKFARYQLGDLLLHLEKKHGEDWGKVYDEAWERIDKKVEGLSKHIKLEEERRSEDAQSKAALTDWLRAKASFVIEGLKEADKDEFCRCELKLQKWYGDLRGKPFAIEAENSILDISGFSKQYNCAFIWQKDGVKKLNLYLIINYFKGGKLRFKKIKPEAFEANRFYTVINKKSGEIVPMEVNFNFDDPNLIILPLAFGKRQGREFIWNDLLSLETGSLKLANGRVIEKTLYNRRTRQDEPALFVALTFERREVLDSSNIKTPMNLIGVDRGENIPAVIALTDPEGCPLSRFKDSLGNPTHILRIGESYKEKQRTIQAKKEVEQRRAGGYSRKYASKAKNLADDMVRNTARDLLYYAVTQDAMLIFENLSRGFGRQGKRTFMAERQYTRMEDWLTAKLAYEGLPSKTYLSKTLAQYTSKTCSNCGFTITSADYDRVLEKLKKTATGWMTTINGKELKVEGQITYYNRYKRQNVVKDLSVELDRLSEESVNNDISSWTKGRSGEALSLLKKRFSHRPVQEKFVCLNCGFETHADEQAALNIARSWLFLRSQEYKKYQTNKTTGNTDKRAFVETWQSFYRKKLKEVWKPAV

SEQ ID NO: 35861 - protein, 979 aa, synthetic construct
  REGION 1..979: note = engineered CasX variant
QEIKRINKIRRRLVKDSNTKKAGKTGPMKTLLVRVMTPDLRERLENLRKKPENIPQPISNTSRANLNKLLTDYTEMKKAILHVYWEEFQKDPVGLMSRVAQPASKKIDQNKLKPEMDEKGNLTTAGFACSQCGQPLFVYKLEQVSEKGKAYTNYFGRCNVAEHEKLILLAQLKPEKDSDEAVTYSLGKFGQRALDFYSIHVTKESTHPVKPLAQIAGNRYASAPVGKALSDACMGTIASFLSKYQDIIIEHQKVVKGNQKRLESLRELAGKENLEYPSVTLPPQPHTKEGLDAYNEVIARVRMWVNLNLWQKLKLSRDDAKPLLRLKGFPSFPLVERQANEVDWWDMVCNVKKLINEKKEDGKVFWQNLAGYKRQEALRPYLSSEEDRKKGKKFARYQLGDLLLHLEKKHGEDWGKVYDEAWERIDKKVEGLSKHIKLEEERRSEDAQSKAALTDWLRAKASFVIEGLKEADKDEFCRCELKLQKWYGDLRGKPFAIEAENSILDISGFSKQYNCAFIWQKDGVKKLNLYLIINYFKGGKLRFKKIKPEAFEANRFYTVINKKSGEIVPMEVNFNFDDPNLIILPLAFGKRQGREFIWNDLLSLETGSLKLANGRVIEKTLYNRRTRQDEPALFVALTFERREVLDSSNIKTPMNLIGVDRGENIPAVIALTDPEGCPLSRFKDSLGNPTHILRIGESYKEKQRTIQAKKEVEQRRAGGYSRKYASKAKNLADDMVRNTARDLLYYAVTQDAMLIFENLSRGFGRQGKRTFMAERQYTRMEDWLTAKLAYEGLPSKTYLSKTLAQYTSKTCSNCGFTITSADYDRVLEKLKKTATGWMTTINGKELKVEGQITYYNRYKRQNVVKDLSVELDRLSEESVNNDISSWTKGRSGEALSLLKKRFSHRPVQEKFVCLNCGFETHADEQAALNIARSWLFLRSQEYKKYQTNKTTGNTDKRAFVETWQSFYRKKLKEVWKPAV

SEQ ID NO: 35862 - protein, 979 aa, synthetic construct
  REGION 1..979: note = engineered CasX variant
QEIKRINKIRRRLVKDSNTKKAGKTGPMKTLLVRVMTPDLRERLENLRKKPENIPQPISNTSRANLNKLLTDYTEMKKAILHVYWEEFQKDPVGLMSRVAQPASKKIDQNKLKPEMDEKGNLTTAGFACSQCGQPLFVYKLEQVSEKGKAYTNYFGRCNVAEHEKLILLAQLKPEKDSDEAVTYSLGKFGQRALDFYSIHVTKESTHPVKPLAQIAGNRYASVPVGKALSDACMGTIASFLSKYQDIIIEHQKVVKGNQKRLESLRELAGKENLEYPSVTLPPQPHTKEGLDAYNEVIARVRMWVNLNLWQKLKLSRDDAKPLLRLKGFPSFPLVERQANEVDWWDMVCNVKKLINEKKEDGKVFWQNLAGYKRQEALRPYLSSEEDRKKGKKFARYQLGDLLLHLEKKHGEDWGKVYDEAWERIDKKVEGLSKHIKLEEERRSEDAQSKAALTDWLRAKASFVIEGLKEADKDEFCRCELKLQKWYGDLRGKPFAIEAENSILDISGFSKQYNCAFIWQKDGVKKLNLYLIINYFKGGKLRFKKIKPEAFEANRFYTVINKKSGEIVPMEVNFNFDDPNLIILPLAFGKRQGREFIWNDLLSLETGSLKLANGRVIEKTLYNRRTRQDEPALFVALTFERREVLDSSNIKTPMNLIGVDRGENIPAVIALTDPEGCPLSRFKDSLGNPTHILRIGESYKEKQRTIQAKKEVEQRRAGGYSRKYASKAKNLADDMVRNTARDLLYYAVTQDAMLIFENLSRGFGRQGKRTFMAERQYTRMEDWLTAKLAYEGLPSKTYLSKTLAQYTSKTCSNCGFTITSADYDRVLEKLKKTATGWMTTINGKELKVEGQITYYNRYKRQNVVKDLSVELDRLSEESVNNDISSWTKGRSGEALSLLKKRFSHRPVQEKFVCLNCGFETHADEQAALNIARSWLFLRSQEYKKYQTNKTTGNTDKRAFVETWQSFYRKKLKEVWKPAV

SEQ ID NO: 35863 - protein, 979 aa, synthetic construct
  REGION 1..979: note = engineered CasX variant
QEIKRINKIRRRLVKDSNTKKAGKTGPMKTLLVRVMTPDLRERLENLRKKPENIPQPISNTSRANLNKLLTDYTEMKKAILHVYWEEFQKDPVGLMSRVAQPASKKIDQNKLKPEMDEKGNLTTAGFACSQCGQPLFVYKLEQVSEKGKAYTNYFGRCNVAEHEKLIKLAQLKPEKDSDEAVTYSLGKFGQRALDFYSIHVTKESTHPVKPLAQIAGNRYASGPVGKALSDACMGTIASFLSKYQDIIIEHQKVVKGNQKRLESLRELAGKENLEYPSVTLPPQPHTKEGLDAYNEVIARVRMWVNLNLWQKLKLSRDDAKPLLRLKGFPSFPLVERQANEVDWWDMVCNVKKLINEKKEDGKVFWQNLAGYKRQEALRPYLSSEEDRKKGKKFARYQLGDLLLHLEKKHGEDWGKVYDEAWERIDKKVEGLSKHIKLEEERRSEDAQSKAALTDWLRAKASFVIEGLKEADKDEFCRCELKLQKWYGDLRGKPFAIEAENSILDISGFSKQYNCAFIWQKDGVKKLNLYLIINYFKGGKLRFKKIKPEAFEANRFYTVINKKSGEIVPMEVNFNFDDPNLIILPLAFGKRQGREFIWNDLLSLETGSLKLANGRVIEKTLYNRRTRQDEPALFVALTFERREVLDSSNIKTPMNLIGVDRGENIPAVIALTDPEGCPLSRFKDSLGNPTHILRIGESYKEKQRTIQAKKEVEQRRAGGYSRKYASKAKNLADDMVRNTARDLLYYAVTQDAMLIFENLSRGFGRQGKRTFMAERQYTRMEDWLTAKLAYEGLPSKTYLSKTLAQYTSKTCSNCGFTITSADYDRVLEKLKKTATGWMTTINGKELKVEGQITYYNRYKRQNVVKDLSVELDRLSEESVNNDISSWTKGRSGEALSLLKKRFSHRPVQEKFVCLNCGFETHADEQAALNIARSWLFLRSQEYKKYQTNKTTGNTDKRAFVETWQSFYRKKLKEVWKPAV

SEQ ID NO: 35864 - protein, 978 aa, synthetic construct
  REGION 1..978: note = engineered CasX variant
QEIKRINKIRRRLVKDSNTKKAGKTGPMKTLLVRVMTPDLRERLENLRKKPENIPQPISNTSRANLNKLLTDYTEMKKAILHVYWEEFQKDPVGLMSRVAQPASKKIDQNKLKPEMDEKGNLTTAGFACSQCGQPLFVYKLEQVSEKGKAYTNYFGRCNVAEHEKLILLAQLKPEKDSDEAVTYSLGKFGQRALDFYSIHVTKESTHPVKPLAQIAGNRYASPVGKALSDACMGTIASFLSKYQDIIIEHQKVVKGNQKRLESLRELAGKENLEYPSVTLPPQPHTKEGLDAYNEVIARVRMWVNLNLWQKLKLSRDDAKPLLRLKGFPSFPLVERQANEVDWWDMVCNVKKLINEKKEDGKVFWQNLAGYKRQEALRPYLSSEEDRKKGKKFARYQLGDLLLHLEKKHGEDWGKVYDEAWERIDKKVEGLSKHIKLEEERRSEDAQSKAALTDWLRAKASFVIEGLKEADKDEFCRCELKLQKWYGDLRGKPFAIEAENSILDISGFSKQYNCAFIWQKDGVKKLNLYLIINYFKGGKLRFKKIKPEAFEANRFYTVINKKSGEIVPMEVNFNFDDPNLIILPLAFGKRQGREFIWNDLLSLETGSLKLANGRVIEKTLYNRRTRQDEPALFVALTFERREVLDSSNIKTPMNLIGVDRGENIPAVIALTDPEGCPLSRFKDSLGNPTHILRIGESYKEKQRTIQAKKEVEQRRAGGYSRKYASKAKNLADDMVRNTARDLLYYAVTQDAMLIFENLSRGFGRQGKRTFMAERQYTRMEDWLTAKLAYEGLPSKTYLSKTLAQYTSKTCSNCGFTITSADYDRVLEKLKKTATGWMTTINGKELKVEGQITYYNRYKRQNVVKDLSVELDRLSEESVNNDISSWTKGRSGEALSLLKKRFSHRPVQEKFVCLNCGFETHADEQAALNIARSWLFLRSQEYKKYQTNKTTGNTDKRAFVETWQSFYRKKLKEVWKPAV

SEQ ID NO: 35865 - protein, 979 aa, synthetic construct
  REGION 1..979: note = engineered CasX variant
QEIKRINKIRRRLVKDSNTKKAGKTGPMKTLLVRVMTPDLRERLENLRKKPENIPQPISNTSRANLNKLLTDYTEMKKAILHVYWEEFQKDPVGLMSRVAQPASKKIDQNKLKPEMDEKGNLTTAGFACSQCGQPLFVYKLEQVSEKGKAYTNYFGRCNVAEHEKLILLAQLKPEKDSDEAVTYSLGKFGQRALDFYSIHVTKESTHPVKPLAQIAGNRYASYPVGKALSDACMGTIASFLSKYQDIIIEHQKVVKGNQKRLESLRELAGKENLEYPSVTLPPQPHTKEGLDAYNEVIARVRMWVNLNLWQKLKLSRDDAKPLLRLKGFPSFPLVERQANEVDWWDMVCNVKKLINEKKEDGKVFWQNLAGYKRQEALRPYLSSEEDRKKGKKFARYQLGDLLLHLEKKHGEDWGKVYDEAWERIDKKVEGLSKHIKLEEERRSEDAQSKAALTDWLRAKASFVIEGLKEADKDEFCRCELKLQKWYGDLRGKPFAIEAENSILDISGFSKQYNCAFIWQKDGVKKLNLYLIINYFKGGKLRFKKIKPEAFEANRFYTVINKKSGEIVPMEVNFNFDDPNLIILPLAFGKRQGREFIWNDLLSLETGSLKLANGRVIEKTLYNRRTRQDEPALFVALTFERREVLDSSNIKPMSNLIGVDRGENIPAVIALTDPEGCPLSRFKDSLGNPTHILRIGESYKEKQRTIQAKKEVEQRRAGGYSRKYASKAKNLADDMVRNTARDLLYYAVTQDAMLIFENLSRGFGRQGKRTFMAERQYTRMEDWLTAKLAYEGLPSKTYLSKTLAQYTSKTCSNCGFTITSADYDRVLEKLKKTATGWMTTINGKELKVEGQITYYNRYKRQNVVKDLSVELDRLSEESVNNDISSWTKGRSGEALSLLKKRFSHRPVQEKFVCLNCGFETHADEQAALNIARSWLFLRSQEYKKYQTNKTTGNTDKRAFVETWQSFYRKKLKEVWKPAV

SEQ ID NO: 35866 - protein, 979 aa, synthetic construct
  REGION 1..979: note = engineered CasX variant
QEIKRINKIRRRLVKDSNTKKAGKTGPMKTLLVRVMTPDLRERLENLRKKPENIPQPISNTSRANLNKLLTDYTEMKKAILHVYWEEFQKDPVGLMSRVAQPASKKIDQNKLKPEMDEKGNLTTAGFACSQCGQPLFVYKLEQVSEKGKAYTNYFGRCNVAEHEKLILLAQLKPEKDSDEAVTYSLGKFGQRALDFYSIHVTKESTHPVKPLAQIAGNRYASHPVGKALSDACMGTIASFLSKYQDIIIEHQKVVKGNQKRLESLRELAGKENLEYPSVTLPPQPHTKEGLDAYNEVIARVRMWVNLNLWQKLKLSRDDAKPLLRLKGFPSFPLVERQANEVDWWDMVCNVKKLINEKKEDGKVFWQNLAGYKRQEALRPYLSSEEDRKKGKKFARYQLGDLLLHLEKKHGEDWGKVYDEAWERIDKKVEGLSKHIKLEEERRSEDAQSKAALTDWLRAKASFVIEGLKEADKDEFCRCELKLQKWYGDLRGKPFAIEAENSILDISGFSKQYNCAFIWQKDGVKKLNLYLIINYFKGGKLRFKKIKPEAFEANRFYTVINKKSGEIVPMEVNFNFDDPNLIILPLAFGKRQGREFIWNDLLSLETGSLKLANGRVIEKTLYNRRTRQDEPALFVALTFERREVLDSSNIKPMSNLIGVDRGENIPAVIALTDPEGCPLSRFKDSLGNPTHILRIGESYKEKQRTIQAKKEVEQRRAGGYSRKYASKAKNLADDMVRNTARDLLYYAVTQDAMLIFENLSRGFGRQGKRTFMAERQYTRMEDWLTAKLAYEGLPSKTYLSKTLAQYTSKTCSNCGFTITSADYDRVLEKLKKTATGWMTTINGKELKVEGQITYYNRYKRQNVVKDLSVELDRLSEESVNNDISSWTKGRSGEALSLLKKRFSHRPVQEKFVCLNCGFETHADEQAALNIARSWLFLRSQEYKKYQTNKTTGNTDKRAFVETWQSFYRKKLKEVWKPAV

SEQ ID NO: 35867 - protein, 979 aa, synthetic construct
  REGION 1..979: note = engineered CasX variant
QEIKRINKIRRRLVKDSNTKKAGKTGPMKTLLVRVMTPDLRERLENLRKKPENIPQPISNTSRANLNKLLTDYTEMKKAILHVYWEEFQKDPVGLMSRVAQPASKKIDQNKLKPEMDEKGNLTTAGFACSQCGQPLFVYKLEQVSEKGKAYTNYFGRCNVAEHEKLILLAQLKPEKDSDEAVTYSLGKFGQRALDFYSIHVTKESTHPVKPLAQIAGNRYASSPVGKALSDACMGTIASFLSKYQDIIIEHQKVVKGNQKRLESLRELAGKENLEYPSVTLPPQPHTKEGLDAYNEVIARVRMWVNLNLWQKLKLSRDDAKPLLRLKGFPSFPLVERQANEVDWWDMVCNVKKLINEKKEDGKVFWQNLAGYKRQEALRPYLSSEEDRKKGKKFARYQLGDLLLHLEKKHGEDWGKVYDEAWERIDKKVEGLSKHIKLEEERRSEDAQSKAALTDWLRAKASFVIEGLKEADKDEFCRCELKLQKWYGDLRGKPFAIEAENSILDISGFSKQYNCAFIWQKDGVKKLNLYLIINYFKGGKLRFKKIKPEAFEANRFYTVINKKSGEIVPMEVNFNFDDPNLIILPLAFGKRQGREFIWNDLLSLETGSLKLANGRVIEKTLYNRRTRQDEPALFVALTFERREVLDSSNIKPMSNLIGVDRGENIPAVIALTDPEGCPLSRFKDSLGNPTHILRIGESYKEKQRTIQAKKEVEQRRAGGYSRKYASKAKNLADDMVRNTARDLLYYAVTQDAMLIFENLSRGFGRQGKRTFMAERQYTRMEDWLTAKLAYEGLPSKTYLSKTLAQYTSKTCSNCGFTITSADYDRVLEKLKKTATGWMTTINGKELKVEGQITYYNRYKRQNVVKDLSVELDRLSEESVNNDISSWTKGRSGEALSLLKKRFSHRPVQEKFVCLNCGFETHADEQAALNIARSWLFLRSQEYKKYQTNKTTGNTDKRAFVETWQSFYRKKLKEVWKPAV

SEQ ID NO: 35868 - protein, 979 aa, synthetic construct
  REGION 1..979: note = engineered CasX variant
QEIKRINKIRRRLVKDSNTKKAGKTGPMKTLLVRVMTPDLRERLENLRKKPENIPQPISNTSRANLNKLLTDYTEMKKAILHVYWEEFQKDPVGLMSRVAQPASKKIDQNKLKPEMDEKGNLTTAGFACSQCGQPLFVYKLEQVSEKGKAYTNYFGRCNVAEHEKLILLAQLKPEKDSDEAVTYSLGKFGQRALDFYSIHVTKESTHPVKPLAQIAGNRYASTPVGKALSDACMGTIASFLSKYQDIIIEHQKVVKGNQKRLESLRELAGKENLEYPSVTLPPQPHTKEGLDAYNEVIARVRMWVNLNLWQKLKLSRDDAKPLLRLKGFPSFPLVERQANEVDWWDMVCNVKKLINEKKEDGKVFWQNLAGYKRQEALRPYLSSEEDRKKGKKFARYQLGDLLLHLEKKHGEDWGKVYDEAWERIDKKVEGLSKHIKLEEERRSEDAQSKAALTDWLRAKASFVIEGLKEADKDEFCRCELKLQKWYGDLRGKPFAIEAENSILDISGFSKQYNCAFIWQKDGVKKLNLYLIINYFKGGKLRFKKIKPEAFEANRFYTVINKKSGEIVPMEVNFNFDDPNLIILPLAFGKRQGREFIWNDLLSLETGSLKLANGRVIEKTLYNRRTRQDEPALFVALTFERREVLDSSNIKPMSNLIGVDRGENIPAVIALTDPEGCPLSRFKDSLGNPTHILRIGESYKEKQRTIQAKKEVEQRRAGGYSRKYASKAKNLADDMVRNTARDLLYYAVTQDAMLIFENLSRGFGRQGKRTFMAERQYTRMEDWLTAKLAYEGLPSKTYLSKTLAQYTSKTCSNCGFTITSADYDRVLEKLKKTATGWMTTINGKELKVEGQITYYNRYKRQNVVKDLSVELDRLSEESVNNDISSWTKGRSGEALSLLKKRFSHRPVQEKFVCLNCGFETHADEQAALNIARSWLFLRSQEYKKYQTNKTTGNTDKRAFVETWQSFYRKKLKEVWKPAV

SEQ ID NO: 35869 - protein, 979 aa, synthetic construct
  REGION 1..979: note = engineered CasX variant
QEIKRINKIRRRLVKDSNTKKAGKTGPMKTLLVRVMTPDLRERLENLRKKPENIPQPISNTSRANLNKLLTDYTEMKKAILHVYWEEFQKDPVGLMSRVAQPASKKIDQNKLKPEMDEKGNLTTAGFACSQCGQPLFVYKLEQVSEKGKAYTNYFGRCNVAEHEKLILLAQLKPEKDSDEAVTYSLGKFGQRALDFYSIHVTKESTHPVKPLAQIAGNRYASAPVGKALSDACMGTIASFLSKYQDIIIEHQKVVKGNQKRLESLRELAGKENLEYPSVTLPPQPHTKEGLDAYNEVIARVRMWVNLNLWQKLKLSRDDAKPLLRLKGFPSFPLVERQANEVDWWDMVCNVKKLINEKKEDGKVFWQNLAGYKRQEALRPYLSSEEDRKKGKKFARYQLGDLLLHLEKKHGEDWGKVYDEAWERIDKKVEGLSKHIKLEEERRSEDAQSKAALTDWLRAKASFVIEGLKEADKDEFCRCELKLQKWYGDLRGKPFAIEAENSILDISGFSKQYNCAFIWQKDGVKKLNLYLIINYFKGGKLRFKKIKPEAFEANRFYTVINKKSGEIVPMEVNFNFDDPNLIILPLAFGKRQGREFIWNDLLSLETGSLKLANGRVIEKTLYNRRTRQDEPALFVALTFERREVLDSSNIKPMSNLIGVDRGENIPAVIALTDPEGCPLSRFKDSLGNPTHILRIGESYKEKQRTIQAKKEVEQRRAGGYSRKYASKAKNLADDMVRNTARDLLYYAVTQDAMLIFENLSRGFGRQGKRTFMAERQYTRMEDWLTAKLAYEGLPSKTYLSKTLAQYTSKTCSNCGFTITSADYDRVLEKLKKTATGWMTTINGKELKVEGQITYYNRYKRQNVVKDLSVELDRLSEESVNNDISSWTKGRSGEALSLLKKRFSHRPVQEKFVCLNCGFETHADEQAALNIARSWLFLRSQEYKKYQTNKTTGNTDKRAFVETWQSFYRKKLKEVWKPAV

SEQ ID NO: 35870 - protein, 979 aa, synthetic construct
  REGION 1..979: note = engineered CasX variant
QEIKRINKIRRRLVKDSNTKKAGKTGPMKTLLVRVMTPDLRERLENLRKKPENIPQPISNTSRANLNKLLTDYTEMKKAILHVYWEEFQKDPVGLMSRVAQPASKKIDQNKLKPEMDEKGNLTTAGFACSQCGQPLFVYKLEQVSEKGKAYTNYFGRCNVAEHEKLILLAQLKPEKDSDEAVTYSLGKFGQRALDFYSIHVTKESTHPVKPLAQIAGNRYASVPVGKALSDACMGTIASFLSKYQDIIIEHQKVVKGNQKRLESLRELAGKENLEYPSVTLPPQPHTKEGLDAYNEVIARVRMWVNLNLWQKLKLSRDDAKPLLRLKGFPSFPLVERQANEVDWWDMVCNVKKLINEKKEDGKVFWQNLAGYKRQEALRPYLSSEEDRKKGKKFARYQLGDLLLHLEKKHGEDWGKVYDEAWERIDKKVEGLSKHIKLEEERRSEDAQSKAALTDWLRAKASFVIEGLKEADKDEFCRCELKLQKWYGDLRGKPFAIEAENSILDISGFSKQYNCAFIWQKDGVKKLNLYLIINYFKGGKLRFKKIKPEAFEANRFYTVINKKSGEIVPMEVNFNFDDPNLIILPLAFGKRQGREFIWNDLLSLETGSLKLANGRVIEKTLYNRRTRQDEPALFVALTFERREVLDSSNIKPMSNLIGVDRGENIPAVIALTDPEGCPLSRFKDSLGNPTHILRIGESYKEKQRTIQAKKEVEQRRAGGYSRKYASKAKNLADDMVRNTARDLLYYAVTQDAMLIFENLSRGFGRQGKRTFMAERQYTRMEDWLTAKLAYEGLPSKTYLSKTLAQYTSKTCSNCGFTITSADYDRVLEKLKKTATGWMTTINGKELKVEGQITYYNRYKRQNVVKDLSVELDRLSEESVNNDISSWTKGRSGEALSLLKKRFSHRPVQEKFVCLNCGFETHADEQAALNIARSWLFLRSQEYKKYQTNKTTGNTDKRAFVETWQSFYRKKLKEVWKPAV

SEQ ID NO: 35871 - protein, 979 aa, synthetic construct
  REGION 1..979: note = engineered CasX variant
QEIKRINKIRRRLVKDSNTKKAGKTGPMKTLLVRVMTPDLRERLENLRKKPENIPQPISNTSRANLNKLLTDYTEMKKAILHVYWEEFQKDPVGLMSRVAQPASKKIDQNKLKPEMDEKGNLTTAGFACSQCGQPLFVYKLEQVSEKGKAYTNYFGRCNVAEHEKLIKLAQLKPEKDSDEAVTYSLGKFGQRALDFYSIHVTKESTHPVKPLAQIAGNRYASGPVGKALSDACMGTIASFLSKYQDIIIEHQKVVKGNQKRLESLRELAGKENLEYPSVTLPPQPHTKEGLDAYNEVIARVRMWVNLNLWQKLKLSRDDAKPLLRLKGFPSFPLVERQANEVDWWDMVCNVKKLINEKKEDGKVFWQNLAGYKRQEALRPYLSSEEDRKKGKKFARYQLGDLLLHLEKKHGEDWGKVYDEAWERIDKKVEGLSKHIKLEEERRSEDAQSKAALTDWLRAKASFVIEGLKEADKDEFCRCELKLQKWYGDLRGKPFAIEAENSILDISGFSKQYNCAFIWQKDGVKKLNLYLIINYFKGGKLRFKKIKPEAFEANRFYTVINKKSGEIVPMEVNFNFDDPNLIILPLAFGKRQGREFIWNDLLSLETGSLKLANGRVIEKTLYNRRTRQDEPALFVALTFERREVLDSSNIKPMSNLIGVDRGENIPAVIALTDPEGCPLSRFKDSLGNPTHILRIGESYKEKQRTIQAKKEVEQRRAGGYSRKYASKAKNLADDMVRNTARDLLYYAVTQDAMLIFENLSRGFGRQGKRTFMAERQYTRMEDWLTAKLAYEGLPSKTYLSKTLAQYTSKTCSNCGFTITSADYDRVLEKLKKTATGWMTTINGKELKVEGQITYYNRYKRQNVVKDLSVELDRLSEESVNNDISSWTKGRSGEALSLLKKRFSHRPVQEKFVCLNCGFETHADEQAALNIARSWLFLRSQEYKKYQTNKTTGNTDKRAFVETWQSFYRKKLKEVWKPAV

SEQ ID NO: 35872 - protein, 978 aa, synthetic construct
  REGION 1..978: note = engineered CasX variant
QEIKRINKIRRRLVKDSNTKKAGKTGPMKTLLVRVMTPDLRERLENLRKKPENIPQPISNTSRANLNKLLTDYTEMKKAILHVYWEEFQKDPVGLMSRVAQPASKKIDQNKLKPEMDEKGNLTTAGFACSQCGQPLFVYKLEQVSEKGKAYTNYFGRCNVAEHEKLILLAQLKPEKDSDEAVTYSLGKFGQRALDFYSIHVTKESTHPVKPLAQIAGNRYASPVGKALSDACMGTIASFLSKYQDIIIEHQKVVKGNQKRLESLRELAGKENLEYPSVTLPPQPHTKEGLDAYNEVIARVRMWVNLNLWQKLKLSRDDAKPLLRLKGFPSFPLVERQANEVDWWDMVCNVKKLINEKKEDGKVFWQNLAGYKRQEALRPYLSSEEDRKKGKKFARYQLGDLLLHLEKKHGEDWGKVYDEAWERIDKKVEGLSKHIKLEEERRSEDAQSKAALTDWLRAKASFVIEGLKEADKDEFCRCELKLQKWYGDLRGKPFAIEAENSILDISGFSKQYNCAFIWQKDGVKKLNLYLIINYFKGGKLRFKKIKPEAFEANRFYTVINKKSGEIVPMEVNFNFDDPNLIILPLAFGKRQGREFIWNDLLSLETGSLKLANGRVIEKTLYNRRTRQDEPALFVALTFERREVLDSSNIKPMSNLIGVDRGENIPAVIALTDPEGCPLSRFKDSLGNPTHILRIGESYKEKQRTIQAKKEVEQRRAGGYSRKYASKAKNLADDMVRNTARDLLYYAVTQDAMLIFENLSRGFGRQGKRTFMAERQYTRMEDWLTAKLAYEGLPSKTYLSKTLAQYTSKTCSNCGFTITSADYDRVLEKLKKTATGWMTTINGKELKVEGQITYYNRYKRQNVVKDLSVELDRLSEESVNNDISSWTKGRSGEALSLLKKRFSHRPVQEKFVCLNCGFETHADEQAALNIARSWLFLRSQEYKKYQTNKTTGNTDKRAFVETWQSFYRKKLKEVWKPAV

SEQ ID NO: 35873 - protein, 978 aa, synthetic construct
  REGION 1..978: note = engineered CasX variant
QEIKRINKIRRRLVKDSNTKKAGKTGPMKTLLVRVMTPDLRERLENLRKKPENIPQPISNTSRANLNKLLTDYTEMKKAILHVYWEEFQKDPVGLMSRVAQPASKKIDQNKLKPEMDEKGNLTTAGFACSQCGQPLFVYKLEQVSEKGKAYTNYFGRCNVAEHEKLILLAQLKPEKDSDEAVTYSLGKFGQRALDFYSIHVTKESTHPVKPLAQIAGNRYASYPVGKALSDACMGTIASFLSKYQDIIIEHQKVVKGNQKRLESLRELAGKENLEYPSVTLPPQPHTKEGLDAYNEVIARVRMWVNLNLWQKLKLSRDDAKPLLRLKGFPSFPLVERQANEVDWWDMVCNVKKLINEKKEDGKVFWQNLAGYKRQEALRPYLSSEEDRKKGKKFARYQLGDLLLHLEKKHGEDWGKVYDEAWERIDKKVEGLSKHIKLEEERRSEDAQSKAALTDWLRAKASFVIEGLKEADKDEFCRCELKLQKWYGDLRGKPFAIEAENSILDISGFSKQYNCAFIWQKDGVKKLNLYLIINYFKGGKLRFKKIKPEAFEANRFYTVINKKSGEIVPMEVNFNFDDPNLIILPLAFGKRQGREFIWNDLLSLETGSLKLANGRVIEKTLYNRRTRQDEPALFVALTFERREVLDSSNIKPMNLIGVDRGENIPAVIALTDPEGCPLSRFKDSLGNPTHILRIRESYKEKQRTIQAKKEVEQRRAGGYSRKYASKAKNLADDMVRNTARDLLYYAVTQDAMLIFENLSRGFGRQGKRTFMAERQYTRMEDWLTAKLAYEGLPSKTYLSKTLAQYTSKTCSNCGFTITSADYDRVLEKLKKTATGWMTTINGKELKVEGQITYYNRYKRQNVVKDLSVELDRLSEESVNNDISSWTKGRSGEALSLLKKRFSHRPVQEKFVCLNCGFETHADEQAALNIARSWLFLRSQEYKKYQTNKTTGNTDKRAFVETWQSFYRKKLKEVWKPAV

SEQ ID NO: 35874 - protein, 978 aa, synthetic construct
  REGION 1..978: note = engineered CasX variant
QEIKRINKIRRRLVKDSNTKKAGKTGPMKTLLVRVMTPDLRERLENLRKKPENIPQPISNTSRANLNKLLTDYTEMKKAILHVYWEEFQKDPVGLMSRVAQPASKKIDQNKLKPEMDEKGNLTTAGFACSQCGQPLFVYKLEQVSEKGKAYTNYFGRCNVAEHEKLILLAQLKPEKDSDEAVTYSLGKFGQRALDFYSIHVTKESTHPVKPLAQIAGNRYASHPVGKALSDACMGTIASFLSKYQDIIIEHQKVVKGNQKRLESLRELAGKENLEYPSVTLPPQPHTKEGLDAYNEVIARVRMWVNLNLWQKLKLSRDDAKPLLRLKGFPSFPLVERQANEVDWWDMVCNVKKLINEKKEDGKVFWQNLAGYKRQEALRPYLSSEEDRKKGKKFARYQLGDLLLHLEKKHGEDWGKVYDEAWERIDKKVEGLSKHIKLEEERRSEDAQSKAALTDWLRAKASFVIEGLKEADKDEFCRCELKLQKWYGDLRGKPFAIEAENSILDISGFSKQYNCAFIWQKDGVKKLNLYLIINYFKGGKLRFKKIKPEAFEANRFYTVINKKSGEIVPMEVNFNFDDPNLIILPLAFGKRQGREFIWNDLLSLETGSLKLANGRVIEKTLYNRRTRQDEPALFVALTFERREVLDSSNIKPMNLIGVDRGENIPAVIALTDPEGCPLSRFKDSLGNPTHILRIRESYKEKQRTIQAKKEVEQRRAGGYSRKYASKAKNLADDMVRNTARDLLYYAVTQDAMLIFENLSRGFGRQGKRTFMAERQYTRMEDWLTAKLAYEGLPSKTYLSKTLAQYTSKTCSNCGFTITSADYDRVLEKLKKTATGWMTTINGKELKVEGQITYYNRYKRQNVVKDLSVELDRLSEESVNNDISSWTKGRSGEALSLLKKRFSHRPVQEKFVCLNCGFETHADEQAALNIARSWLFLRSQEYKKYQTNKTTGNTDKRAFVETWQSFYRKKLKEVWKPAV

SEQ ID NO: 35875 - protein, 978 aa, synthetic construct
  REGION 1..978: note = engineered CasX variant
QEIKRINKIRRRLVKDSNTKKAGKTGPMKTLLVRVMTPDLRERLENLRKKPENIPQPISNTSRANLNKLLTDYTEMKKAILHVYWEEFQKDPVGLMSRVAQPASKKIDQNKLKPEMDEKGNLTTAGFACSQCGQPLFVYKLEQVSEKGKAYTNYFGRCNVAEHEKLILLAQLKPEKDSDEAVTYSLGKFGQRALDFYSIHVTKESTHPVKPLAQIAGNRYASSPVGKALSDACMGTIASFLSKYQDIIIEHQKVVKGNQKRLESLRELAGKENLEYPSVTLPPQPHTKEGLDAYNEVIARVRMWVNLNLWQKLKLSRDDAKPLLRLKGFPSFPLVERQANEVDWWDMVCNVKKLINEKKEDGKVFWQNLAGYKRQEALRPYLSSEEDRKKGKKFARYQLGDLLLHLEKKHGEDWGKVYDEAWERIDKKVEGLSKHIKLEEERRSEDAQSKAALTDWLRAKASFVIEGLKEADKDEFCRCELKLQKWYGDLRGKPFAIEAENSILDISGFSKQYNCAFIWQKDGVKKLNLYLIINYFKGGKLRFKKIKPEAFEANRFYTVINKKSGEIVPMEVNFNFDDPNLIILPLAFGKRQGREFIWNDLLSLETGSLKLANGRVIEKTLYNRRTRQDEPALFVALTFERREVLDSSNIKPMNLIGVDRGENIPAVIALTDPEGCPLSRFKDSLGNPTHILRIRESYKEKQRTIQAKKEVEQRRAGGYSRKYASKAKNLADDMVRNTARDLLYYAVTQDAMLIFENLSRGFGRQGKRTFMAERQYTRMEDWLTAKLAYEGLPSKTYLSKTLAQYTSKTCSNCGFTITSADYDRVLEKLKKTATGWMTTINGKELKVEGQITYYNRYKRQNVVKDLSVELDRLSEESVNNDISSWTKGRSGEALSLLKKRFSHRPVQEKFVCLNCGFETHADEQAALNIARSWLFLRSQEYKKYQTNKTTGNTDKRAFVETWQSFYRKKLKEVWKPAV

SEQ ID NO: 35876 - protein, 978 aa, synthetic construct
  REGION 1..978: note = engineered CasX variant
QEIKRINKIRRRLVKDSNTKKAGKTGPMKTLLVRVMTPDLRERLENLRKKPENIPQPISNTSRANLNKLLTDYTEMKKAILHVYWEEFQKDPVGLMSRVAQPASKKIDQNKLKPEMDEKGNLTTAGFACSQCGQPLFVYKLEQVSEKGKAYTNYFGRCNVAEHEKLILLAQLKPEKDSDEAVTYSLGKFGQRALDFYSIHVTKESTHPVKPLAQIAGNRYASTPVGKALSDACMGTIASFLSKYQDIIIEHQKVVKGNQKRLESLRELAGKENLEYPSVTLPPQPHTKEGLDAYNEVIARVRMWVNLNLWQKLKLSRDDAKPLLRLKGFPSFPLVERQANEVDWWDMVCNVKKLINEKKEDGKVFWQNLAGYKRQEALRPYLSSEEDRKKGKKFARYQLGDLLLHLEKKHGEDWGKVYDEAWERIDKKVEGLSKHIKLEEERRSEDAQSKAALTDWLRAKASFVIEGLKEADKDEFCRCELKLQKWYGDLRGKPFAIEAENSILDISGFSKQYNCAFIWQKDGVKKLNLYLIINYFKGGKLRFKKIKPEAFEANRFYTVINKKSGEIVPMEVNFNFDDPNLIILPLAFGKRQGREFIWNDLLSLETGSLKLANGRVIEKTLYNRRTRQDEPALFVALTFERREVLDSSNIKPMNLIGVDRGENIPAVIALTDPEGCPLSRFKDSLGNPTHILRIRESYKEKQRTIQAKKEVEQRRAGGYSRKYASKAKNLADDMVRNTARDLLYYAVTQDAMLIFENLSRGFGRQGKRTFMAERQYTRMEDWLTAKLAYEGLPSKTYLSKTLAQYTSKTCSNCGFTITSADYDRVLEKLKKTATGWMTTINGKELKVEGQITYYNRYKRQNVVKDLSVELDRLSEESVNNDISSWTKGRSGEALSLLKKRFSHRPVQEKFVCLNCGFETHADEQAALNIARSWLFLRSQEYKKYQTNKTTGNTDKRAFVETWQSFYRKKLKEVWKPAV

SEQ ID NO: 35877 - protein, 978 aa, synthetic construct
  REGION 1..978: note = engineered CasX variant
QEIKRINKIRRRLVKDSNTKKAGKTGPMKTLLVRVMTPDLRERLENLRKKPENIPQPISNTSRANLNKLLTDYTEMKKAILHVYWEEFQKDPVGLMSRVAQPASKKIDQNKLKPEMDEKGNLTTAGFACSQCGQPLFVYKLEQVSEKGKAYTNYFGRCNVAEHEKLILLAQLKPEKDSDEAVTYSLGKFGQRALDFYSIHVTKESTHPVKPLAQIAGNRYASAPVGKALSDACMGTIASFLSKYQDIIIEHQKVVKGNQKRLESLRELAGKENLEYPSVTLPPQPHTKEGLDAYNEVIARVRMWVNLNLWQKLKLSRDDAKPLLRLKGFPSFPLVERQANEVDWWDMVCNVKKLINEKKEDGKVFWQNLAGYKRQEALRPYLSSEEDRKKGKKFARYQLGDLLLHLEKKHGEDWGKVYDEAWERIDKKVEGLSKHIKLEEERRSEDAQSKAALTDWLRAKASFVIEGLKEADKDEFCRCELKLQKWYGDLRGKPFAIEAENSILDISGFSKQYNCAFIWQKDGVKKLNLYLIINYFKGGKLRFKKIKPEAFEANRFYTVINKKSGEIVPMEVNFNFDDPNLIILPLAFGKRQGREFIWNDLLSLETGSLKLANGRVIEKTLYNRRTRQDEPALFVALTFERREVLDSSNIKPMNLIGVDRGENIPAVIALTDPEGCPLSRFKDSLGNPTHILRIRESYKEKQRTIQAKKEVEQRRAGGYSRKYASKAKNLADDMVRNTARDLLYYAVTQDAMLIFENLSRGFGRQGKRTFMAERQYTRMEDWLTAKLAYEGLPSKTYLSKTLAQYTSKTCSNCGFTITSADYDRVLEKLKKTATGWMTTINGKELKVEGQITYYNRYKRQNVVKDLSVELDRLSEESVNNDISSWTKGRSGEALSLLKKRFSHRPVQEKFVCLNCGFETHADEQAALNIARSWLFLRSQEYKKYQTNKTTGNTDKRAFVETWQSFYRKKLKEVWKPAV

SEQ ID NO: 35878 - protein, 978 aa, synthetic construct
  REGION 1..978: note = engineered CasX variant
QEIKRINKIRRRLVKDSNTKKAGKTGPMKTLLVRVMTPDLRERLENLRKKPENIPQPISNTSRANLNKLLTDYTEMKKAILHVYWEEFQKDPVGLMSRVAQPASKKIDQNKLKPEMDEKGNLTTAGFACSQCGQPLFVYKLEQVSEKGKAYTNYFGRCNVAEHEKLILLAQLKPEKDSDEAVTYSLGKFGQRALDFYSIHVTKESTHPVKPLAQIAGNRYASVPVGKALSDACMGTIASFLSKYQDIIIEHQKVVKGNQKRLESLRELAGKENLEYPSVTLPPQPHTKEGLDAYNEVIARVRMWVNLNLWQKLKLSRDDAKPLLRLKGFPSFPLVERQANEVDWWDMVCNVKKLINEKKEDGKVFWQNLAGYKRQEALRPYLSSEEDRKKGKKFARYQLGDLLLHLEKKHGEDWGKVYDEAWERIDKKVEGLSKHIKLEEERRSEDAQSKAALTDWLRAKASFVIEGLKEADKDEFCRCELKLQKWYGDLRGKPFAIEAENSILDISGFSKQYNCAFIWQKDGVKKLNLYLIINYFKGGKLRFKKIKPEAFEANRFYTVINKKSGEIVPMEVNFNFDDPNLIILPLAFGKRQGREFIWNDLLSLETGSLKLANGRVIEKTLYNRRTRQDEPALFVALTFERREVLDSSNIKPMNLIGVDRGENIPAVIALTDPEGCPLSRFKDSLGNPTHILRIRESYKEKQRTIQAKKEVEQRRAGGYSRKYASKAKNLADDMVRNTARDLLYYAVTQDAMLIFENLSRGFGRQGKRTFMAERQYTRMEDWLTAKLAYEGLPSKTYLSKTLAQYTSKTCSNCGFTITSADYDRVLEKLKKTATGWMTTINGKELKVEGQITYYNRYKRQNVVKDLSVELDRLSEESVNNDISSWTKGRSGEALSLLKKRFSHRPVQEKFVCLNCGFETHADEQAALNIARSWLFLRSQEYKKYQTNKTTGNTDKRAFVETWQSFYRKKLKEVWKPAV

SEQ ID NO: 35879 - protein, 978 aa, synthetic construct
  REGION 1..978: note = engineered CasX variant
QEIKRINKIRRRLVKDSNTKKAGKTGPMKTLLVRVMTPDLRERLENLRKKPENIPQPISNTSRANLNKLLTDYTEMKKAILHVYWEEFQKDPVGLMSRVAQPASKKIDQNKLKPEMDEKGNLTTAGFACSQCGQPLFVYKLEQVSEKGKAYTNYFGRCNVAEHEKLIKLAQLKPEKDSDEAVTYSLGKFGQRALDFYSIHVTKESTHPVKPLAQIAGNRYASGPVGKALSDACMGTIASFLSKYQDIIIEHQKVVKGNQKRLESLRELAGKENLEYPSVTLPPQPHTKEGLDAYNEVIARVRMWVNLNLWQKLKLSRDDAKPLLRLKGFPSFPLVERQANEVDWWDMVCNVKKLINEKKEDGKVFWQNLAGYKRQEALRPYLSSEEDRKKGKKFARYQLGDLLLHLEKKHGEDWGKVYDEAWERIDKKVEGLSKHIKLEEERRSEDAQSKAALTDWLRAKASFVIEGLKEADKDEFCRCELKLQKWYGDLRGKPFAIEAENSILDISGFSKQYNCAFIWQKDGVKKLNLYLIINYFKGGKLRFKKIKPEAFEANRFYTVINKKSGEIVPMEVNFNFDDPNLIILPLAFGKRQGREFIWNDLLSLETGSLKLANGRVIEKTLYNRRTRQDEPALFVALTFERREVLDSSNIKPMNLIGVDRGENIPAVIALTDPEGCPLSRFKDSLGNPTHILRIRESYKEKQRTIQAKKEVEQRRAGGYSRKYASKAKNLADDMVRNTARDLLYYAVTQDAMLIFENLSRGFGRQGKRTFMAERQYTRMEDWLTAKLAYEGLPSKTYLSKTLAQYTSKTCSNCGFTITSADYDRVLEKLKKTATGWMTTINGKELKVEGQITYYNRYKRQNVVKDLSVELDRLSEESVNNDISSWTKGRSGEALSLLKKRFSHRPVQEKFVCLNCGFETHADEQAALNIARSWLFLRSQEYKKYQTNKTTGNTDKRAFVETWQSFYRKKLKEVWKPAV

SEQ ID NO: 35880 - protein, 977 aa, synthetic construct
  REGION 1..977: note = engineered CasX variant
QEIKRINKIRRRLVKDSNTKKAGKTGPMKTLLVRVMTPDLRERLENLRKKPENIPQPISNTSRANLNKLLTDYTEMKKAILHVYWEEFQKDPVGLMSRVAQPASKKIDQNKLKPEMDEKGNLTTAGFACSQCGQPLFVYKLEQVSEKGKAYTNYFGRCNVAEHEKLILLAQLKPEKDSDEAVTYSLGKFGQRALDFYSIHVTKESTHPVKPLAQIAGNRYASPVGKALSDACMGTIASFLSKYQDIIIEHQKVVKGNQKRLESLRELAGKENLEYPSVTLPPQPHTKEGLDAYNEVIARVRMWVNLNLWQKLKLSRDDAKPLLRLKGFPSFPLVERQANEVDWWDMVCNVKKLINEKKEDGKVFWQNLAGYKRQEALRPYLSSEEDRKKGKKFARYQLGDLLLHLEKKHGEDWGKVYDEAWERIDKKVEGLSKHIKLEEERRSEDAQSKAALTDWLRAKASFVIEGLKEADKDEFCRCELKLQKWYGDLRGKPFAIEAENSILDISGFSKQYNCAFIWQKDGVKKLNLYLIINYFKGGKLRFKKIKPEAFEANRFYTVINKKSGEIVPMEVNFNFDDPNLIILPLAFGKRQGREFIWNDLLSLETGSLKLANGRVIEKTLYNRRTRQDEPALFVALTFERREVLDSSNIKPMNLIGVDRGENIPAVIALTDPEGCPLSRFKDSLGNPTHILRIRESYKEKQRTIQAKKEVEQRRAGGYSRKYASKAKNLADDMVRNTARDLLYYAVTQDAMLIFENLSRGFGRQGKRTFMAERQYTRMEDWLTAKLAYEGLPSKTYLSKTLAQYTSKTCSNCGFTITSADYDRVLEKLKKTATGWMTTINGKELKVEGQITYYNRYKRQNVVKDLSVELDRLSEESVNNDISSWTKGRSGEALSLLKKRFSHRPVQEKFVCLNCGFETHADEQAALNIARSWLFLRSQEYKKYQTNKTTGNTDKRAFVETWQSFYRKKLKEVWKPAV

SEQ ID NO: 35881 - protein, 978 aa, synthetic construct
  REGION 1..978: note = engineered CasX variant
QEIKRINKIRRRLVKDSNTKKAGKTGPMKTLLVRVMTPDLRERLENLRKKPENIPQPISNTSRANLNKLLTDYTEMKKAILHVYWEEFQKDPVGLMSRVAQPASKKIDQNKLKPEMDEKGNLTTAGFACSQCGQPLFVYKLEQVSEKGKAYTNYFGRCNVAEHEKLILLAQLKPEKDSDEAVTYSLGKFGQRALDFYSIHVTKESTHPVKPLAQIAGNRYASYPVGKALSDACMGTIASFLSKYQDIIIEHQKVVKGNQKRLESLRELAGKENLEYPSVTLPPQPHTKEGLDAYNEVIARVRMWVNLNLWQKLKLSRDDAKPLLRLKGFPSFPLVERQANEVDWWDMVCNVKKLINEKKEDGKVFWQNLAGYKRQEALRPYLSSEEDRKKGKKFARYQLGDLLLHLEKKHGEDWGKVYDEAWERIDKKVEGLSKHIKLEEERRSEDAQSKAALTDWLRAKASFVIEGLKEADKDEFCRCELKLQKWYGDLRGKPFAIEAENSILDISGFSKQYNCAFIWQKDGVKKLNLYLIINYFKGGKLRFKKIKPEAFEANRFYTVINKKSGEIVPMEVNFNFDDPNLIILPLAFGKRQGREFIWNDLLSLETGSLKLANGRVIEKTLYNRRTRQDEPALFVALTFERREVLDSSNIKPMNLIGVDRGENIPAVIALTDPEGCPLSRFKDSLGNPTHILRIGESYKEKQRTIQAKKEVEQRRAGGYSRKYASKAKNLADDMVRNTARDLLYYAVTQDAMLIFENLSRGFGRQGKRTFSAERQYTRMEDWLTAKLAYEGLPSKTYLSKTLAQYTSKTCSNCGFTITSADYDRVLEKLKKTATGWMTTINGKELKVEGQITYYNRYKRQNVVKDLSVELDRLSEESVNNDISSWTKGRSGEALSLLKKRFSHRPVQEKFVCLNCGFETHADEQAALNIARSWLFLRSQEYKKYQTNKTTGNTDKRAFVETWQSFYRKKLKEVWKPAV

SEQ ID NO: 35882 - protein, 978 aa, synthetic construct
  REGION 1..978: note = engineered CasX variant
QEIKRINKIRRRLVKDSNTKKAGKTGPMKTLLVRVMTPDLRERLENLRKKPENIPQPISNTSRANLNKLLTDYTEMKKAILHVYWEEFQKDPVGLMSRVAQPASKKIDQNKLKPEMDEKGNLTTAGFACSQCGQPLFVYKLEQVSEKGKAYTNYFGRCNVAEHEKLILLAQLKPEKDSDEAVTYSLGKFGQRALDFYSIHVTKESTHPVKPLAQIAGNRYASHPVGKALSDACMGTIASFLSKYQDIIIEHQKVVKGNQKRLESLRELAGKENLEYPSVTLPPQPHTKEGLDAYNEVIARVRMWVNLNLWQKLKLSRDDAKPLLRLKGFPSFPLVERQANEVDWWDMVCNVKKLINEKKEDGKVFWQNLAGYKRQEALRPYLSSEEDRKKGKKFARYQLGDLLLHLEKKHGEDWGKVYDEAWERIDKKVEGLSKHIKLEEERRSEDAQSKAALTDWLRAKASFVIEGLKEADKDEFCRCELKLQKWYGDLRGKPFAIEAENSILDISGFSKQYNCAFIWQKDGVKKLNLYLIINYFKGGKLRFKKIKPEAFEANRFYTVINKKSGEIVPMEVNFNFDDPNLIILPLAFGKRQGREFIWNDLLSLETGSLKLANGRVIEKTLYNRRTRQDEPALFVALTFERREVLDSSNIKPMNLIGVDRGENIPAVIALTDPEGCPLSRFKDSLGNPTHILRIGESYKEKQRTIQAKKEVEQRRAGGYSRKYASKAKNLADDMVRNTARDLLYYAVTQDAMLIFENLSRGFGRQGKRTFSAERQYTRMEDWLTAKLAYEGLPSKTYLSKTLAQYTSKTCSNCGFTITSADYDRVLEKLKKTATGWMTTINGKELKVEGQITYYNRYKRQNVVKDLSVELDRLSEESVNNDISSWTKGRSGEALSLLKKRFSHRPVQEKFVCLNCGFETHADEQAALNIARSWLFLRSQEYKKYQTNKTTGNTDKRAFVETWQSFYRKKLKEVWKPAV

SEQ ID NO: 35883 - protein, 978 aa, synthetic construct
  REGION 1..978: note = engineered CasX variant
QEIKRINKIRRRLVKDSNTKKAGKTGPMKTLLVRVMTPDLRERLENLRKKPENIPQPISNTSRANLNKLLTDYTEMKKAILHVYWEEFQKDPVGLMSRVAQPASKKIDQNKLKPEMDEKGNLTTAGFACSQCGQPLFVYKLEQVSEKGKAYTNYFGRCNVAEHEKLILLAQLKPEKDSDEAVTYSLGKFGQRALDFYSIHVTKESTHPVKPLAQIAGNRYASSPVGKALSDACMGTIASFLSKYQDIIIEHQKVVKGNQKRLESLRELAGKENLEYPSVTLPPQPHTKEGLDAYNEVIARVRMWVNLNLWQKLKLSRDDAKPLLRLKGFPSFPLVERQANEVDWWDMVCNVKKLINEKKEDGKVFWQNLAGYKRQEALRPYLSSEEDRKKGKKFARYQLGDLLLHLEKKHGEDWGKVYDEAWERIDKKVEGLSKHIKLEEERRSEDAQSKAALTDWLRAKASFVIEGLKEADKDEFCRCELKLQKWYGDLRGKPFAIEAENSILDISGFSKQYNCAFIWQKDGVKKLNLYLIINYFKGGKLRFKKIKPEAFEANRFYTVINKKSGEIVPMEVNFNFDDPNLIILPLAFGKRQGREFIWNDLLSLETGSLKLANGRVIEKTLYNRRTRQDEPALFVALTFERREVLDSSNIKPMNLIGVDRGENIPAVIALTDPEGCPLSRFKDSLGNPTHILRIGESYKEKQRTIQAKKEVEQRRAGGYSRKYASKAKNLADDMVRNTARDLLYYAVTQDAMLIFENLSRGFGRQGKRTFSAERQYTRMEDWLTAKLAYEGLPSKTYLSKTLAQYTSKTCSNCGFTITSADYDRVLEKLKKTATGWMTTINGKELKVEGQITYYNRYKRQNVVKDLSVELDRLSEESVNNDISSWTKGRSGEALSLLKKRFSHRPVQEKFVCLNCGFETHADEQAALNIARSWLFLRSQEYKKYQTNKTTGNTDKRAFVETWQSFYRKKLKEVWKPAV

SEQ ID NO: 35884 - protein, 978 aa, synthetic construct
  REGION 1..978: note = engineered CasX variant
QEIKRINKIRRRLVKDSNTKKAGKTGPMKTLLVRVMTPDLRERLENLRKKPENIPQPISNTSRANLNKLLTDYTEMKKAILHVYWEEFQKDPVGLMSRVAQPASKKIDQNKLKPEMDEKGNLTTAGFACSQCGQPLFVYKLEQVSEKGKAYTNYFGRCNVAEHEKLILLAQLKPEKDSDEAVTYSLGKFGQRALDFYSIHVTKESTHPVKPLAQIAGNRYASTPVGKALSDACMGTIASFLSKYQDIIIEHQKVVKGNQKRLESLRELAGKENLEYPSVTLPPQPHTKEGLDAYNEVIARVRMWVNLNLWQKLKLSRDDAKPLLRLKGFPSFPLVERQANEVDWWDMVCNVKKLINEKKEDGKVFWQNLAGYKRQEALRPYLSSEEDRKKGKKFARYQLGDLLLHLEKKHGEDWGKVYDEAWERIDKKVEGLSKHIKLEEERRSEDAQSKAALTDWLRAKASFVIEGLKEADKDEFCRCELKLQKWYGDLRGKPFAIEAENSILDISGFSKQYNCAFIWQKDGVKKLNLYLIINYFKGGKLRFKKIKPEAFEANRFYTVINKKSGEIVPMEVNFNFDDPNLIILPLAFGKRQGREFIWNDLLSLETGSLKLANGRVIEKTLYNRRTRQDEPALFVALTFERREVLDSSNIKPMNLIGVDRGENIPAVIALTDPEGCPLSRFKDSLGNPTHILRIGESYKEKQRTIQAKKEVEQRRAGGYSRKYASKAKNLADDMVRNTARDLLYYAVTQDAMLIFENLSRGFGRQGKRTFSAERQYTRMEDWLTAKLAYEGLPSKTYLSKTLAQYTSKTCSNCGFTITSADYDRVLEKLKKTATGWMTTINGKELKVEGQITYYNRYKRQNVVKDLSVELDRLSEESVNNDISSWTKGRSGEALSLLKKRFSHRPVQEKFVCLNCGFETHADEQAALNIARSWLFLRSQEYKKYQTNKTTGNTDKRAFVETWQSFYRKKLKEVWKPAV

SEQ ID NO: 35885 - protein, 978 aa, synthetic construct
  REGION 1..978: note = engineered CasX variant
QEIKRINKIRRRLVKDSNTKKAGKTGPMKTLLVRVMTPDLRERLENLRKKPENIPQPISNTSRANLNKLLTDYTEMKKAILHVYWEEFQKDPVGLMSRVAQPASKKIDQNKLKPEMDEKGNLTTAGFACSQCGQPLFVYKLEQVSEKGKAYTNYFGRCNVAEHEKLILLAQLKPEKDSDEAVTYSLGKFGQRALDFYSIHVTKESTHPVKPLAQIAGNRYASAPVGKALSDACMGTIASFLSKYQDIIIEHQKVVKGNQKRLESLRELAGKENLEYPSVTLPPQPHTKEGLDAYNEVIARVRMWVNLNLWQKLKLSRDDAKPLLRLKGFPSFPLVERQANEVDWWDMVCNVKKLINEKKEDGKVFWQNLAGYKRQEALRPYLSSEEDRKKGKKFARYQLGDLLLHLEKKHGEDWGKVYDEAWERIDKKVEGLSKHIKLEEERRSEDAQSKAALTDWLRAKASFVIEGLKEADKDEFCRCELKLQKWYGDLRGKPFAIEAENSILDISGFSKQYNCAFIWQKDGVKKLNLYLIINYFKGGKLRFKKIKPEAFEANRFYTVINKKSGEIVPMEVNFNFDDPNLIILPLAFGKRQGREFIWNDLLSLETGSLKLANGRVIEKTLYNRRTRQDEPALFVALTFERREVLDSSNIKPMNLIGVDRGENIPAVIALTDPEGCPLSRFKDSLGNPTHILRIGESYKEKQRTIQAKKEVEQRRAGGYSRKYASKAKNLADDMVRNTARDLLYYAVTQDAMLIFENLSRGFGRQGKRTFSAERQYTRMEDWLTAKLAYEGLPSKTYLSKTLAQYTSKTCSNCGFTITSADYDRVLEKLKKTATGWMTTINGKELKVEGQITYYNRYKRQNVVKDLSVELDRLSEESVNNDISSWTKGRSGEALSLLKKRFSHRPVQEKFVCLNCGFETHADEQAALNIARSWLFLRSQEYKKYQTNKTTGNTDKRAFVETWQSFYRKKLKEVWKPAV

SEQ ID NO: 35886 - protein, 978 aa, synthetic construct
  REGION 1..978: note = engineered CasX variant
QEIKRINKIRRRLVKDSNTKKAGKTGPMKTLLVRVMTPDLRERLENLRKKPENIPQPISNTSRANLNKLLTDYTEMKKAILHVYWEEFQKDPVGLMSRVAQPASKKIDQNKLKPEMDEKGNLTTAGFACSQCGQPLFVYKLEQVSEKGKAYTNYFGRCNVAEHEKLILLAQLKPEKDSDEAVTYSLGKFGQRALDFYSIHVTKESTHPVKPLAQIAGNRYASVPVGKALSDACMGTIASFLSKYQDIIIEHQKVVKGNQKRLESLRELAGKENLEYPSVTLPPQPHTKEGLDAYNEVIARVRMWVNLNLWQKLKLSRDDAKPLLRLKGFPSFPLVERQANEVDWWDMVCNVKKLINEKKEDGKVFWQNLAGYKRQEALRPYLSSEEDRKKGKKFARYQLGDLLLHLEKKHGEDWGKVYDEAWERIDKKVEGLSKHIKLEEERRSEDAQSKAALTDWLRAKASFVIEGLKEADKDEFCRCELKLQKWYGDLRGKPFAIEAENSILDISGFSKQYNCAFIWQKDGVKKLNLYLIINYFKGGKLRFKKIKPEAFEANRFYTVINKKSGEIVPMEVNFNFDDPNLIILPLAFGKRQGREFIWNDLLSLETGSLKLANGRVIEKTLYNRRTRQDEPALFVALTFERREVLDSSNIKPMNLIGVDRGENIPAVIALTDPEGCPLSRFKDSLGNPTHILRIGESYKEKQRTIQAKKEVEQRRAGGYSRKYASKAKNLADDMVRNTARDLLYYAVTQDAMLIFENLSRGFGRQGKRTFSAERQYTRMEDWLTAKLAYEGLPSKTYLSKTLAQYTSKTCSNCGFTITSADYDRVLEKLKKTATGWMTTINGKELKVEGQITYYNRYKRQNVVKDLSVELDRLSEESVNNDISSWTKGRSGEALSLLKKRFSHRPVQEKFVCLNCGFETHADEQAALNIARSWLFLRSQEYKKYQTNKTTGNTDKRAFVETWQSFYRKKLKEVWKPAV

SEQ ID NO: 35887 - protein, 978 aa, synthetic construct
  REGION 1..978: note = engineered CasX variant
QEIKRINKIRRRLVKDSNTKKAGKTGPMKTLLVRVMTPDLRERLENLRKKPENIPQPISNTSRANLNKLLTDYTEMKKAILHVYWEEFQKDPVGLMSRVAQPASKKIDQNKLKPEMDEKGNLTTAGFACSQCGQPLFVYKLEQVSEKGKAYTNYFGRCNVAEHEKLIKLAQLKPEKDSDEAVTYSLGKFGQRALDFYSIHVTKESTHPVKPLAQIAGNRYASGPVGKALSDACMGTIASFLSKYQDIIIEHQKVVKGNQKRLESLRELAGKENLEYPSVTLPPQPHTKEGLDAYNEVIARVRMWVNLNLWQKLKLSRDDAKPLLRLKGFPSFPLVERQANEVDWWDMVCNVKKLINEKKEDGKVFWQNLAGYKRQEALRPYLSSEEDRKKGKKFARYQLGDLLLHLEKKHGEDWGKVYDEAWERIDKKVEGLSKHIKLEEERRSEDAQSKAALTDWLRAKASFVIEGLKEADKDEFCRCELKLQKWYGDLRGKPFAIEAENSILDISGFSKQYNCAFIWQKDGVKKLNLYLIINYFKGGKLRFKKIKPEAFEANRFYTVINKKSGEIVPMEVNFNFDDPNLIILPLAFGKRQGREFIWNDLLSLETGSLKLANGRVIEKTLYNRRTRQDEPALFVALTFERREVLDSSNIKPMNLIGVDRGENIPAVIALTDPEGCPLSRFKDSLGNPTHILRIGESYKEKQRTIQAKKEVEQRRAGGYSRKYASKAKNLADDMVRNTARDLLYYAVTQDAMLIFENLSRGFGRQGKRTFSAERQYTRMEDWLTAKLAYEGLPSKTYLSKTLAQYTSKTCSNCGFTITSADYDRVLEKLKKTATGWMTTINGKELKVEGQITYYNRYKRQNVVKDLSVELDRLSEESVNNDISSWTKGRSGEALSLLKKRFSHRPVQEKFVCLNCGFETHADEQAALNIARSWLFLRSQEYKKYQTNKTTGNTDKRAFVETWQSFYRKKLKEVWKPAV

SEQ ID NO: 35888 - protein, 977 aa, synthetic construct
  REGION 1..977: note = engineered CasX variant
QEIKRINKIRRRLVKDSNTKKAGKTGPMKTLLVRVMTPDLRERLENLRKKPENIPQPISNTSRANLNKLLTDYTEMKKAILHVYWEEFQKDPVGLMSRVAQPASKKIDQNKLKPEMDEKGNLTTAGFACSQCGQPLFVYKLEQVSEKGKAYTNYFGRCNVAEHEKLILLAQLKPEKDSDEAVTYSLGKFGQRALDFYSIHVTKESTHPVKPLAQIAGNRYASPVGKALSDACMGTIASFLSKYQDIIIEHQKVVKGNQKRLESLRELAGKENLEYPSVTLPPQPHTKEGLDAYNEVIARVRMWVNLNLWQKLKLSRDDAKPLLRLKGFPSFPLVERQANEVDWWDMVCNVKKLINEKKEDGKVFWQNLAGYKRQEALRPYLSSEEDRKKGKKFARYQLGDLLLHLEKKHGEDWGKVYDEAWERIDKKVEGLSKHIKLEEERRSEDAQSKAALTDWLRAKASFVIEGLKEADKDEFCRCELKLQKWYGDLRGKPFAIEAENSILDISGFSKQYNCAFIWQKDGVKKLNLYLIINYFKGGKLRFKKIKPEAFEANRFYTVINKKSGEIVPMEVNFNFDDPNLIILPLAFGKRQGREFIWNDLLSLETGSLKLANGRVIEKTLYNRRTRQDEPALFVALTFERREVLDSSNIKPMNLIGVDRGENIPAVIALTDPEGCPLSRFKDSLGNPTHILRIGESYKEKQRTIQAKKEVEQRRAGGYSRKYASKAKNLADDMVRNTARDLLYYAVTQDAMLIFENLSRGFGRQGKRTFSAERQYTRMEDWLTAKLAYEGLPSKTYLSKTLAQYTSKTCSNCGFTITSADYDRVLEKLKKTATGWMTTINGKELKVEGQITYYNRYKRQNVVKDLSVELDRLSEESVNNDISSWTKGRSGEALSLLKKRFSHRPVQEKFVCLNCGFETHADEQAALNIARSWLFLRSQEYKKYQTNKTTGNTDKRAFVETWQSFYRKKLKEVWKPAV

SEQ ID NO: 35889 - protein, 978 aa, synthetic construct
  REGION 1..978: note = engineered CasX variant
QEIKRINKIRRRLVKDSNTKKAGKTGPMKTLLVRVMTPDLRERLENLRKKPENIPQPISNTSRANLNKLLTDYTEMKKAILHVYWEEFQKDPVGLMSRVAQPASKKIDQNKLKPEMDEKGNLTTAGFACSQCGQPLFVYKLEQVSEKGKAYTNYFGRCNVAEHEKLILLAQLKPEKDSDEAVTYSLGKFGQRALDFYSIHVTKESTHPVKPLAQIAGNRYASYPVGKALSDACMGTIASFLSKYQDIIIEHQKVVKGNQKRLESLRELAGKENLEYPSVTLPPQPHTKEGLDAYNEVIARVRMWVNLNLWQKLKLSRDDAKPLLRLKGFPSFPLVERQANEVDWWDMVCNVKKLINEKKEDGKVFWQNLAGYKRQEALRPYLSSEEDRKKGKKFARYQLGDLLLHLEKKHGEDWGKVYDEAWERIDKKVEGLSKHIKLEEERRSEDAQSKAALTDWLRAKASFVIEGLKEADKDEFCRCELKLQKWYGDLRGKPFAIEAENSILDISGFSKQYNCAFIWQKDGVKKLNLYLIINYFKGGKLRFKKIKPEAFEANRFYTVINKKSGEIVPMEVNFNFDDPNLIILPLAFGKRQGREFIWNDLLSLETGSLKLANGRVIEKTLYNRRTRQDEPALFVALTFERREVLDSSNIKPMNLIGVDRGENIPAVIALTDPEGCPLSRFKDSLGNPTHILRIGESYKEKQRTIQAKKEVEQRRAGGYSRKYASKAKNLADDMVRNTARDLLYYAVTQDAMLIFENLSRGFGRQGKRTFMAERQYTRMEDWLTAKLAYEGLPSKTYLSKTLAQYTSKTCSNCGFTITSADYDRVLEKLKKTATGWMTTINGKELKVEGQITYYNRYKRQNVVKDLSVELDRLSEESVNNDISSWDKGRSGEALSLLKKRFSHRPVQEKFVCLNCGFETHADEQAALNIARSWLFLRSQEYKKYQTNKTTGNTDKRAFVETWQSFYRKKLKEVWKPAV

SEQ ID NO: 35890 - protein, 978 aa, synthetic construct
  REGION 1..978: note = engineered CasX variant
QEIKRINKIRRRLVKDSNTKKAGKTGPMKTLLVRVMTPDLRERLENLRKKPENIPQPISNTSRANLNKLLTDYTEMKKAILHVYWEEFQKDPVGLMSRVAQPASKKIDQNKLKPEMDEKGNLTTAGFACSQCGQPLFVYKLEQVSEKGKAYTNYFGRCNVAEHEKLILLAQLKPEKDSDEAVTYSLGKFGQRALDFYSIHVTKESTHPVKPLAQIAGNRYASHPVGKALSDACMGTIASFLSKYQDIIIEHQKVVKGNQKRLESLRELAGKENLEYPSVTLPPQPHTKEGLDAYNEVIARVRMWVNLNLWQKLKLSRDDAKPLLRLKGFPSFPLVERQANEVDWWDMVCNVKKLINEKKEDGKVFWQNLAGYKRQEALRPYLSSEEDRKKGKKFARYQLGDLLLHLEKKHGEDWGKVYDEAWERIDKKVEGLSKHIKLEEERRSEDAQSKAALTDWLRAKASFVIEGLKEADKDEFCRCELKLQKWYGDLRGKPFAIEAENSILDISGFSKQYNCAFIWQKDGVKKLNLYLIINYFKGGKLRFKKIKPEAFEANRFYTVINKKSGEIVPMEVNFNFDDPNLIILPLAFGKRQGREFIWNDLLSLETGSLKLANGRVIEKTLYNRRTRQDEPALFVALTFERREVLDSSNIKPMNLIGVDRGENIPAVIALTDPEGCPLSRFKDSLGNPTHILRIGESYKEKQRTIQAKKEVEQRRAGGYSRKYASKAKNLADDMVRNTARDLLYYAVTQDAMLIFENLSRGFGRQGKRTFMAERQYTRMEDWLTAKLAYEGLPSKTYLSKTLAQYTSKTCSNCGFTITSADYDRVLEKLKKTATGWMTTINGKELKVEGQITYYNRYKRQNVVKDLSVELDRLSEESVNNDISSWDKGRSGEALSLLKKRFSHRPVQEKFVCLNCGFETHADEQAALNIARSWLFLRSQEYKKYQTNKTTGNTDKRAFVETWQSFYRKKLKEVWKPAV

SEQ ID NO: 35891 - protein, 978 aa, synthetic construct
  REGION 1..978: note = engineered CasX variant
QEIKRINKIRRRLVKDSNTKKAGKTGPMKTLLVRVMTPDLRERLENLRKKPENIPQPISNTSRANLNKLLTDYTEMKKAILHVYWEEFQKDPVGLMSRVAQPASKKIDQNKLKPEMDEKGNLTTAGFACSQCGQPLFVYKLEQVSEKGKAYTNYFGRCNVAEHEKLILLAQLKPEKDSDEAVTYSLGKFGQRALDFYSIHVTKESTHPVKPLAQIAGNRYASSPVGKALSDACMGTIASFLSKYQDIIIEHQKVVKGNQKRLESLRELAGKENLEYPSVTLPPQPHTKEGLDAYNEVIARVRMWVNLNLWQKLKLSRDDAKPLLRLKGFPSFPLVERQANEVDWWDMVCNVKKLINEKKEDGKVFWQNLAGYKRQEALRPYLSSEEDRKKGKKFARYQLGDLLLHLEKKHGEDWGKVYDEAWERIDKKVEGLSKHIKLEEERRSEDAQSKAALTDWLRAKASFVIEGLKEADKDEFCRCELKLQKWYGDLRGKPFAIEAENSILDISGFSKQYNCAFIWQKDGVKKLNLYLIINYFKGGKLRFKKIKPEAFEANRFYTVINKKSGEIVPMEVNFNFDDPNLIILPLAFGKRQGREFIWNDLLSLETGSLKLANGRVIEKTLYNRRTRQDEPALFVALTFERREVLDSSNIKPMNLIGVDRGENIPAVIALTDPEGCPLSRFKDSLGNPTHILRIGESYKEKQRTIQAKKEVEQRRAGGYSRKYASKAKNLADDMVRNTARDLLYYAVTQDAMLIFENLSRGFGRQGKRTFMAERQYTRMEDWLTAKLAYEGLPSKTYLSKTLAQYTSKTCSNCGFTITSADYDRVLEKLKKTATGWMTTINGKELKVEGQITYYNRYKRQNVVKDLSVELDRLSEESVNNDISSWDKGRSGEALSLLKKRFSHRPVQEKFVCLNCGFETHADEQAALNIARSWLFLRSQEYKKYQTNKTTGNTDKRAFVETWQSFYRKKLKEVWKPAV

SEQ ID NO: 35892 - protein, 978 aa, synthetic construct
  REGION 1..978: note = engineered CasX variant
QEIKRINKIRRRLVKDSNTKKAGKTGPMKTLLVRVMTPDLRERLENLRKKPENIPQPISNTSRANLNKLLTDYTEMKKAILHVYWEEFQKDPVGLMSRVAQPASKKIDQNKLKPEMDEKGNLTTAGFACSQCGQPLFVYKLEQVSEKGKAYTNYFGRCNVAEHEKLILLAQLKPEKDSDEAVTYSLGKFGQRALDFYSIHVTKESTHPVKPLAQIAGNRYASTPVGKALSDACMGTIASFLSKYQDIIIEHQKVVKGNQKRLESLRELAGKENLEYPSVTLPPQPHTKEGLDAYNEVIARVRMWVNLNLWQKLKLSRDDAKPLLRLKGFPSFPLVERQANEVDWWDMVCNVKKLINEKKEDGKVFWQNLAGYKRQEALRPYLSSEEDRKKGKKFARYQLGDLLLHLEKKHGEDWGKVYDEAWERIDKKVEGLSKHIKLEEERRSEDAQSKAALTDWLRAKASFVIEGLKEADKDEFCRCELKLQKWYGDLRGKPFAIEAENSILDISGFSKQYNCAFIWQKDGVKKLNLYLIINYFKGGKLRFKKIKPEAFEANRFYTVINKKSGEIVPMEVNFNFDDPNLIILPLAFGKRQGREFIWNDLLSLETGSLKLANGRVIEKTLYNRRTRQDEPALFVALTFERREVLDSSNIKPMNLIGVDRGENIPAVIALTDPEGCPLSRFKDSLGNPTHILRIGESYKEKQRTIQAKKEVEQRRAGGYSRKYASKAKNLADDMVRNTARDLLYYAVTQDAMLIFENLSRGFGRQGKRTFMAERQYTRMEDWLTAKLAYEGLPSKTYLSKTLAQYTSKTCSNCGFTITSADYDRVLEKLKKTATGWMTTINGKELKVEGQITYYNRYKRQNVVKDLSVELDRLSEESVNNDISSWDKGRSGEALSLLKKRFSHRPVQEKFVCLNCGFETHADEQAALNIARSWLFLRSQEYKKYQTNKTTGNTDKRAFVETWQSFYRKKLKEVWKPAV

SEQ ID NO: 35893 - protein, 978 aa, synthetic construct
  REGION 1..978: note = engineered CasX variant
QEIKRINKIRRRLVKDSNTKKAGKTGPMKTLLVRVMTPDLRERLENLRKKPENIPQPISNTSRANLNKLLTDYTEMKKAILHVYWEEFQKDPVGLMSRVAQPASKKIDQNKLKPEMDEKGNLTTAGFACSQCGQPLFVYKLEQVSEKGKAYTNYFGRCNVAEHEKLILLAQLKPEKDSDEAVTYSLGKFGQRALDFYSIHVTKESTHPVKPLAQIAGNRYASAPVGKALSDACMGTIASFLSKYQDIIIEHQKVVKGNQKRLESLRELAGKENLEYPSVTLPPQPHTKEGLDAYNEVIARVRMWVNLNLWQKLKLSRDDAKPLLRLKGFPSFPLVERQANEVDWWDMVCNVKKLINEKKEDGKVFWQNLAGYKRQEALRPYLSSEEDRKKGKKFARYQLGDLLLHLEKKHGEDWGKVYDEAWERIDKKVEGLSKHIKLEEERRSEDAQSKAALTDWLRAKASFVIEGLKEADKDEFCRCELKLQKWYGDLRGKPFAIEAENSILDISGFSKQYNCAFIWQKDGVKKLNLYLIINYFKGGKLRFKKIKPEAFEANRFYTVINKKSGEIVPMEVNFNFDDPNLIILPLAFGKRQGREFIWNDLLSLETGSLKLANGRVIEKTLYNRRTRQDEPALFVALTFERREVLDSSNIKPMNLIGVDRGENIPAVIALTDPEGCPLSRFKDSLGNPTHILRIGESYKEKQRTIQAKKEVEQRRAGGYSRKYASKAKNLADDMVRNTARDLLYYAVTQDAMLIFENLSRGFGRQGKRTFMAERQYTRMEDWLTAKLAYEGLPSKTYLSKTLAQYTSKTCSNCGFTITSADYDRVLEKLKKTATGWMTTINGKELKVEGQITYYNRYKRQNVVKDLSVELDRLSEESVNNDISSWDKGRSGEALSLLKKRFSHRPVQEKFVCLNCGFETHADEQAALNIARSWLFLRSQEYKKYQTNKTTGNTDKRAFVETWQSFYRKKLKEVWKPAV

SEQ ID NO: 35894 - protein, 978 aa, synthetic construct
  REGION 1..978: note = engineered CasX variant
QEIKRINKIRRRLVKDSNTKKAGKTGPMKTLLVRVMTPDLRERLENLRKKPENIPQPISNTSRANLNKLLTDYTEMKKAILHVYWEEFQKDPVGLMSRVAQPASKKIDQNKLKPEMDEKGNLTTAGFACSQCGQPLFVYKLEQVSEKGKAYTNYFGRCNVAEHEKLILLAQLKPEKDSDEAVTYSLGKFGQRALDFYSIHVTKESTHPVKPLAQIAGNRYASVPVGKALSDACMGTIASFLSKYQDIIIEHQKVVKGNQKRLESLRELAGKENLEYPSVTLPPQPHTKEGLDAYNEVIARVRMWVNLNLWQKLKLSRDDAKPLLRLKGFPSFPLVERQANEVDWWDMVCNVKKLINEKKEDGKVFWQNLAGYKRQEALRPYLSSEEDRKKGKKFARYQLGDLLLHLEKKHGEDWGKVYDEAWERIDKKVEGLSKHIKLEEERRSEDAQSKAALTDWLRAKASFVIEGLKEADKDEFCRCELKLQKWYGDLRGKPFAIEAENSILDISGFSKQYNCAFIWQKDGVKKLNLYLIINYFKGGKLRFKKIKPEAFEANRFYTVINKKSGEIVPMEVNFNFDDPNLIILPLAFGKRQGREFIWNDLLSLETGSLKLANGRVIEKTLYNRRTRQDEPALFVALTFERREVLDSSNIKPMNLIGVDRGENIPAVIALTDPEGCPLSRFKDSLGNPTHILRIGESYKEKQRTIQAKKEVEQRRAGGYSRKYASKAKNLADDMVRNTARDLLYYAVTQDAMLIFENLSRGFGRQGKRTFMAERQYTRMEDWLTAKLAYEGLPSKTYLSKTLAQYTSKTCSNCGFTITSADYDRVLEKLKKTATGWMTTINGKELKVEGQITYYNRYKRQNVVKDLSVELDRLSEESVNNDISSWDKGRSGEALSLLKKRFSHRPVQEKFVCLNCGFETHADEQAALNIARSWLFLRSQEYKKYQTNKTTGNTDKRAFVETWQSFYRKKLKEVWKPAV

SEQ ID NO: 35895 - protein, 978 aa, synthetic construct
  REGION 1..978: note = engineered CasX variant
QEIKRINKIRRRLVKDSNTKKAGKTGPMKTLLVRVMTPDLRERLENLRKKPENIPQPISNTSRANLNKLLTDYTEMKKAILHVYWEEFQKDPVGLMSRVAQPASKKIDQNKLKPEMDEKGNLTTAGFACSQCGQPLFVYKLEQVSEKGKAYTNYFGRCNVAEHEKLIKLAQLKPEKDSDEAVTYSLGKFGQRALDFYSIHVTKESTHPVKPLAQIAGNRYASGPVGKALSDACMGTIASFLSKYQDIIIEHQKVVKGNQKRLESLRELAGKENLEYPSVTLPPQPHTKEGLDAYNEVIARVRMWVNLNLWQKLKLSRDDAKPLLRLKGFPSFPLVERQANEVDWWDMVCNVKKLINEKKEDGKVFWQNLAGYKRQEALRPYLSSEEDRKKGKKFARYQLGDLLLHLEKKHGEDWGKVYDEAWERIDKKVEGLSKHIKLEEERRSEDAQSKAALTDWLRAKASFVIEGLKEADKDEFCRCELKLQKWYGDLRGKPFAIEAENSILDISGFSKQYNCAFIWQKDGVKKLNLYLIINYFKGGKLRFKKIKPEAFEANRFYTVINKKSGEIVPMEVNFNFDDPNLIILPLAFGKRQGREFIWNDLLSLETGSLKLANGRVIEKTLYNRRTRQDEPALFVALTFERREVLDSSNIKPMNLIGVDRGENIPAVIALTDPEGCPLSRFKDSLGNPTHILRIGESYKEKQRTIQAKKEVEQRRAGGYSRKYASKAKNLADDMVRNTARDLLYYAVTQDAMLIFENLSRGFGRQGKRTFMAERQYTRMEDWLTAKLAYEGLPSKTYLSKTLAQYTSKTCSNCGFTITSADYDRVLEKLKKTATGWMTTINGKELKVEGQITYYNRYKRQNVVKDLSVELDRLSEESVNNDISSWDKGRSGEALSLLKKRFSHRPVQEKFVCLNCGFETHADEQAALNIARSWLFLRSQEYKKYQTNKTTGNTDKRAFVETWQSFYRKKLKEVWKPAV

SEQ ID NO: 35896 - protein, 977 aa, synthetic construct
  REGION 1..977: note = engineered CasX variant
QEIKRINKIRRRLVKDSNTKKAGKTGPMKTLLVRVMTPDLRERLENLRKKPENIPQPISNTSRANLNKLLTDYTEMKKAILHVYWEEFQKDPVGLMSRVAQPASKKIDQNKLKPEMDEKGNLTTAGFACSQCGQPLFVYKLEQVSEKGKAYTNYFGRCNVAEHEKLILLAQLKPEKDSDEAVTYSLGKFGQRALDFYSIHVTKESTHPVKPLAQIAGNRYASPVGKALSDACMGTIASFLSKYQDIIIEHQKVVKGNQKRLESLRELAGKENLEYPSVTLPPQPHTKEGLDAYNEVIARVRMWVNLNLWQKLKLSRDDAKPLLRLKGFPSFPLVERQANEVDWWDMVCNVKKLINEKKEDGKVFWQNLAGYKRQEALRPYLSSEEDRKKGKKFARYQLGDLLLHLEKKHGEDWGKVYDEAWERIDKKVEGLSKHIKLEEERRSEDAQSKAALTDWLRAKASFVIEGLKEADKDEFCRCELKLQKWYGDLRGKPFAIEAENSILDISGFSKQYNCAFIWQKDGVKKLNLYLIINYFKGGKLRFKKIKPEAFEANRFYTVINKKSGEIVPMEVNFNFDDPNLIILPLAFGKRQGREFIWNDLLSLETGSLKLANGRVIEKTLYNRRTRQDEPALFVALTFERREVLDSSNIKPMNLIGVDRGENIPAVIALTDPEGCPLSRFKDSLGNPTHILRIGESYKEKQRTIQAKKEVEQRRAGGYSRKYASKAKNLADDMVRNTARDLLYYAVTQDAMLIFENLSRGFGRQGKRTFMAERQYTRMEDWLTAKLAYEGLPSKTYLSKTLAQYTSKTCSNCGFTITSADYDRVLEKLKKTATGWMTTINGKELKVEGQITYYNRYKRQNVVKDLSVELDRLSEESVNNDISSWDKGRSGEALSLLKKRFSHRPVQEKFVCLNCGFETHADEQAALNIARSWLFLRSQEYKKYQTNKTTGNTDKRAFVETWQSFYRKKLKEVWKPAV

SEQ ID NO: 35897 - protein, 978 aa, synthetic construct
  REGION 1..978: note = engineered CasX variant
QEIKRINKIRRRLVKDSNTKKAGKTGPMKTLLVRVMTPDLRERLENLRKKPENIPQPISNTSRANLNKLLTDYTEMKKAILHVYWEEFQVDPVGLMSRVAQPASKKIDQNKLKPEMDEKGNLTTAGFACSQCGQPLFVYKLEQVSEKGKAYTNYFGRCNVAEHEKLILLAQLKPEKDSDEAVTYSLGKFGQRALDFYSIHVTKESTHPVKPLAQIAGNRYASYPVGKALSDACMGTIASFLSKYQDIIIEHQKVVKGNQKRLESLRELAGKENLEYPSVTLPPQPHTKEGLDAYNEVIARVRMWVNLNLWQKLKLSRDDAKPLLRLKGFPSFPLVERQANEVDWWDMVCNVKKLINEKKEDGKVFWQNLAGYKRQEALRPYLSSEEDRKKGKKFARYQLGDLLLHLEKKHGEDWGKVYDEAWERIDKKVEGLSKHIKLEEERRSEDAQSKAALTDWLRAKASFVIEGLKEADKDEFCRCELKLQKWYGDLRGKPFAIEAENSILDISGFSKQYNCAFIWQKDGVKKLNLYLIINYFKGGKLRFKKIKPEAFEANRFYTVINKKSGEIVPMEVNFNFDDPNLIILPLAFGKRQGREFIWNDLLSLETGSLKLANGRVIEKTLYNRRTRQDEPALFVALTFERREVLDSSNIKPMNLIGVDRGENIPAVIALTDPEGCPLSRFKDSLGNPTHILRIGESYKEKQRTIQAKKEVEQRRAGGYSRKYASKAKNLADDMVRNTARDLLYYAVTQDAMLIFENLSRGFGRQGKRTFMAERQYTRMEDWLTAKLAYEGLPSKTYLSKTLAQYTSKTCSNCGFTITSADYDRVLEKLKKTATGWMTTINGKELKVEGQITYYNRYKRQNVVKDLSVELDRLSEESVNNDISSWTKGRSGEALSLLKKRFSHRPVQEKFVCLNCGFETHADEQAALNIARSWLFLRSQEYKKYQTNKTTGNTDKRAFVETWQSFYRKKLKEVWKPAV

SEQ ID NO: 35898 - protein, 978 aa, synthetic construct
  REGION 1..978: note = engineered CasX variant
QEIKRINKIRRRLVKDSNTKKAGKTGPMKTLLVRVMTPDLRERLENLRKKPENIPQPISNTSRANLNKLLTDYTEMKKAILHVYWEEFQVDPVGLMSRVAQPASKKIDQNKLKPEMDEKGNLTTAGFACSQCGQPLFVYKLEQVSEKGKAYTNYFGRCNVAEHEKLILLAQLKPEKDSDEAVTYSLGKFGQRALDFYSIHVTKESTHPVKPLAQIAGNRYASHPVGKALSDACMGTIASFLSKYQDIIIEHQKVVKGNQKRLESLRELAGKENLEYPSVTLPPQPHTKEGLDAYNEVIARVRMWVNLNLWQKLKLSRDDAKPLLRLKGFPSFPLVERQANEVDWWDMVCNVKKLINEKKEDGKVFWQNLAGYKRQEALRPYLSSEEDRKKGKKFARYQLGDLLLHLEKKHGEDWGKVYDEAWERIDKKVEGLSKHIKLEEERRSEDAQSKAALTDWLRAKASFVIEGLKEADKDEFCRCELKLQKWYGDLRGKPFAIEAENSILDISGFSKQYNCAFIWQKDGVKKLNLYLIINYFKGGKLRFKKIKPEAFEANRFYTVINKKSGEIVPMEVNFNFDDPNLIILPLAFGKRQGREFIWNDLLSLETGSLKLANGRVIEKTLYNRRTRQDEPALFVALTFERREVLDSSNIKPMNLIGVDRGENIPAVIALTDPEGCPLSRFKDSLGNPTHILRIGESYKEKQRTIQAKKEVEQRRAGGYSRKYASKAKNLADDMVRNTARDLLYYAVTQDAMLIFENLSRGFGRQGKRTFMAERQYTRMEDWLTAKLAYEGLPSKTYLSKTLAQYTSKTCSNCGFTITSADYDRVLEKLKKTATGWMTTINGKELKVEGQITYYNRYKRQNVVKDLSVELDRLSEESVNNDISSWTKGRSGEALSLLKKRFSHRPVQEKFVCLNCGFETHADEQAALNIARSWLFLRSQEYKKYQTNKTTGNTDKRAFVETWQSFYRKKLKEVWKPAV

SEQ ID NO: 35899 - protein, 978 aa, synthetic construct
  REGION 1..978: note = engineered CasX variant
QEIKRINKIRRRLVKDSNTKKAGKTGPMKTLLVRVMTPDLRERLENLRKKPENIPQPISNTSRANLNKLLTDYTEMKKAILHVYWEEFQVDPVGLMSRVAQPASKKIDQNKLKPEMDEKGNLTTAGFACSQCGQPLFVYKLEQVSEKGKAYTNYFGRCNVAEHEKLILLAQLKPEKDSDEAVTYSLGKFGQRALDFYSIHVTKESTHPVKPLAQIAGNRYASSPVGKALSDACMGTIASFLSKYQDIIIEHQKVVKGNQKRLESLRELAGKENLEYPSVTLPPQPHTKEGLDAYNEVIARVRMWVNLNLWQKLKLSRDDAKPLLRLKGFPSFPLVERQANEVDWWDMVCNVKKLINEKKEDGKVFWQNLAGYKRQEALRPYLSSEEDRKKGKKFARYQLGDLLLHLEKKHGEDWGKVYDEAWERIDKKVEGLSKHIKLEEERRSEDAQSKAALTDWLRAKASFVIEGLKEADKDEFCRCELKLQKWYGDLRGKPFAIEAENSILDISGFSKQYNCAFIWQKDGVKKLNLYLIINYFKGGKLRFKKIKPEAFEANRFYTVINKKSGEIVPMEVNFNFDDPNLIILPLAFGKRQGREFIWNDLLSLETGSLKLANGRVIEKTLYNRRTRQDEPALFVALTFERREVLDSSNIKPMNLIGVDRGENIPAVIALTDPEGCPLSRFKDSLGNPTHILRIGESYKEKQRTIQAKKEVEQRRAGGYSRKYASKAKNLADDMVRNTARDLLYYAVTQDAMLIFENLSRGFGRQGKRTFMAERQYTRMEDWLTAKLAYEGLPSKTYLSKTLAQYTSKTCSNCGFTITSADYDRVLEKLKKTATGWMTTINGKELKVEGQITYYNRYKRQNVVKDLSVELDRLSEESVNNDISSWTKGRSGEALSLLKKRFSHRPVQEKFVCLNCGFETHADEQAALNIARSWLFLRSQEYKKYQTNKTTGNTDKRAFVETWQSFYRKKLKEVWKPAV

SEQ ID NO: 35900 - protein, 978 aa, synthetic construct
  REGION 1..978: note = engineered CasX variant
QEIKRINKIRRRLVKDSNTKKAGKTGPMKTLLVRVMTPDLRERLENLRKKPENIPQPISNTSRANLNKLLTDYTEMKKAILHVYWEEFQVDPVGLMSRVAQPASKKIDQNKLKPEMDEKGNLTTAGFACSQCGQPLFVYKLEQVSEKGKAYTNYFGRCNVAEHEKLILLAQLKPEKDSDEAVTYSLGKFGQRALDFYSIHVTKESTHPVKPLAQIAGNRYASTPVGKALSDACMGTIASFLSKYQDIIIEHQKVVKGNQKRLESLRELAGKENLEYPSVTLPPQPHTKEGLDAYNEVIARVRMWVNLNLWQKLKLSRDDAKPLLRLKGFPSFPLVERQANEVDWWDMVCNVKKLINEKKEDGKVFWQNLAGYKRQEALRPYLSSEEDRKKGKKFARYQLGDLLLHLEKKHGEDWGKVYDEAWERIDKKVEGLSKHIKLEEERRSEDAQSKAALTDWLRAKASFVIEGLKEADKDEFCRCELKLQKWYGDLRGKPFAIEAENSILDISGFSKQYNCAFIWQKDGVKKLNLYLIINYFKGGKLRFKKIKPEAFEANRFYTVINKKSGEIVPMEVNFNFDDPNLIILPLAFGKRQGREFIWNDLLSLETGSLKLANGRVIEKTLYNRRTRQDEPALFVALTFERREVLDSSNIKPMNLIGVDRGENIPAVIALTDPEGCPLSRFKDSLGNPTHILRIGESYKEKQRTIQAKKEVEQRRAGGYSRKYASKAKNLADDMVRNTARDLLYYAVTQDAMLIFENLSRGFGRQGKRTFMAERQYTRMEDWLTAKLAYEGLPSKTYLSKTLAQYTSKTCSNCGFTITSADYDRVLEKLKKTATGWMTTINGKELKVEGQITYYNRYKRQNVVKDLSVELDRLSEESVNNDISSWTKGRSGEALSLLKKRFSHRPVQEKFVCLNCGFETHADEQAALNIARSWLFLRSQEYKKYQTNKTTGNTDKRAFVETWQSFYRKKLKEVWKPAV

SEQ ID NO: 35901 - protein, 978 aa, synthetic construct
  REGION 1..978: note = engineered CasX variant
QEIKRINKIRRRLVKDSNTKKAGKTGPMKTLLVRVMTPDLRERLENLRKKPENIPQPISNTSRANLNKLLTDYTEMKKAILHVYWEEFQVDPVGLMSRVAQPASKKIDQNKLKPEMDEKGNLTTAGFACSQCGQPLFVYKLEQVSEKGKAYTNYFGRCNVAEHEKLILLAQLKPEKDSDEAVTYSLGKFGQRALDFYSIHVTKESTHPVKPLAQIAGNRYASAPVGKALSDACMGTIASFLSKYQDIIIEHQKVVKGNQKRLESLRELAGKENLEYPSVTLPPQPHTKEGLDAYNEVIARVRMWVNLNLWQKLKLSRDDAKPLLRLKGFPSFPLVERQANEVDWWDMVCNVKKLINEKKEDGKVFWQNLAGYKRQEALRPYLSSEEDRKKGKKFARYQLGDLLLHLEKKHGEDWGKVYDEAWERIDKKVEGLSKHIKLEEERRSEDAQSKAALTDWLRAKASFVIEGLKEADKDEFCRCELKLQKWYGDLRGKPFAIEAENSILDISGFSKQYNCAFIWQKDGVKKLNLYLIINYFKGGKLRFKKIKPEAFEANRFYTVINKKSGEIVPMEVNFNFDDPNLIILPLAFGKRQGREFIWNDLLSLETGSLKLANGRVIEKTLYNRRTRQDEPALFVALTFERREVLDSSNIKPMNLIGVDRGENIPAVIALTDPEGCPLSRFKDSLGNPTHILRIGESYKEKQRTIQAKKEVEQRRAGGYSRKYASKAKNLADDMVRNTARDLLYYAVTQDAMLIFENLSRGFGRQGKRTFMAERQYTRMEDWLTAKLAYEGLPSKTYLSKTLAQYTSKTCSNCGFTITSADYDRVLEKLKKTATGWMTTINGKELKVEGQITYYNRYKRQNVVKDLSVELDRLSEESVNNDISSWTKGRSGEALSLLKKRFSHRPVQEKFVCLNCGFETHADEQAALNIARSWLFLRSQEYKKYQTNKTTGNTDKRAFVETWQSFYRKKLKEVWKPAV

SEQ ID NO: 35902 - protein, 978 aa, synthetic construct
  REGION 1..978: note = engineered CasX variant
QEIKRINKIRRRLVKDSNTKKAGKTGPMKTLLVRVMTPDLRERLENLRKKPENIPQPISNTSRANLNKLLTDYTEMKKAILHVYWEEFQVDPVGLMSRVAQPASKKIDQNKLKPEMDEKGNLTTAGFACSQCGQPLFVYKLEQVSEKGKAYTNYFGRCNVAEHEKLILLAQLKPEKDSDEAVTYSLGKFGQRALDFYSIHVTKESTHPVKPLAQIAGNRYASVPVGKALSDACMGTIASFLSKYQDIIIEHQKVVKGNQKRLESLRELAGKENLEYPSVTLPPQPHTKEGLDAYNEVIARVRMWVNLNLWQKLKLSRDDAKPLLRLKGFPSFPLVERQANEVDWWDMVCNVKKLINEKKEDGKVFWQNLAGYKRQEALRPYLSSEEDRKKGKKFARYQLGDLLLHLEKKHGEDWGKVYDEAWERIDKKVEGLSKHIKLEEERRSEDAQSKAALTDWLRAKASFVIEGLKEADKDEFCRCELKLQKWYGDLRGKPFAIEAENSILDISGFSKQYNCAFIWQKDGVKKLNLYLIINYFKGGKLRFKKIKPEAFEANRFYTVINKKSGEIVPMEVNFNFDDPNLIILPLAFGKRQGREFIWNDLLSLETGSLKLANGRVIEKTLYNRRTRQDEPALFVALTFERREVLDSSNIKPMNLIGVDRGENIPAVIALTDPEGCPLSRFKDSLGNPTHILRIGESYKEKQRTIQAKKEVEQRRAGGYSRKYASKAKNLADDMVRNTARDLLYYAVTQDAMLIFENLSRGFGRQGKRTFMAERQYTRMEDWLTAKLAYEGLPSKTYLSKTLAQYTSKTCSNCGFTITSADYDRVLEKLKKTATGWMTTINGKELKVEGQITYYNRYKRQNVVKDLSVELDRLSEESVNNDISSWTKGRSGEALSLLKKRFSHRPVQEKFVCLNCGFETHADEQAALNIARSWLFLRSQEYKKYQTNKTTGNTDKRAFVETWQSFYRKKLKEVWKPAV

SEQ ID NO: 35903 - protein, 978 aa, synthetic construct
  REGION 1..978: note = engineered CasX variant
QEIKRINKIRRRLVKDSNTKKAGKTGPMKTLLVRVMTPDLRERLENLRKKPENIPQPISNTSRANLNKLLTDYTEMKKAILHVYWEEFQVDPVGLMSRVAQPASKKIDQNKLKPEMDEKGNLTTAGFACSQCGQPLFVYKLEQVSEKGKAYTNYFGRCNVAEHEKLIKLAQLKPEKDSDEAVTYSLGKFGQRALDFYSIHVTKESTHPVKPLAQIAGNRYASGPVGKALSDACMGTIASFLSKYQDIIIEHQKVVKGNQKRLESLRELAGKENLEYPSVTLPPQPHTKEGLDAYNEVIARVRMWVNLNLWQKLKLSRDDAKPLLRLKGFPSFPLVERQANEVDWWDMVCNVKKLINEKKEDGKVFWQNLAGYKRQEALRPYLSSEEDRKKGKKFARYQLGDLLLHLEKKHGEDWGKVYDEAWERIDKKVEGLSKHIKLEEERRSEDAQSKAALTDWLRAKASFVIEGLKEADKDEFCRCELKLQKWYGDLRGKPFAIEAENSILDISGFSKQYNCAFIWQKDGVKKLNLYLIINYFKGGKLRFKKIKPEAFEANRFYTVINKKSGEIVPMEVNFNFDDPNLIILPLAFGKRQGREFIWNDLLSLETGSLKLANGRVIEKTLYNRRTRQDEPALFVALTFERREVLDSSNIKPMNLIGVDRGENIPAVIALTDPEGCPLSRFKDSLGNPTHILRIGESYKEKQRTIQAKKEVEQRRAGGYSRKYASKAKNLADDMVRNTARDLLYYAVTQDAMLIFENLSRGFGRQGKRTFMAERQYTRMEDWLTAKLAYEGLPSKTYLSKTLAQYTSKTCSNCGFTITSADYDRVLEKLKKTATGWMTTINGKELKVEGQITYYNRYKRQNVVKDLSVELDRLSEESVNNDISSWTKGRSGEALSLLKKRFSHRPVQEKFVCLNCGFETHADEQAALNIARSWLFLRSQEYKKYQTNKTTGNTDKRAFVETWQSFYRKKLKEVWKPAV

SEQ ID NO: 35904 - protein, 977 aa, synthetic construct
  REGION 1..977: note = engineered CasX variant
QEIKRINKIRRRLVKDSNTKKAGKTGPMKTLLVRVMTPDLRERLENLRKKPENIPQPISNTSRANLNKLLTDYTEMKKAILHVYWEEFQVDPVGLMSRVAQPASKKIDQNKLKPEMDEKGNLTTAGFACSQCGQPLFVYKLEQVSEKGKAYTNYFGRCNVAEHEKLILLAQLKPEKDSDEAVTYSLGKFGQRALDFYSIHVTKESTHPVKPLAQIAGNRYASPVGKALSDACMGTIASFLSKYQDIIIEHQKVVKGNQKRLESLRELAGKENLEYPSVTLPPQPHTKEGLDAYNEVIARVRMWVNLNLWQKLKLSRDDAKPLLRLKGFPSFPLVERQANEVDWWDMVCNVKKLINEKKEDGKVFWQNLAGYKRQEALRPYLSSEEDRKKGKKFARYQLGDLLLHLEKKHGEDWGKVYDEAWERIDKKVEGLSKHIKLEEERRSEDAQSKAALTDWLRAKASFVIEGLKEADKDEFCRCELKLQKWYGDLRGKPFAIEAENSILDISGFSKQYNCAFIWQKDGVKKLNLYLIINYFKGGKLRFKKIKPEAFEANRFYTVINKKSGEIVPMEVNFNFDDPNLIILPLAFGKRQGREFIWNDLLSLETGSLKLANGRVIEKTLYNRRTRQDEPALFVALTFERREVLDSSNIKPMNLIGVDRGENIPAVIALTDPEGCPLSRFKDSLGNPTHILRIGESYKEKQRTIQAKKEVEQRRAGGYSRKYASKAKNLADDMVRNTARDLLYYAVTQDAMLIFENLSRGFGRQGKRTFMAERQYTRMEDWLTAKLAYEGLPSKTYLSKTLAQYTSKTCSNCGFTITSADYDRVLEKLKKTATGWMTTINGKELKVEGQITYYNRYKRQNVVKDLSVELDRLSEESVNNDISSWTKGRSGEALSLLKKRFSHRPVQEKFVCLNCGFETHADEQAALNIARSWLFLRSQEYKKYQTNKTTGNTDKRAFVETWQSFYRKKLKEVWKPAV

SEQ ID NO: 35905 - protein, 978 aa, synthetic construct
  REGION 1..978: note = engineered CasX variant
QEIKRLNKIRRRLVKDSNTKKAGKTGPMKTLLVRVMTPDLRERLENLRKKPENIPQPISNTSRANLNKLLTDYTEMKKAILHVYWEEFQKDPVGLMSRVAQPASKKIDQNKLKPEMDEKGNLTTAGFACSQCGQPLFVYKLEQVSEKGKAYTNYFGRCNVAEHEKLILLAQLKPEKDSDEAVTYSLGKFGQRALDFYSIHVTKESTHPVKPLAQIAGNRYASYPVGKALSDACMGTIASFLSKYQDIIIEHQKVVKGNQKRLESLRELAGKENLEYPSVTLPPQPHTKEGLDAYNEVIARVRMWVNLNLWQKLKLSRDDAKPLLRLKGFPSFPLVERQANEVDWWDMVCNVKKLINEKKEDGKVFWQNLAGYKRQEALRPYLSSEEDRKKGKKFARYQLGDLLLHLEKKHGEDWGKVYDEAWERIDKKVEGLSKHIKLEEERRSEDAQSKAALTDWLRAKASFVIEGLKEADKDEFCRCELKLQKWYGDLRGKPFAIEAENSILDISGFSKQYNCAFIWQKDGVKKLNLYLIINYFKGGKLRFKKIKPEAFEANRFYTVINKKSGEIVPMEVNFNFDDPNLIILPLAFGKRQGREFIWNDLLSLETGSLKLANGRVIEKTLYNRRTRQDEPALFVALTFERREVLDSSNIKPMNLIGVDRGENIPAVIALTDPEGCPLSRFKDSLGNPTHILRIGESYKEKQRTIQAKKEVEQRRAGGYSRKYASKAKNLADDMVRNTARDLLYYAVTQDAMLIFENLSRGFGRQGKRTFMAERQYTRMEDWLTAKLAYEGLPSKTYLSKTLAQYTSKTCSNCGFTITSADYDRVLEKLKKTATGWMTTINGKELKVEGQITYYNRYKRQNVVKDLSVELDRLSEESVNNDISSWTKGRSGEALSLLKKRFSHRPVQEKFVCLNCGFETHADEQAALNIARSWLFLRSQEYKKYQTNKTTGNTDKRAFVETWQSFYRKKLKEVWKPAV

SEQ ID NO: 35906 - protein, 978 aa, synthetic construct
  REGION 1..978: note = engineered CasX variant
QEIKRLNKIRRRLVKDSNTKKAGKTGPMKTLLVRVMTPDLRERLENLRKKPENIPQPISNTSRANLNKLLTDYTEMKKAILHVYWEEFQKDPVGLMSRVAQPASKKIDQNKLKPEMDEKGNLTTAGFACSQCGQPLFVYKLEQVSEKGKAYTNYFGRCNVAEHEKLILLAQLKPEKDSDEAVTYSLGKFGQRALDFYSIHVTKESTHPVKPLAQIAGNRYASHPVGKALSDACMGTIASFLSKYQDIIIEHQKVVKGNQKRLESLRELAGKENLEYPSVTLPPQPHTKEGLDAYNEVIARVRMWVNLNLWQKLKLSRDDAKPLLRLKGFPSFPLVERQANEVDWWDMVCNVKKLINEKKEDGKVFWQNLAGYKRQEALRPYLSSEEDRKKGKKFARYQLGDLLLHLEKKHGEDWGKVYDEAWERIDKKVEGLSKHIKLEEERRSEDAQSKAALTDWLRAKASFVIEGLKEADKDEFCRCELKLQKWYGDLRGKPFAIEAENSILDISGFSKQYNCAFIWQKDGVKKLNLYLIINYFKGGKLRFKKIKPEAFEANRFYTVINKKSGEIVPMEVNFNFDDPNLIILPLAFGKRQGREFIWNDLLSLETGSLKLANGRVIEKTLYNRRTRQDEPALFVALTFERREVLDSSNIKPMNLIGVDRGENIPAVIALTDPEGCPLSRFKDSLGNPTHILRIGESYKEKQRTIQAKKEVEQRRAGGYSRKYASKAKNLADDMVRNTARDLLYYAVTQDAMLIFENLSRGFGRQGKRTFMAERQYTRMEDWLTAKLAYEGLPSKTYLSKTLAQYTSKTCSNCGFTITSADYDRVLEKLKKTATGWMTTINGKELKVEGQITYYNRYKRQNVVKDLSVELDRLSEESVNNDISSWTKGRSGEALSLLKKRFSHRPVQEKFVCLNCGFETHADEQAALNIARSWLFLRSQEYKKYQTNKTTGNTDKRAFVETWQSFYRKKLKEVWKPAV

SEQ ID NO: 35907 - protein, 978 aa, synthetic construct
  REGION 1..978: note = engineered CasX variant
QEIKRLNKIRRRLVKDSNTKKAGKTGPMKTLLVRVMTPDLRERLENLRKKPENIPQPISNTSRANLNKLLTDYTEMKKAILHVYWEEFQKDPVGLMSRVAQPASKKIDQNKLKPEMDEKGNLTTAGFACSQCGQPLFVYKLEQVSEKGKAYTNYFGRCNVAEHEKLILLAQLKPEKDSDEAVTYSLGKFGQRALDFYSIHVTKESTHPVKPLAQIAGNRYASSPVGKALSDACMGTIASFLSKYQDIIIEHQKVVKGNQKRLESLRELAGKENLEYPSVTLPPQPHTKEGLDAYNEVIARVRMWVNLNLWQKLKLSRDDAKPLLRLKGFPSFPLVERQANEVDWWDMVCNVKKLINEKKEDGKVFWQNLAGYKRQEALRPYLSSEEDRKKGKKFARYQLGDLLLHLEKKHGEDWGKVYDEAWERIDKKVEGLSKHIKLEEERRSEDAQSKAALTDWLRAKASFVIEGLKEADKDEFCRCELKLQKWYGDLRGKPFAIEAENSILDISGFSKQYNCAFIWQKDGVKKLNLYLIINYFKGGKLRFKKIKPEAFEANRFYTVINKKSGEIVPMEVNFNFDDPNLIILPLAFGKRQGREFIWNDLLSLETGSLKLANGRVIEKTLYNRRTRQDEPALFVALTFERREVLDSSNIKPMNLIGVDRGENIPAVIALTDPEGCPLSRFKDSLGNPTHILRIGESYKEKQRTIQAKKEVEQRRAGGYSRKYASKAKNLADDMVRNTARDLLYYAVTQDAMLIFENLSRGFGRQGKRTFMAERQYTRMEDWLTAKLAYEGLPSKTYLSKTLAQYTSKTCSNCGFTITSADYDRVLEKLKKTATGWMTTINGKELKVEGQITYYNRYKRQNVVKDLSVELDRLSEESVNNDISSWTKGRSGEALSLLKKRFSHRPVQEKFVCLNCGFETHADEQAALNIARSWLFLRSQEYKKYQTNKTTGNTDKRAFVETWQSFYRKKLKEVWKPAV

SEQ ID NO: 35908 - protein, 978 aa, synthetic construct
  REGION 1..978: note = engineered CasX variant
QEIKRLNKIRRRLVKDSNTKKAGKTGPMKTLLVRVMTPDLRERLENLRKKPENIPQPISNTSRANLNKLLTDYTEMKKAILHVYWEEFQKDPVGLMSRVAQPASKKIDQNKLKPEMDEKGNLTTAGFACSQCGQPLFVYKLEQVSEKGKAYTNYFGRCNVAEHEKLILLAQLKPEKDSDEAVTYSLGKFGQRALDFYSIHVTKESTHPVKPLAQIAGNRYASTPVGKALSDACMGTIASFLSKYQDIIIEHQKVVKGNQKRLESLRELAGKENLEYPSVTLPPQPHTKEGLDAYNEVIARVRMWVNLNLWQKLKLSRDDAKPLLRLKGFPSFPLVERQANEVDWWDMVCNVKKLINEKKEDGKVFWQNLAGYKRQEALRPYLSSEEDRKKGKKFARYQLGDLLLHLEKKHGEDWGKVYDEAWERIDKKVEGLSKHIKLEEERRSEDAQSKAALTDWLRAKASFVIEGLKEADKDEFCRCELKLQKWYGDLRGKPFAIEAENSILDISGFSKQYNCAFIWQKDGVKKLNLYLIINYFKGGKLRFKKIKPEAFEANRFYTVINKKSGEIVPMEVNFNFDDPNLIILPLAFGKRQGREFIWNDLLSLETGSLKLANGRVIEKTLYNRRTRQDEPALFVALTFERREVLDSSNIKPMNLIGVDRGENIPAVIALTDPEGCPLSRFKDSLGNPTHILRIGESYKEKQRTIQAKKEVEQRRAGGYSRKYASKAKNLADDMVRNTARDLLYYAVTQDAMLIFENLSRGFGRQGKRTFMAERQYTRMEDWLTAKLAYEGLPSKTYLSKTLAQYTSKTCSNCGFTITSADYDRVLEKLKKTATGWMTTINGKELKVEGQITYYNRYKRQNVVKDLSVELDRLSEESVNNDISSWTKGRSGEALSLLKKRFSHRPVQEKFVCLNCGFETHADEQAALNIARSWLFLRSQEYKKYQTNKTTGNTDKRAFVETWQSFYRKKLKEVWKPAV

SEQ ID NO: 35909 - protein, 978 aa, synthetic construct
  REGION 1..978: note = engineered CasX variant
QEIKRLNKIRRRLVKDSNTKKAGKTGPMKTLLVRVMTPDLRERLENLRKKPENIPQPISNTSRANLNKLLTDYTEMKKAILHVYWEEFQKDPVGLMSRVAQPASKKIDQNKLKPEMDEKGNLTTAGFACSQCGQPLFVYKLEQVSEKGKAYTNYFGRCNVAEHEKLILLAQLKPEKDSDEAVTYSLGKFGQRALDFYSIHVTKESTHPVKPLAQIAGNRYASAPVGKALSDACMGTIASFLSKYQDIIIEHQKVVKGNQKRLESLRELAGKENLEYPSVTLPPQPHTKEGLDAYNEVIARVRMWVNLNLWQKLKLSRDDAKPLLRLKGFPSFPLVERQANEVDWWDMVCNVKKLINEKKEDGKVFWQNLAGYKRQEALRPYLSSEEDRKKGKKFARYQLGDLLLHLEKKHGEDWGKVYDEAWERIDKKVEGLSKHIKLEEERRSEDAQSKAALTDWLRAKASFVIEGLKEADKDEFCRCELKLQKWYGDLRGKPFAIEAENSILDISGFSKQYNCAFIWQKDGVKKLNLYLIINYFKGGKLRFKKIKPEAFEANRFYTVINKKSGEIVPMEVNFNFDDPNLIILPLAFGKRQGREFIWNDLLSLETGSLKLANGRVIEKTLYNRRTRQDEPALFVALTFERREVLDSSNIKPMNLIGVDRGENIPAVIALTDPEGCPLSRFKDSLGNPTHILRIGESYKEKQRTIQAKKEVEQRRAGGYSRKYASKAKNLADDMVRNTARDLLYYAVTQDAMLIFENLSRGFGRQGKRTFMAERQYTRMEDWLTAKLAYEGLPSKTYLSKTLAQYTSKTCSNCGFTITSADYDRVLEKLKKTATGWMTTINGKELKVEGQITYYNRYKRQNVVKDLSVELDRLSEESVNNDISSWTKGRSGEALSLLKKRFSHRPVQEKFVCLNCGFETHADEQAALNIARSWLFLRSQEYKKYQTNKTTGNTDKRAFVETWQSFYRKKLKEVWKPAV

SEQ ID NO: 35910 - protein, 978 aa, synthetic construct
  REGION 1..978: note = engineered CasX variant
QEIKRLNKIRRRLVKDSNTKKAGKTGPMKTLLVRVMTPDLRERLENLRKKPENIPQPISNTSRANLNKLLTDYTEMKKAILHVYWEEFQKDPVGLMSRVAQPASKKIDQNKLKPEMDEKGNLTTAGFACSQCGQPLFVYKLEQVSEKGKAYTNYFGRCNVAEHEKLILLAQLKPEKDSDEAVTYSLGKFGQRALDFYSIHVTKESTHPVKPLAQIAGNRYASVPVGKALSDACMGTIASFLSKYQDIIIEHQKVVKGNQKRLESLRELAGKENLEYPSVTLPPQPHTKEGLDAYNEVIARVRMWVNLNLWQKLKLSRDDAKPLLRLKGFPSFPLVERQANEVDWWDMVCNVKKLINEKKEDGKVFWQNLAGYKRQEALRPYLSSEEDRKKGKKFARYQLGDLLLHLEKKHGEDWGKVYDEAWERIDKKVEGLSKHIKLEEERRSEDAQSKAALTDWLRAKASFVIEGLKEADKDEFCRCELKLQKWYGDLRGKPFAIEAENSILDISGFSKQYNCAFIWQKDGVKKLNLYLIINYFKGGKLRFKKIKPEAFEANRFYTVINKKSGEIVPMEVNFNFDDPNLIILPLAFGKRQGREFIWNDLLSLETGSLKLANGRVIEKTLYNRRTRQDEPALFVALTFERREVLDSSNIKPMNLIGVDRGENIPAVIALTDPEGCPLSRFKDSLGNPTHILRIGESYKEKQRTIQAKKEVEQRRAGGYSRKYASKAKNLADDMVRNTARDLLYYAVTQDAMLIFENLSRGFGRQGKRTFMAERQYTRMEDWLTAKLAYEGLPSKTYLSKTLAQYTSKTCSNCGFTITSADYDRVLEKLKKTATGWMTTINGKELKVEGQITYYNRYKRQNVVKDLSVELDRLSEESVNNDISSWTKGRSGEALSLLKKRFSHRPVQEKFVCLNCGFETHADEQAALNIARSWLFLRSQEYKKYQTNKTTGNTDKRAFVETWQSFYRKKLKEVWKPAV

SEQ ID NO: 35911 - protein, 978 aa, synthetic construct
  REGION 1..978: note = engineered CasX variant
QEIKRLNKIRRRLVKDSNTKKAGKTGPMKTLLVRVMTPDLRERLENLRKKPENIPQPISNTSRANLNKLLTDYTEMKKAILHVYWEEFQKDPVGLMSRVAQPASKKIDQNKLKPEMDEKGNLTTAGFACSQCGQPLFVYKLEQVSEKGKAYTNYFGRCNVAEHEKLIKLAQLKPEKDSDEAVTYSLGKFGQRALDFYSIHVTKESTHPVKPLAQIAGNRYASGPVGKALSDACMGTIASFLSKYQDIIIEHQKVVKGNQKRLESLRELAGKENLEYPSVTLPPQPHTKEGLDAYNEVIARVRMWVNLNLWQKLKLSRDDAKPLLRLKGFPSFPLVERQANEVDWWDMVCNVKKLINEKKEDGKVFWQNLAGYKRQEALRPYLSSEEDRKKGKKFARYQLGDLLLHLEKKHGEDWGKVYDEAWERIDKKVEGLSKHIKLEEERRSEDAQSKAALTDWLRAKASFVIEGLKEADKDEFCRCELKLQKWYGDLRGKPFAIEAENSILDISGFSKQYNCAFIWQKDGVKKLNLYLIINYFKGGKLRFKKIKPEAFEANRFYTVINKKSGEIVPMEVNFNFDDPNLIILPLAFGKRQGREFIWNDLLSLETGSLKLANGRVIEKTLYNRRTRQDEPALFVALTFERREVLDSSNIKPMNLIGVDRGENIPAVIALTDPEGCPLSRFKDSLGNPTHILRIGESYKEKQRTIQAKKEVEQRRAGGYSRKYASKAKNLADDMVRNTARDLLYYAVTQDAMLIFENLSRGFGRQGKRTFMAERQYTRMEDWLTAKLAYEGLPSKTYLSKTLAQYTSKTCSNCGFTITSADYDRVLEKLKKTATGWMTTINGKELKVEGQITYYNRYKRQNVVKDLSVELDRLSEESVNNDISSWTKGRSGEALSLLKKRFSHRPVQEKFVCLNCGFETHADEQAALNIARSWLFLRSQEYKKYQTNKTTGNTDKRAFVETWQSFYRKKLKEVWKPAV

SEQ ID NO: 35912 - protein, 977 aa, synthetic construct
  REGION 1..977: note = engineered CasX variant
QEIKRLNKIRRRLVKDSNTKKAGKTGPMKTLLVRVMTPDLRERLENLRKKPENIPQPISNTSRANLNKLLTDYTEMKKAILHVYWEEFQKDPVGLMSRVAQPASKKIDQNKLKPEMDEKGNLTTAGFACSQCGQPLFVYKLEQVSEKGKAYTNYFGRCNVAEHEKLILLAQLKPEKDSDEAVTYSLGKFGQRALDFYSIHVTKESTHPVKPLAQIAGNRYASPVGKALSDACMGTIASFLSKYQDIIIEHQKVVKGNQKRLESLRELAGKENLEYPSVTLPPQPHTKEGLDAYNEVIARVRMWVNLNLWQKLKLSRDDAKPLLRLKGFPSFPLVERQANEVDWWDMVCNVKKLINEKKEDGKVFWQNLAGYKRQEALRPYLSSEEDRKKGKKFARYQLGDLLLHLEKKHGEDWGKVYDEAWERIDKKVEGLSKHIKLEEERRSEDAQSKAALTDWLRAKASFVIEGLKEADKDEFCRCELKLQKWYGDLRGKPFAIEAENSILDISGFSKQYNCAFIWQKDGVKKLNLYLIINYFKGGKLRFKKIKPEAFEANRFYTVINKKSGEIVPMEVNFNFDDPNLIILPLAFGKRQGREFIWNDLLSLETGSLKLANGRVIEKTLYNRRTRQDEPALFVALTFERREVLDSSNIKPMNLIGVDRGENIPAVIALTDPEGCPLSRFKDSLGNPTHILRIGESYKEKQRTIQAKKEVEQRRAGGYSRKYASKAKNLADDMVRNTARDLLYYAVTQDAMLIFENLSRGFGRQGKRTFMAERQYTRMEDWLTAKLAYEGLPSKTYLSKTLAQYTSKTCSNCGFTITSADYDRVLEKLKKTATGWMTTINGKELKVEGQITYYNRYKRQNVVKDLSVELDRLSEESVNNDISSWTKGRSGEALSLLKKRFSHRPVQEKFVCLNCGFETHADEQAALNIARSWLFLRSQEYKKYQTNKTTGNTDKRAFVETWQSFYRKKLKEVWKPAV

SEQ ID NO: 35913 - protein, 978 aa, synthetic construct
  REGION 1..978: note = engineered CasX variant
QEIKRINKIRRRLVKDSNTKKAGKTGPMKTLLVRVMTPDLRERLENLRKKPENIPQPISNTSRANLNKLLTDYTEMKKAILHVYWEEFQKDPVGLMSRVAQPASKKIDQNKLKPEMDEKGNLTTAGFACSQCGQPLFVYKLEQVSEKGKAYTNYVGRCNVAEHEKLILLAQLKPEKDSDEAVTYSLGKFGQRALDFYSIHVTKESTHPVKPLAQIAGNRYASYPVGKALSDACMGTIASFLSKYQDIIIEHQKVVKGNQKRLESLRELAGKENLEYPSVTLPPQPHTKEGLDAYNEVIARVRMWVNLNLWQKLKLSRDDAKPLLRLKGFPSFPLVERQANEVDWWDMVCNVKKLINEKKEDGKVFWQNLAGYKRQEALRPYLSSEEDRKKGKKFARYQLGDLLLHLEKKHGEDWGKVYDEAWERIDKKVEGLSKHIKLEEERRSEDAQSKAALTDWLRAKASFVIEGLKEADKDEFCRCELKLQKWYGDLRGKPFAIEAENSILDISGFSKQYNCAFIWQKDGVKKLNLYLIINYFKGGKLRFKKIKPEAFEANRFYTVINKKSGEIVPMEVNFNFDDPNLIILPLAFGKRQGREFIWNDLLSLETGSLKLANGRVIEKTLYNRRTRQDEPALFVALTFERREVLDSSNIKPMNLIGVDRGENIPAVIALTDPEGCPLSRFKDSLGNPTHILRIGESYKEKQRTIQAKKEVEQRRAGGYSRKYASKAKNLADDMVRNTARDLLYYAVTQDAMLIFENLSRGFGRQGKRTFMAERQYTRMEDWLTAKLAYEGLPSKTYLSKTLAQYTSKTCSNCGFTITSADYDRVLEKLKKTATGWMTTINGKELKVEGQITYYNRYKRQNVVKDLSVELDRLSEESVNNDISSWTKGRSGEALSLLKKRFSHRPVQEKFVCLNCGFETHADEQAALNIARSWLFLRSQEYKKYQTNKTTGNTDKRAFVETWQSFYRKKLKEVWKPAV

SEQ ID NO: 35914 - protein, 978 aa, synthetic construct
  REGION 1..978: note = engineered CasX variant
QEIKRINKIRRRLVKDSNTKKAGKTGPMKTLLVRVMTPDLRERLENLRKKPENIPQPISNTSRANLNKLLTDYTEMKKAILHVYWEEFQKDPVGLMSRVAQPASKKIDQNKLKPEMDEKGNLTTAGFACSQCGQPLFVYKLEQVSEKGKAYTNYVGRCNVAEHEKLILLAQLKPEKDSDEAVTYSLGKFGQRALDFYSIHVTKESTHPVKPLAQIAGNRYASHPVGKALSDACMGTIASFLSKYQDIIIEHQKVVKGNQKRLESLRELAGKENLEYPSVTLPPQPHTKEGLDAYNEVIARVRMWVNLNLWQKLKLSRDDAKPLLRLKGFPSFPLVERQANEVDWWDMVCNVKKLINEKKEDGKVFWQNLAGYKRQEALRPYLSSEEDRKKGKKFARYQLGDLLLHLEKKHGEDWGKVYDEAWERIDKKVEGLSKHIKLEEERRSEDAQSKAALTDWLRAKASFVIEGLKEADKDEFCRCELKLQKWYGDLRGKPFAIEAENSILDISGFSKQYNCAFIWQKDGVKKLNLYLIINYFKGGKLRFKKIKPEAFEANRFYTVINKKSGEIVPMEVNFNFDDPNLIILPLAFGKRQGREFIWNDLLSLETGSLKLANGRVIEKTLYNRRTRQDEPALFVALTFERREVLDSSNIKPMNLIGVDRGENIPAVIALTDPEGCPLSRFKDSLGNPTHILRIGESYKEKQRTIQAKKEVEQRRAGGYSRKYASKAKNLADDMVRNTARDLLYYAVTQDAMLIFENLSRGFGRQGKRTFMAERQYTRMEDWLTAKLAYEGLPSKTYLSKTLAQYTSKTCSNCGFTITSADYDRVLEKLKKTATGWMTTINGKELKVEGQITYYNRYKRQNVVKDLSVELDRLSEESVNNDISSWTKGRSGEALSLLKKRFSHRPVQEKFVCLNCGFETHADEQAALNIARSWLFLRSQEYKKYQTNKTTGNTDKRAFVETWQSFYRKKLKEVWKPAV

SEQ ID NO: 35915 - protein, 978 aa, synthetic construct
  REGION 1..978: note = engineered CasX variant
QEIKRINKIRRRLVKDSNTKKAGKTGPMKTLLVRVMTPDLRERLENLRKKPENIPQPISNTSRANLNKLLTDYTEMKKAILHVYWEEFQKDPVGLMSRVAQPASKKIDQNKLKPEMDEKGNLTTAGFACSQCGQPLFVYKLEQVSEKGKAYTNYVGRCNVAEHEKLILLAQLKPEKDSDEAVTYSLGKFGQRALDFYSIHVTKESTHPVKPLAQIAGNRYASSPVGKALSDACMGTIASFLSKYQDIIIEHQKVVKGNQKRLESLRELAGKENLEYPSVTLPPQPHTKEGLDAYNEVIARVRMWVNLNLWQKLKLSRDDAKPLLRLKGFPSFPLVERQANEVDWWDMVCNVKKLINEKKEDGKVFWQNLAGYKRQEALRPYLSSEEDRKKGKKFARYQLGDLLLHLEKKHGEDWGKVYDEAWERIDKKVEGLSKHIKLEEERRSEDAQSKAALTDWLRAKASFVIEGLKEADKDEFCRCELKLQKWYGDLRGKPFAIEAENSILDISGFSKQYNCAFIWQKDGVKKLNLYLIINYFKGGKLRFKKIKPEAFEANRFYTVINKKSGEIVPMEVNFNFDDPNLIILPLAFGKRQGREFIWNDLLSLETGSLKLANGRVIEKTLYNRRTRQDEPALFVALTFERREVLDSSNIKPMNLIGVDRGENIPAVIALTDPEGCPLSRFKDSLGNPTHILRIGESYKEKQRTIQAKKEVEQRRAGGYSRKYASKAKNLADDMVRNTARDLLYYAVTQDAMLIFENLSRGFGRQGKRTFMAERQYTRMEDWLTAKLAYEGLPSKTYLSKTLAQYTSKTCSNCGFTITSADYDRVLEKLKKTATGWMTTINGKELKVEGQITYYNRYKRQNVVKDLSVELDRLSEESVNNDISSWTKGRSGEALSLLKKRFSHRPVQEKFVCLNCGFETHADEQAALNIARSWLFLRSQEYKKYQTNKTTGNTDKRAFVETWQSFYRKKLKEVWKPAV

SEQ ID NO: 35916 - protein, 978 aa, synthetic construct
  REGION 1..978: note = engineered CasX variant
QEIKRINKIRRRLVKDSNTKKAGKTGPMKTLLVRVMTPDLRERLENLRKKPENIPQPISNTSRANLNKLLTDYTEMKKAILHVYWEEFQKDPVGLMSRVAQPASKKIDQNKLKPEMDEKGNLTTAGFACSQCGQPLFVYKLEQVSEKGKAYTNYVGRCNVAEHEKLILLAQLKPEKDSDEAVTYSLGKFGQRALDFYSIHVTKESTHPVKPLAQIAGNRYASTPVGKALSDACMGTIASFLSKYQDIIIEHQKVVKGNQKRLESLRELAGKENLEYPSVTLPPQPHTKEGLDAYNEVIARVRMWVNLNLWQKLKLSRDDAKPLLRLKGFPSFPLVERQANEVDWWDMVCNVKKLINEKKEDGKVFWQNLAGYKRQEALRPYLSSEEDRKKGKKFARYQLGDLLLHLEKKHGEDWGKVYDEAWERIDKKVEGLSKHIKLEEERRSEDAQSKAALTDWLRAKASFVIEGLKEADKDEFCRCELKLQKWYGDLRGKPFAIEAENSILDISGFSKQYNCAFIWQKDGVKKLNLYLIINYFKGGKLRFKKIKPEAFEANRFYTVINKKSGEIVPMEVNFNFDDPNLIILPLAFGKRQGREFIWNDLLSLETGSLKLANGRVIEKTLYNRRTRQDEPALFVALTFERREVLDSSNIKPMNLIGVDRGENIPAVIALTDPEGCPLSRFKDSLGNPTHILRIGESYKEKQRTIQAKKEVEQRRAGGYSRKYASKAKNLADDMVRNTARDLLYYAVTQDAMLIFENLSRGFGRQGKRTFMAERQYTRMEDWLTAKLAYEGLPSKTYLSKTLAQYTSKTCSNCGFTITSADYDRVLEKLKKTATGWMTTINGKELKVEGQITYYNRYKRQNVVKDLSVELDRLSEESVNNDISSWTKGRSGEALSLLKKRFSHRPVQEKFVCLNCGFETHADEQAALNIARSWLFLRSQEYKKYQTNKTTGNTDKRAFVETWQSFYRKKLKEVWKPAV

SEQ ID NO: 35917 - protein, 978 aa, synthetic construct
  REGION 1..978: note = engineered CasX variant
QEIKRINKIRRRLVKDSNTKKAGKTGPMKTLLVRVMTPDLRERLENLRKKPENIPQPISNTSRANLNKLLTDYTEMKKAILHVYWEEFQKDPVGLMSRVAQPASKKIDQNKLKPEMDEKGNLTTAGFACSQCGQPLFVYKLEQVSEKGKAYTNYVGRCNVAEHEKLILLAQLKPEKDSDEAVTYSLGKFGQRALDFYSIHVTKESTHPVKPLAQIAGNRYASAPVGKALSDACMGTIASFLSKYQDIIIEHQKVVKGNQKRLESLRELAGKENLEYPSVTLPPQPHTKEGLDAYNEVIARVRMWVNLNLWQKLKLSRDDAKPLLRLKGFPSFPLVERQANEVDWWDMVCNVKKLINEKKEDGKVFWQNLAGYKRQEALRPYLSSEEDRKKGKKFARYQLGDLLLHLEKKHGEDWGKVYDEAWERIDKKVEGLSKHIKLEEERRSEDAQSKAALTDWLRAKASFVIEGLKEADKDEFCRCELKLQKWYGDLRGKPFAIEAENSILDISGFSKQYNCAFIWQKDGVKKLNLYLIINYFKGGKLRFKKIKPEAFEANRFYTVINKKSGEIVPMEVNFNFDDPNLIILPLAFGKRQGREFIWNDLLSLETGSLKLANGRVIEKTLYNRRTRQDEPALFVALTFERREVLDSSNIKPMNLIGVDRGENIPAVIALTDPEGCPLSRFKDSLGNPTHILRIGESYKEKQRTIQAKKEVEQRRAGGYSRKYASKAKNLADDMVRNTARDLLYYAVTQDAMLIFENLSRGFGRQGKRTFMAERQYTRMEDWLTAKLAYEGLPSKTYLSKTLAQYTSKTCSNCGFTITSADYDRVLEKLKKTATGWMTTINGKELKVEGQITYYNRYKRQNVVKDLSVELDRLSEESVNNDISSWTKGRSGEALSLLKKRFSHRPVQEKFVCLNCGFETHADEQAALNIARSWLFLRSQEYKKYQTNKTTGNTDKRAFVETWQSFYRKKLKEVWKPAV

SEQ ID NO: 35918 - protein, 978 aa, synthetic construct
  REGION 1..978: note = engineered CasX variant
QEIKRINKIRRRLVKDSNTKKAGKTGPMKTLLVRVMTPDLRERLENLRKKPENIPQPISNTSRANLNKLLTDYTEMKKAILHVYWEEFQKDPVGLMSRVAQPASKKIDQNKLKPEMDEKGNLTTAGFACSQCGQPLFVYKLEQVSEKGKAYTNYVGRCNVAEHEKLILLAQLKPEKDSDEAVTYSLGKFGQRALDFYSIHVTKESTHPVKPLAQIAGNRYASVPVGKALSDACMGTIASFLSKYQDIIIEHQKVVKGNQKRLESLRELAGKENLEYPSVTLPPQPHTKEGLDAYNEVIARVRMWVNLNLWQKLKLSRDDAKPLLRLKGFPSFPLVERQANEVDWWDMVCNVKKLINEKKEDGKVFWQNLAGYKRQEALRPYLSSEEDRKKGKKFARYQLGDLLLHLEKKHGEDWGKVYDEAWERIDKKVEGLSKHIKLEEERRSEDAQSKAALTDWLRAKASFVIEGLKEADKDEFCRCELKLQKWYGDLRGKPFAIEAENSILDISGFSKQYNCAFIWQKDGVKKLNLYLIINYFKGGKLRFKKIKPEAFEANRFYTVINKKSGEIVPMEVNFNFDDPNLIILPLAFGKRQGREFIWNDLLSLETGSLKLANGRVIEKTLYNRRTRQDEPALFVALTFERREVLDSSNIKPMNLIGVDRGENIPAVIALTDPEGCPLSRFKDSLGNPTHILRIGESYKEKQRTIQAKKEVEQRRAGGYSRKYASKAKNLADDMVRNTARDLLYYAVTQDAMLIFENLSRGFGRQGKRTFMAERQYTRMEDWLTAKLAYEGLPSKTYLSKTLAQYTSKTCSNCGFTITSADYDRVLEKLKKTATGWMTTINGKELKVEGQITYYNRYKRQNVVKDLSVELDRLSEESVNNDISSWTKGRSGEALSLLKKRFSHRPVQEKFVCLNCGFETHADEQAALNIARSWLFLRSQEYKKYQTNKTTGNTDKRAFVETWQSFYRKKLKEVWKPAV

SEQ ID NO: 35919 - protein, 978 aa, synthetic construct
  REGION 1..978: note = engineered CasX variant
QEIKRINKIRRRLVKDSNTKKAGKTGPMKTLLVRVMTPDLRERLENLRKKPENIPQPISNTSRANLNKLLTDYTEMKKAILHVYWEEFQKDPVGLMSRVAQPASKKIDQNKLKPEMDEKGNLTTAGFACSQCGQPLFVYKLEQVSEKGKAYTNYVGRCNVAEHEKLIKLAQLKPEKDSDEAVTYSLGKFGQRALDFYSIHVTKESTHPVKPLAQIAGNRYASGPVGKALSDACMGTIASFLSKYQDIIIEHQKVVKGNQKRLESLRELAGKENLEYPSVTLPPQPHTKEGLDAYNEVIARVRMWVNLNLWQKLKLSRDDAKPLLRLKGFPSFPLVERQANEVDWWDMVCNVKKLINEKKEDGKVFWQNLAGYKRQEALRPYLSSEEDRKKGKKFARYQLGDLLLHLEKKHGEDWGKVYDEAWERIDKKVEGLSKHIKLEEERRSEDAQSKAALTDWLRAKASFVIEGLKEADKDEFCRCELKLQKWYGDLRGKPFAIEAENSILDISGFSKQYNCAFIWQKDGVKKLNLYLIINYFKGGKLRFKKIKPEAFEANRFYTVINKKSGEIVPMEVNFNFDDPNLIILPLAFGKRQGREFIWNDLLSLETGSLKLANGRVIEKTLYNRRTRQDEPALFVALTFERREVLDSSNIKPMNLIGVDRGENIPAVIALTDPEGCPLSRFKDSLGNPTHILRIGESYKEKQRTIQAKKEVEQRRAGGYSRKYASKAKNLADDMVRNTARDLLYYAVTQDAMLIFENLSRGFGRQGKRTFMAERQYTRMEDWLTAKLAYEGLPSKTYLSKTLAQYTSKTCSNCGFTITSADYDRVLEKLKKTATGWMTTINGKELKVEGQITYYNRYKRQNVVKDLSVELDRLSEESVNNDISSWTKGRSGEALSLLKKRFSHRPVQEKFVCLNCGFETHADEQAALNIARSWLFLRSQEYKKYQTNKTTGNTDKRAFVETWQSFYRKKLKEVWKPAV

SEQ ID NO: 35920 - protein, 977 aa, synthetic construct
  REGION 1..977: note = engineered CasX variant
QEIKRINKIRRRLVKDSNTKKAGKTGPMKTLLVRVMTPDLRERLENLRKKPENIPQPISNTSRANLNKLLTDYTEMKKAILHVYWEEFQKDPVGLMSRVAQPASKKIDQNKLKPEMDEKGNLTTAGFACSQCGQPLFVYKLEQVSEKGKAYTNYVGRCNVAEHEKLILLAQLKPEKDSDEAVTYSLGKFGQRALDFYSIHVTKESTHPVKPLAQIAGNRYASPVGKALSDACMGTIASFLSKYQDIIIEHQKVVKGNQKRLESLRELAGKENLEYPSVTLPPQPHTKEGLDAYNEVIARVRMWVNLNLWQKLKLSRDDAKPLLRLKGFPSFPLVERQANEVDWWDMVCNVKKLINEKKEDGKVFWQNLAGYKRQEALRPYLSSEEDRKKGKKFARYQLGDLLLHLEKKHGEDWGKVYDEAWERIDKKVEGLSKHIKLEEERRSEDAQSKAALTDWLRAKASFVIEGLKEADKDEFCRCELKLQKWYGDLRGKPFAIEAENSILDISGFSKQYNCAFIWQKDGVKKLNLYLIINYFKGGKLRFKKIKPEAFEANRFYTVINKKSGEIVPMEVNFNFDDPNLIILPLAFGKRQGREFIWNDLLSLETGSLKLANGRVIEKTLYNRRTRQDEPALFVALTFERREVLDSSNIKPMNLIGVDRGENIPAVIALTDPEGCPLSRFKDSLGNPTHILRIGESYKEKQRTIQAKKEVEQRRAGGYSRKYASKAKNLADDMVRNTARDLLYYAVTQDAMLIFENLSRGFGRQGKRTFMAERQYTRMEDWLTAKLAYEGLPSKTYLSKTLAQYTSKTCSNCGFTITSADYDRVLEKLKKTATGWMTTINGKELKVEGQITYYNRYKRQNVVKDLSVELDRLSEESVNNDISSWTKGRSGEALSLLKKRFSHRPVQEKFVCLNCGFETHADEQAALNIARSWLFLRSQEYKKYQTNKTTGNTDKRAFVETWQSFYRKKLKEVWKPAV

SEQ ID NO: 35921 - protein, 978 aa, synthetic construct
  REGION 1..978: note = engineered CasX variant
QEIKRINKIRRRLVKDSNTKKAGKTGPMKTLLVRVMTPDLRERLENLRKKPENIPQPISNTSRANLNKLLTDYTEMKKAILHVYWEEFQKDPVGLMSRVAQPASKKIDQNKLKPEMDEKGNLTTAGFACSQCGQPLFVYKLEQVSEKGKAYTNYFGRCNVAEHEKLILLAQLKPEKDSDEAVTYSLGKFGQRALDFYSIHVTKESTHPVKPLAQIAGNRYASYPVGKALSDACMGTIASFLSKYQDIIIEHQKVVKGNQKRLESLRELAGKENLEYPSVTLPPQPHTKEGLDAYNEVIARVRMWVNLNLWQKLKLSRDDAKPLLRLKGFPSFPLVERQANEVDWWDMVCNVKKLINEKKEDGKVFWQNLAGYKRQEALRPYLSSEEDRKKGKKFARYQLGDLLLHLEKKHGEDWGKVYDEAWERIDKKVEGLSKHIKLEEERRSEDAQSKAALTDWLRAKASFVIEGLKEADKDEFCRCELKLQKWYGDLRGKPFAIEAENSILDISGFSKQYNCAFIWQKDGVKKLNLYLIINYFKGGKLRFKKIKPEAFEANRFYTVINKKSGEIVPMEVNFNFDDPNLIILPLAFGKRQGREFIWNDLLSLETGSLKLANGRVIEKTLYNRRTRQDEPALFVALTFERREVLDSSNIKPMNLIGVDRGENIPAVIALTDPEGCPLSRFKDSLGNPTHILRIGESYKEKQRTIQAKKEVEQRRAGGYSRKYASKAKNLADDMVRNTARDLLYYAVTQDAMLIFENLSRGFGRQGKRTFMAERQYTRMEDWLTAKLAYEGLASKTYLSKTLAQYTSKTCSNCGFTITSADYDRVLEKLKKTATGWMTTINGKELKVEGQITYYNRYKRQNVVKDLSVELDRLSEESVNNDISSWTKGRSGEALSLLKKRFSHRPVQEKFVCLNCGFETHADEQAALNIARSWLFLRSQEYKKYQTNKTTGNTDKRAFVETWQSFYRKKLKEVWKPAV

SEQ ID NO: 35922 - protein, 978 aa, synthetic construct
  REGION 1..978: note = engineered CasX variant
QEIKRINKIRRRLVKDSNTKKAGKTGPMKTLLVRVMTPDLRERLENLRKKPENIPQPISNTSRANLNKLLTDYTEMKKAILHVYWEEFQKDPVGLMSRVAQPASKKIDQNKLKPEMDEKGNLTTAGFACSQCGQPLFVYKLEQVSEKGKAYTNYFGRCNVAEHEKLILLAQLKPEKDSDEAVTYSLGKFGQRALDFYSIHVTKESTHPVKPLAQIAGNRYASHPVGKALSDACMGTIASFLSKYQDIIIEHQKVVKGNQKRLESLRELAGKENLEYPSVTLPPQPHTKEGLDAYNEVIARVRMWVNLNLWQKLKLSRDDAKPLLRLKGFPSFPLVERQANEVDWWDMVCNVKKLINEKKEDGKVFWQNLAGYKRQEALRPYLSSEEDRKKGKKFARYQLGDLLLHLEKKHGEDWGKVYDEAWERIDKKVEGLSKHIKLEEERRSEDAQSKAALTDWLRAKASFVIEGLKEADKDEFCRCELKLQKWYGDLRGKPFAIEAENSILDISGFSKQYNCAFIWQKDGVKKLNLYLIINYFKGGKLRFKKIKPEAFEANRFYTVINKKSGEIVPMEVNFNFDDPNLIILPLAFGKRQGREFIWNDLLSLETGSLKLANGRVIEKTLYNRRTRQDEPALFVALTFERREVLDSSNIKPMNLIGVDRGENIPAVIALTDPEGCPLSRFKDSLGNPTHILRIGESYKEKQRTIQAKKEVEQRRAGGYSRKYASKAKNLADDMVRNTARDLLYYAVTQDAMLIFENLSRGFGRQGKRTFMAERQYTRMEDWLTAKLAYEGLASKTYLSKTLAQYTSKTCSNCGFTITSADYDRVLEKLKKTATGWMTTINGKELKVEGQITYYNRYKRQNVVKDLSVELDRLSEESVNNDISSWTKGRSGEALSLLKKRFSHRPVQEKFVCLNCGFETHADEQAALNIARSWLFLRSQEYKKYQTNKTTGNTDKRAFVETWQSFYRKKLKEVWKPAV

SEQ ID NO: 35923 - protein, 978 aa, synthetic construct
  REGION 1..978: note = engineered CasX variant
QEIKRINKIRRRLVKDSNTKKAGKTGPMKTLLVRVMTPDLRERLENLRKKPENIPQPISNTSRANLNKLLTDYTEMKKAILHVYWEEFQKDPVGLMSRVAQPASKKIDQNKLKPEMDEKGNLTTAGFACSQCGQPLFVYKLEQVSEKGKAYTNYFGRCNVAEHEKLILLAQLKPEKDSDEAVTYSLGKFGQRALDFYSIHVTKESTHPVKPLAQIAGNRYASSPVGKALSDACMGTIASFLSKYQDIIIEHQKVVKGNQKRLESLRELAGKENLEYPSVTLPPQPHTKEGLDAYNEVIARVRMWVNLNLWQKLKLSRDDAKPLLRLKGFPSFPLVERQANEVDWWDMVCNVKKLINEKKEDGKVFWQNLAGYKRQEALRPYLSSEEDRKKGKKFARYQLGDLLLHLEKKHGEDWGKVYDEAWERIDKKVEGLSKHIKLEEERRSEDAQSKAALTDWLRAKASFVIEGLKEADKDEFCRCELKLQKWYGDLRGKPFAIEAENSILDISGFSKQYNCAFIWQKDGVKKLNLYLIINYFKGGKLRFKKIKPEAFEANRFYTVINKKSGEIVPMEVNFNFDDPNLIILPLAFGKRQGREFIWNDLLSLETGSLKLANGRVIEKTLYNRRTRQDEPALFVALTFERREVLDSSNIKPMNLIGVDRGENIPAVIALTDPEGCPLSRFKDSLGNPTHILRIGESYKEKQRTIQAKKEVEQRRAGGYSRKYASKAKNLADDMVRNTARDLLYYAVTQDAMLIFENLSRGFGRQGKRTFMAERQYTRMEDWLTAKLAYEGLASKTYLSKTLAQYTSKTCSNCGFTITSADYDRVLEKLKKTATGWMTTINGKELKVEGQITYYNRYKRQNVVKDLSVELDRLSEESVNNDISSWTKGRSGEALSLLKKRFSHRPVQEKFVCLNCGFETHADEQAALNIARSWLFLRSQEYKKYQTNKTTGNTDKRAFVETWQSFYRKKLKEVWKPAV

SEQ ID NO: 35924 - protein, 978 aa, synthetic construct
  REGION 1..978: note = engineered CasX variant
QEIKRINKIRRRLVKDSNTKKAGKTGPMKTLLVRVMTPDLRERLENLRKKPENIPQPISNTSRANLNKLLTDYTEMKKAILHVYWEEFQKDPVGLMSRVAQPASKKIDQNKLKPEMDEKGNLTTAGFACSQCGQPLFVYKLEQVSEKGKAYTNYFGRCNVAEHEKLILLAQLKPEKDSDEAVTYSLGKFGQRALDFYSIHVTKESTHPVKPLAQIAGNRYASTPVGKALSDACMGTIASFLSKYQDIIIEHQKVVKGNQKRLESLRELAGKENLEYPSVTLPPQPHTKEGLDAYNEVIARVRMWVNLNLWQKLKLSRDDAKPLLRLKGFPSFPLVERQANEVDWWDMVCNVKKLINEKKEDGKVFWQNLAGYKRQEALRPYLSSEEDRKKGKKFARYQLGDLLLHLEKKHGEDWGKVYDEAWERIDKKVEGLSKHIKLEEERRSEDAQSKAALTDWLRAKASFVIEGLKEADKDEFCRCELKLQKWYGDLRGKPFAIEAENSILDISGFSKQYNCAFIWQKDGVKKLNLYLIINYFKGGKLRFKKIKPEAFEANRFYTVINKKSGEIVPMEVNFNFDDPNLIILPLAFGKRQGREFIWNDLLSLETGSLKLANGRVIEKTLYNRRTRQDEPALFVALTFERREVLDSSNIKPMNLIGVDRGENIPAVIALTDPEGCPLSRFKDSLGNPTHILRIGESYKEKQRTIQAKKEVEQRRAGGYSRKYASKAKNLADDMVRNTARDLLYYAVTQDAMLIFENLSRGFGRQGKRTFMAERQYTRMEDWLTAKLAYEGLASKTYLSKTLAQYTSKTCSNCGFTITSADYDRVLEKLKKTATGWMTTINGKELKVEGQITYYNRYKRQNVVKDLSVELDRLSEESVNNDISSWTKGRSGEALSLLKKRFSHRPVQEKFVCLNCGFETHADEQAALNIARSWLFLRSQEYKKYQTNKTTGNTDKRAFVETWQSFYRKKLKEVWKPAV

SEQ ID NO: 35925 - protein, 978 aa, synthetic construct
  REGION 1..978: note = engineered CasX variant
QEIKRINKIRRRLVKDSNTKKAGKTGPMKTLLVRVMTPDLRERLENLRKKPENIPQPISNTSRANLNKLLTDYTEMKKAILHVYWEEFQKDPVGLMSRVAQPASKKIDQNKLKPEMDEKGNLTTAGFACSQCGQPLFVYKLEQVSEKGKAYTNYFGRCNVAEHEKLILLAQLKPEKDSDEAVTYSLGKFGQRALDFYSIHVTKESTHPVKPLAQIAGNRYASAPVGKALSDACMGTIASFLSKYQDIIIEHQKVVKGNQKRLESLRELAGKENLEYPSVTLPPQPHTKEGLDAYNEVIARVRMWVNLNLWQKLKLSRDDAKPLLRLKGFPSFPLVERQANEVDWWDMVCNVKKLINEKKEDGKVFWQNLAGYKRQEALRPYLSSEEDRKKGKKFARYQLGDLLLHLEKKHGEDWGKVYDEAWERIDKKVEGLSKHIKLEEERRSEDAQSKAALTDWLRAKASFVIEGLKEADKDEFCRCELKLQKWYGDLRGKPFAIEAENSILDISGFSKQYNCAFIWQKDGVKKLNLYLIINYFKGGKLRFKKIKPEAFEANRFYTVINKKSGEIVPMEVNFNFDDPNLIILPLAFGKRQGREFIWNDLLSLETGSLKLANGRVIEKTLYNRRTRQDEPALFVALTFERREVLDSSNIKPMNLIGVDRGENIPAVIALTDPEGCPLSRFKDSLGNPTHILRIGESYKEKQRTIQAKKEVEQRRAGGYSRKYASKAKNLADDMVRNTARDLLYYAVTQDAMLIFENLSRGFGRQGKRTFMAERQYTRMEDWLTAKLAYEGLASKTYLSKTLAQYTSKTCSNCGFTITSADYDRVLEKLKKTATGWMTTINGKELKVEGQITYYNRYKRQNVVKDLSVELDRLSEESVNNDISSWTKGRSGEALSLLKKRFSHRPVQEKFVCLNCGFETHADEQAALNIARSWLFLRSQEYKKYQTNKTTGNTDKRAFVETWQSFYRKKLKEVWKPAV

SEQ ID NO: 35926 - protein, 978 aa, synthetic construct
  REGION 1..978: note = engineered CasX variant
QEIKRINKIRRRLVKDSNTKKAGKTGPMKTLLVRVMTPDLRERLENLRKKPENIPQPISNTSRANLNKLLTDYTEMKKAILHVYWEEFQKDPVGLMSRVAQPASKKIDQNKLKPEMDEKGNLTTAGFACSQCGQPLFVYKLEQVSEKGKAYTNYFGRCNVAEHEKLILLAQLKPEKDSDEAVTYSLGKFGQRALDFYSIHVTKESTHPVKPLAQIAGNRYASVPVGKALSDACMGTIASFLSKYQDIIIEHQKVVKGNQKRLESLRELAGKENLEYPSVTLPPQPHTKEGLDAYNEVIARVRMWVNLNLWQKLKLSRDDAKPLLRLKGFPSFPLVERQANEVDWWDMVCNVKKLINEKKEDGKVFWQNLAGYKRQEALRPYLSSEEDRKKGKKFARYQLGDLLLHLEKKHGEDWGKVYDEAWERIDKKVEGLSKHIKLEEERRSEDAQSKAALTDWLRAKASFVIEGLKEADKDEFCRCELKLQKWYGDLRGKPFAIEAENSILDISGFSKQYNCAFIWQKDGVKKLNLYLIINYFKGGKLRFKKIKPEAFEANRFYTVINKKSGEIVPMEVNFNFDDPNLIILPLAFGKRQGREFIWNDLLSLETGSLKLANGRVIEKTLYNRRTRQDEPALFVALTFERREVLDSSNIKPMNLIGVDRGENIPAVIALTDPEGCPLSRFKDSLGNPTHILRIGESYKEKQRTIQAKKEVEQRRAGGYSRKYASKAKNLADDMVRNTARDLLYYAVTQDAMLIFENLSRGFGRQGKRTFMAERQYTRMEDWLTAKLAYEGLASKTYLSKTLAQYTSKTCSNCGFTITSADYDRVLEKLKKTATGWMTTINGKELKVEGQITYYNRYKRQNVVKDLSVELDRLSEESVNNDISSWTKGRSGEALSLLKKRFSHRPVQEKFVCLNCGFETHADEQAALNIARSWLFLRSQEYKKYQTNKTTGNTDKRAFVETWQSFYRKKLKEVWKPAV

SEQ ID NO: 35927 - protein, 978 aa, synthetic construct
  REGION 1..978: note = engineered CasX variant
QEIKRINKIRRRLVKDSNTKKAGKTGPMKTLLVRVMTPDLRERLENLRKKPENIPQPISNTSRANLNKLLTDYTEMKKAILHVYWEEFQKDPVGLMSRVAQPASKKIDQNKLKPEMDEKGNLTTAGFACSQCGQPLFVYKLEQVSEKGKAYTNYFGRCNVAEHEKLIKLAQLKPEKDSDEAVTYSLGKFGQRALDFYSIHVTKESTHPVKPLAQIAGNRYASGPVGKALSDACMGTIASFLSKYQDIIIEHQKVVKGNQKRLESLRELAGKENLEYPSVTLPPQPHTKEGLDAYNEVIARVRMWVNLNLWQKLKLSRDDAKPLLRLKGFPSFPLVERQANEVDWWDMVCNVKKLINEKKEDGKVFWQNLAGYKRQEALRPYLSSEEDRKKGKKFARYQLGDLLLHLEKKHGEDWGKVYDEAWERIDKKVEGLSKHIKLEEERRSEDAQSKAALTDWLRAKASFVIEGLKEADKDEFCRCELKLQKWYGDLRGKPFAIEAENSILDISGFSKQYNCAFIWQKDGVKKLNLYLIINYFKGGKLRFKKIKPEAFEANRFYTVINKKSGEIVPMEVNFNFDDPNLIILPLAFGKRQGREFIWNDLLSLETGSLKLANGRVIEKTLYNRRTRQDEPALFVALTFERREVLDSSNIKPMNLIGVDRGENIPAVIALTDPEGCPLSRFKDSLGNPTHILRIGESYKEKQRTIQAKKEVEQRRAGGYSRKYASKAKNLADDMVRNTARDLLYYAVTQDAMLIFENLSRGFGRQGKRTFMAERQYTRMEDWLTAKLAYEGLASKTYLSKTLAQYTSKTCSNCGFTITSADYDRVLEKLKKTATGWMTTINGKELKVEGQITYYNRYKRQNVVKDLSVELDRLSEESVNNDISSWTKGRSGEALSLLKKRFSHRPVQEKFVCLNCGFETHADEQAALNIARSWLFLRSQEYKKYQTNKTTGNTDKRAFVETWQSFYRKKLKEVWKPAV

SEQ ID NO: 35928 - protein, 977 aa, synthetic construct
  REGION 1..977: note = engineered CasX variant
QEIKRINKIRRRLVKDSNTKKAGKTGPMKTLLVRVMTPDLRERLENLRKKPENIPQPISNTSRANLNKLLTDYTEMKKAILHVYWEEFQKDPVGLMSRVAQPASKKIDQNKLKPEMDEKGNLTTAGFACSQCGQPLFVYKLEQVSEKGKAYTNYFGRCNVAEHEKLILLAQLKPEKDSDEAVTYSLGKFGQRALDFYSIHVTKESTHPVKPLAQIAGNRYASPVGKALSDACMGTIASFLSKYQDIIIEHQKVVKGNQKRLESLRELAGKENLEYPSVTLPPQPHTKEGLDAYNEVIARVRMWVNLNLWQKLKLSRDDAKPLLRLKGFPSFPLVERQANEVDWWDMVCNVKKLINEKKEDGKVFWQNLAGYKRQEALRPYLSSEEDRKKGKKFARYQLGDLLLHLEKKHGEDWGKVYDEAWERIDKKVEGLSKHIKLEEERRSEDAQSKAALTDWLRAKASFVIEGLKEADKDEFCRCELKLQKWYGDLRGKPFAIEAENSILDISGFSKQYNCAFIWQKDGVKKLNLYLIINYFKGGKLRFKKIKPEAFEANRFYTVINKKSGEIVPMEVNFNFDDPNLIILPLAFGKRQGREFIWNDLLSLETGSLKLANGRVIEKTLYNRRTRQDEPALFVALTFERREVLDSSNIKPMNLIGVDRGENIPAVIALTDPEGCPLSRFKDSLGNPTHILRIGESYKEKQRTIQAKKEVEQRRAGGYSRKYASKAKNLADDMVRNTARDLLYYAVTQDAMLIFENLSRGFGRQGKRTFMAERQYTRMEDWLTAKLAYEGLASKTYLSKTLAQYTSKTCSNCGFTITSADYDRVLEKLKKTATGWMTTINGKELKVEGQITYYNRYKRQNVVKDLSVELDRLSEESVNNDISSWTKGRSGEALSLLKKRFSHRPVQEKFVCLNCGFETHADEQAALNIARSWLFLRSQEYKKYQTNKTTGNTDKRAFVETWQSFYRKKLKEVWKPAV

SEQ ID NO: 35929 - protein, 978 aa, synthetic construct
  REGION 1..978: note = engineered CasX variant
QEIKRINKIRRRLVKDSNTKKAGKTGPMKTLLVRVMTPDLRERLENLRKKPENIPQPISNTSRANLNKLLTDYTEMKKAILHVYWEEFQKDPVGLMSRVAQPASKKIDQNKLKPEMDEKGNLTTAGFACSQCGQPLFVYKLEQVSEKGKAYTNYFGRCNVAEHEKLILLAQLKPEKDSDEAVTYSLGKFGQRALDFYSIHVTKESTHPVKPLAQIAGNRYASYPVGKALSDACMGTIASFLSKYQDIIIEHQKVVKGNQKRLESLRELAGKENLEYPSVTLPPQPHTKEGLDAYNEVIARVRMWVNLNLWQKLKLSRDDAKPLLRLKGFPSFPLVERQANEVDWWDMVCNVKKLINEKKEDGKVFWQNLAGYKRQEALRPYLSSEEDRKKGKKFARYQLGDLLLHLEKKHGEDWGKVYDEAWERIDKKVEGLSKHIKLEEERRSEDAQSKAALTDWLRAKASFVIEGLKEADKDEFCRCELKLQKWYGDLRGKPFAIEAENSILDISGFSKQYNCAFIWQKDGVKKLNLYLIINYFKGGKLRFKKIKPEAFEANRFYTVINKKSGEIVPMEVNFNFDDPNLIILPLAFGKRQGREFIWNDLLSLETGSLKLANGRVIEKTLYNRRTRQDEPALFVALTFERREVLDSSNIKPMNLIGVDRGENIPAVIALTDPEGCPLSRFKDSLGNPTHILRIGESYKEKQRTIQAKKEVEQRRAGGYSRKYASKAKNLADDMVRNTARDLLYYAVTQDAMLIFENLSRGFGRQGKRTFMAERQYTRMEDWLTAKLAYEGLPSKVYLSKTLAQYTSKTCSNCGFTITSADYDRVLEKLKKTATGWMTTINGKELKVEGQITYYNRYKRQNVVKDLSVELDRLSEESVNNDISSWTKGRSGEALSLLKKRFSHRPVQEKFVCLNCGFETHADEQAALNIARSWLFLRSQEYKKYQTNKTTGNTDKRAFVETWQSFYRKKLKEVWKPAV

SEQ ID NO: 35930 - protein, 978 aa, synthetic construct
  REGION 1..978: note = engineered CasX variant
QEIKRINKIRRRLVKDSNTKKAGKTGPMKTLLVRVMTPDLRERLENLRKKPENIPQPISNTSRANLNKLLTDYTEMKKAILHVYWEEFQKDPVGLMSRVAQPASKKIDQNKLKPEMDEKGNLTTAGFACSQCGQPLFVYKLEQVSEKGKAYTNYFGRCNVAEHEKLILLAQLKPEKDSDEAVTYSLGKFGQRALDFYSIHVTKESTHPVKPLAQIAGNRYASHPVGKALSDACMGTIASFLSKYQDIIIEHQKVVKGNQKRLESLRELAGKENLEYPSVTLPPQPHTKEGLDAYNEVIARVRMWVNLNLWQKLKLSRDDAKPLLRLKGFPSFPLVERQANEVDWWDMVCNVKKLINEKKEDGKVFWQNLAGYKRQEALRPYLSSEEDRKKGKKFARYQLGDLLLHLEKKHGEDWGKVYDEAWERIDKKVEGLSKHIKLEEERRSEDAQSKAALTDWLRAKASFVIEGLKEADKDEFCRCELKLQKWYGDLRGKPFAIEAENSILDISGFSKQYNCAFIWQKDGVKKLNLYLIINYFKGGKLRFKKIKPEAFEANRFYTVINKKSGEIVPMEVNFNFDDPNLIILPLAFGKRQGREFIWNDLLSLETGSLKLANGRVIEKTLYNRRTRQDEPALFVALTFERREVLDSSNIKPMNLIGVDRGENIPAVIALTDPEGCPLSRFKDSLGNPTHILRIGESYKEKQRTIQAKKEVEQRRAGGYSRKYASKAKNLADDMVRNTARDLLYYAVTQDAMLIFENLSRGFGRQGKRTFMAERQYTRMEDWLTAKLAYEGLPSKVYLSKTLAQYTSKTCSNCGFTITSADYDRVLEKLKKTATGWMTTINGKELKVEGQITYYNRYKRQNVVKDLSVELDRLSEESVNNDISSWTKGRSGEALSLLKKRFSHRPVQEKFVCLNCGFETHADEQAALNIARSWLFLRSQEYKKYQTNKTTGNTDKRAFVETWQSFYRKKLKEVWKPAV

SEQ ID NO: 35931 - protein, 978 aa, synthetic construct
  REGION 1..978: note = engineered CasX variant
QEIKRINKIRRRLVKDSNTKKAGKTGPMKTLLVRVMTPDLRERLENLRKKPENIPQPISNTSRANLNKLLTDYTEMKKAILHVYWEEFQKDPVGLMSRVAQPASKKIDQNKLKPEMDEKGNLTTAGFACSQCGQPLFVYKLEQVSEKGKAYTNYFGRCNVAEHEKLILLAQLKPEKDSDEAVTYSLGKFGQRALDFYSIHVTKESTHPVKPLAQIAGNRYASSPVGKALSDACMGTIASFLSKYQDIIIEHQKVVKGNQKRLESLRELAGKENLEYPSVTLPPQPHTKEGLDAYNEVIARVRMWVNLNLWQKLKLSRDDAKPLLRLKGFPSFPLVERQANEVDWWDMVCNVKKLINEKKEDGKVFWQNLAGYKRQEALRPYLSSEEDRKKGKKFARYQLGDLLLHLEKKHGEDWGKVYDEAWERIDKKVEGLSKHIKLEEERRSEDAQSKAALTDWLRAKASFVIEGLKEADKDEFCRCELKLQKWYGDLRGKPFAIEAENSILDISGFSKQYNCAFIWQKDGVKKLNLYLIINYFKGGKLRFKKIKPEAFEANRFYTVINKKSGEIVPMEVNFNFDDPNLIILPLAFGKRQGREFIWNDLLSLETGSLKLANGRVIEKTLYNRRTRQDEPALFVALTFERREVLDSSNIKPMNLIGVDRGENIPAVIALTDPEGCPLSRFKDSLGNPTHILRIGESYKEKQRTIQAKKEVEQRRAGGYSRKYASKAKNLADDMVRNTARDLLYYAVTQDAMLIFENLSRGFGRQGKRTFMAERQYTRMEDWLTAKLAYEGLPSKVYLSKTLAQYTSKTCSNCGFTITSADYDRVLEKLKKTATGWMTTINGKELKVEGQITYYNRYKRQNVVKDLSVELDRLSEESVNNDISSWTKGRSGEALSLLKKRFSHRPVQEKFVCLNCGFETHADEQAALNIARSWLFLRSQEYKKYQTNKTTGNTDKRAFVETWQSFYRKKLKEVWKPAV

SEQ ID NO: 35932 - protein, 978 aa, synthetic construct
  REGION 1..978: note = engineered CasX variant
QEIKRINKIRRRLVKDSNTKKAGKTGPMKTLLVRVMTPDLRERLENLRKKPENIPQPISNTSRANLNKLLTDYTEMKKAILHVYWEEFQKDPVGLMSRVAQPASKKIDQNKLKPEMDEKGNLTTAGFACSQCGQPLFVYKLEQVSEKGKAYTNYFGRCNVAEHEKLILLAQLKPEKDSDEAVTYSLGKFGQRALDFYSIHVTKESTHPVKPLAQIAGNRYASTPVGKALSDACMGTIASFLSKYQDIIIEHQKVVKGNQKRLESLRELAGKENLEYPSVTLPPQPHTKEGLDAYNEVIARVRMWVNLNLWQKLKLSRDDAKPLLRLKGFPSFPLVERQANEVDWWDMVCNVKKLINEKKEDGKVFWQNLAGYKRQEALRPYLSSEEDRKKGKKFARYQLGDLLLHLEKKHGEDWGKVYDEAWERIDKKVEGLSKHIKLEEERRSEDAQSKAALTDWLRAKASFVIEGLKEADKDEFCRCELKLQKWYGDLRGKPFAIEAENSILDISGFSKQYNCAFIWQKDGVKKLNLYLIINYFKGGKLRFKKIKPEAFEANRFYTVINKKSGEIVPMEVNFNFDDPNLIILPLAFGKRQGREFIWNDLLSLETGSLKLANGRVIEKTLYNRRTRQDEPALFVALTFERREVLDSSNIKPMNLIGVDRGENIPAVIALTDPEGCPLSRFKDSLGNPTHILRIGESYKEKQRTIQAKKEVEQRRAGGYSRKYASKAKNLADDMVRNTARDLLYYAVTQDAMLIFENLSRGFGRQGKRTFMAERQYTRMEDWLTAKLAYEGLPSKVYLSKTLAQYTSKTCSNCGFTITSADYDRVLEKLKKTATGWMTTINGKELKVEGQITYYNRYKRQNVVKDLSVELDRLSEESVNNDISSWTKGRSGEALSLLKKRFSHRPVQEKFVCLNCGFETHADEQAALNIARSWLFLRSQEYKKYQTNKTTGNTDKRAFVETWQSFYRKKLKEVWKPAV

SEQ ID NO: 35933 - protein, 978 aa, synthetic construct
  REGION 1..978: note = engineered CasX variant
QEIKRINKIRRRLVKDSNTKKAGKTGPMKTLLVRVMTPDLRERLENLRKKPENIPQPISNTSRANLNKLLTDYTEMKKAILHVYWEEFQKDPVGLMSRVAQPASKKIDQNKLKPEMDEKGNLTTAGFACSQCGQPLFVYKLEQVSEKGKAYTNYFGRCNVAEHEKLILLAQLKPEKDSDEAVTYSLGKFGQRALDFYSIHVTKESTHPVKPLAQIAGNRYASAPVGKALSDACMGTIASFLSKYQDIIIEHQKVVKGNQKRLESLRELAGKENLEYPSVTLPPQPHTKEGLDAYNEVIARVRMWVNLNLWQKLKLSRDDAKPLLRLKGFPSFPLVERQANEVDWWDMVCNVKKLINEKKEDGKVFWQNLAGYKRQEALRPYLSSEEDRKKGKKFARYQLGDLLLHLEKKHGEDWGKVYDEAWERIDKKVEGLSKHIKLEEERRSEDAQSKAALTDWLRAKASFVIEGLKEADKDEFCRCELKLQKWYGDLRGKPFAIEAENSILDISGFSKQYNCAFIWQKDGVKKLNLYLIINYFKGGKLRFKKIKPEAFEANRFYTVINKKSGEIVPMEVNFNFDDPNLIILPLAFGKRQGREFIWNDLLSLETGSLKLANGRVIEKTLYNRRTRQDEPALFVALTFERREVLDSSNIKPMNLIGVDRGENIPAVIALTDPEGCPLSRFKDSLGNPTHILRIGESYKEKQRTIQAKKEVEQRRAGGYSRKYASKAKNLADDMVRNTARDLLYYAVTQDAMLIFENLSRGFGRQGKRTFMAERQYTRMEDWLTAKLAYEGLPSKVYLSKTLAQYTSKTCSNCGFTITSADYDRVLEKLKKTATGWMTTINGKELKVEGQITYYNRYKRQNVVKDLSVELDRLSEESVNNDISSWTKGRSGEALSLLKKRFSHRPVQEKFVCLNCGFETHADEQAALNIARSWLFLRSQEYKKYQTNKTTGNTDKRAFVETWQSFYRKKLKEVWKPAV

SEQ ID NO: 35934 - protein, 978 aa, synthetic construct
  REGION 1..978: note = engineered CasX variant
QEIKRINKIRRRLVKDSNTKKAGKTGPMKTLLVRVMTPDLRERLENLRKKPENIPQPISNTSRANLNKLLTDYTEMKKAILHVYWEEFQKDPVGLMSRVAQPASKKIDQNKLKPEMDEKGNLTTAGFACSQCGQPLFVYKLEQVSEKGKAYTNYFGRCNVAEHEKLILLAQLKPEKDSDEAVTYSLGKFGQRALDFYSIHVTKESTHPVKPLAQIAGNRYASVPVGKALSDACMGTIASFLSKYQDIIIEHQKVVKGNQKRLESLRELAGKENLEYPSVTLPPQPHTKEGLDAYNEVIARVRMWVNLNLWQKLKLSRDDAKPLLRLKGFPSFPLVERQANEVDWWDMVCNVKKLINEKKEDGKVFWQNLAGYKRQEALRPYLSSEEDRKKGKKFARYQLGDLLLHLEKKHGEDWGKVYDEAWERIDKKVEGLSKHIKLEEERRSEDAQSKAALTDWLRAKASFVIEGLKEADKDEFCRCELKLQKWYGDLRGKPFAIEAENSILDISGFSKQYNCAFIWQKDGVKKLNLYLIINYFKGGKLRFKKIKPEAFEANRFYTVINKKSGEIVPMEVNFNFDDPNLIILPLAFGKRQGREFIWNDLLSLETGSLKLANGRVIEKTLYNRRTRQDEPALFVALTFERREVLDSSNIKPMNLIGVDRGENIPAVIALTDPEGCPLSRFKDSLGNPTHILRIGESYKEKQRTIQAKKEVEQRRAGGYSRKYASKAKNLADDMVRNTARDLLYYAVTQDAMLIFENLSRGFGRQGKRTFMAERQYTRMEDWLTAKLAYEGLPSKVYLSKTLAQYTSKTCSNCGFTITSADYDRVLEKLKKTATGWMTTINGKELKVEGQITYYNRYKRQNVVKDLSVELDRLSEESVNNDISSWTKGRSGEALSLLKKRFSHRPVQEKFVCLNCGFETHADEQAALNIARSWLFLRSQEYKKYQTNKTTGNTDKRAFVETWQSFYRKKLKEVWKPAV

SEQ ID NO: 35935 - protein, 978 aa, synthetic construct
  REGION 1..978: note = engineered CasX variant
QEIKRINKIRRRLVKDSNTKKAGKTGPMKTLLVRVMTPDLRERLENLRKKPENIPQPISNTSRANLNKLLTDYTEMKKAILHVYWEEFQKDPVGLMSRVAQPASKKIDQNKLKPEMDEKGNLTTAGFACSQCGQPLFVYKLEQVSEKGKAYTNYFGRCNVAEHEKLIKLAQLKPEKDSDEAVTYSLGKFGQRALDFYSIHVTKESTHPVKPLAQIAGNRYASGPVGKALSDACMGTIASFLSKYQDIIIEHQKVVKGNQKRLESLRELAGKENLEYPSVTLPPQPHTKEGLDAYNEVIARVRMWVNLNLWQKLKLSRDDAKPLLRLKGFPSFPLVERQANEVDWWDMVCNVKKLINEKKEDGKVFWQNLAGYKRQEALRPYLSSEEDRKKGKKFARYQLGDLLLHLEKKHGEDWGKVYDEAWERIDKKVEGLSKHIKLEEERRSEDAQSKAALTDWLRAKASFVIEGLKEADKDEFCRCELKLQKWYGDLRGKPFAIEAENSILDISGFSKQYNCAFIWQKDGVKKLNLYLIINYFKGGKLRFKKIKPEAFEANRFYTVINKKSGEIVPMEVNFNFDDPNLIILPLAFGKRQGREFIWNDLLSLETGSLKLANGRVIEKTLYNRRTRQDEPALFVALTFERREVLDSSNIKPMNLIGVDRGENIPAVIALTDPEGCPLSRFKDSLGNPTHILRIGESYKEKQRTIQAKKEVEQRRAGGYSRKYASKAKNLADDMVRNTARDLLYYAVTQDAMLIFENLSRGFGRQGKRTFMAERQYTRMEDWLTAKLAYEGLPSKVYLSKTLAQYTSKTCSNCGFTITSADYDRVLEKLKKTATGWMTTINGKELKVEGQITYYNRYKRQNVVKDLSVELDRLSEESVNNDISSWTKGRSGEALSLLKKRFSHRPVQEKFVCLNCGFETHADEQAALNIARSWLFLRSQEYKKYQTNKTTGNTDKRAFVETWQSFYRKKLKEVWKPAV

SEQ ID NO: 35936 - protein, 977 aa, synthetic construct
  REGION 1..977: note = engineered CasX variant
QEIKRINKIRRRLVKDSNTKKAGKTGPMKTLLVRVMTPDLRERLENLRKKPENIPQPISNTSRANLNKLLTDYTEMKKAILHVYWEEFQKDPVGLMSRVAQPASKKIDQNKLKPEMDEKGNLTTAGFACSQCGQPLFVYKLEQVSEKGKAYTNYFGRCNVAEHEKLILLAQLKPEKDSDEAVTYSLGKFGQRALDFYSIHVTKESTHPVKPLAQIAGNRYASPVGKALSDACMGTIASFLSKYQDIIIEHQKVVKGNQKRLESLRELAGKENLEYPSVTLPPQPHTKEGLDAYNEVIARVRMWVNLNLWQKLKLSRDDAKPLLRLKGFPSFPLVERQANEVDWWDMVCNVKKLINEKKEDGKVFWQNLAGYKRQEALRPYLSSEEDRKKGKKFARYQLGDLLLHLEKKHGEDWGKVYDEAWERIDKKVEGLSKHIKLEEERRSEDAQSKAALTDWLRAKASFVIEGLKEADKDEFCRCELKLQKWYGDLRGKPFAIEAENSILDISGFSKQYNCAFIWQKDGVKKLNLYLIINYFKGGKLRFKKIKPEAFEANRFYTVINKKSGEIVPMEVNFNFDDPNLIILPLAFGKRQGREFIWNDLLSLETGSLKLANGRVIEKTLYNRRTRQDEPALFVALTFERREVLDSSNIKPMNLIGVDRGENIPAVIALTDPEGCPLSRFKDSLGNPTHILRIGESYKEKQRTIQAKKEVEQRRAGGYSRKYASKAKNLADDMVRNTARDLLYYAVTQDAMLIFENLSRGFGRQGKRTFMAERQYTRMEDWLTAKLAYEGLPSKVYLSKTLAQYTSKTCSNCGFTITSADYDRVLEKLKKTATGWMTTINGKELKVEGQITYYNRYKRQNVVKDLSVELDRLSEESVNNDISSWTKGRSGEALSLLKKRFSHRPVQEKFVCLNCGFETHADEQAALNIARSWLFLRSQEYKKYQTNKTTGNTDKRAFVETWQSFYRKKLKEVWKPAV

SEQ ID NO: 35937 - protein, 979 aa, synthetic construct
  REGION 1..979: note = engineered CasX variant
QEIKRINKIRRRLVKDSNTKKAGKTGPMKTLLVRVMTPDLRERLENLRKKPENIPQPISNTSRANLNKLLTDYTEMKKAILHVYWEEFQKDPVGLMSRVAQPASKKIDQNKLKPEMDEKGNLTTAGFACSQCGQPLFVYKLEQVSEKGKAYTNYFGRCNVAEHEKLILLAQLKPEKDSDEAVTYSLGKFGQRALDFYSIHVTKESTHPVKPLAQIAGNRYASYPVGKALSDACMGTIASFLSKYQDIIIEHQKVVKGNQKRLESLRELAGKENLEYPSVTLPPQPHTKEGLDAYNEVIARVRMWVNLNLWQKLKLSRDDAKPLLRLKGFPSFPLVERQANEVDWWDMVCNVKKLINEKKEDGKVFWQNLAGYKRQEALRPYLSSEEDRKKGKKFARYQLGDLLLHLEKKHGEDWGKVYDEAWERIDKKVEGLSKHIKLEEERRSEDAQSKAALTDWLRAKASFVIEGLKEADKDEFCRCELKLQKWYGDLRGKPFAIEAENSILDISGFSKQYNCAFIWQKDGVKKLNLYLIINYFKGGKLRFKKIKPEAFEANRFYTVINKKSGEIVPMEVNFNFDDPNLIILPLAFGKRQGREFIWNDLLSLETGSLKLANGRVIEKTLYNRRTRQDEPALFVALTFERREVLDSSNIKPMNLIGVDRGENIPAVIALTDPEGCPLSRFKDSLGNPTHILRIGESYKEKQRTIQAKKEVEQRRAGGYSRKYASKAKNLADDMVRNTARDLLYYAVTQDAMLIFENLSRGFGRQGKRTFMAERQYTRMEDWLTAKLAYEGPLPSKTYLSKTLAQYTSKTCSNCGFTITSADYDRVLEKLKKTATGWMTTINGKELKVEGQITYYNRYKRQNVVKDLSVELDRLSEESVNNDISSWTKGRSGEALSLLKKRFSHRPVQEKFVCLNCGFETHADEQAALNIARSWLFLRSQEYKKYQTNKTTGNTDKRAFVETWQSFYRKKLKEVWKPAV

SEQ ID NO: 35938 - protein, 979 aa, synthetic construct
  REGION 1..979: note = engineered CasX variant
QEIKRINKIRRRLVKDSNTKKAGKTGPMKTLLVRVMTPDLRERLENLRKKPENIPQPISNTSRANLNKLLTDYTEMKKAILHVYWEEFQKDPVGLMSRVAQPASKKIDQNKLKPEMDEKGNLTTAGFACSQCGQPLFVYKLEQVSEKGKAYTNYFGRCNVAEHEKLILLAQLKPEKDSDEAVTYSLGKFGQRALDFYSIHVTKESTHPVKPLAQIAGNRYASHPVGKALSDACMGTIASFLSKYQDIIIEHQKVVKGNQKRLESLRELAGKENLEYPSVTLPPQPHTKEGLDAYNEVIARVRMWVNLNLWQKLKLSRDDAKPLLRLKGFPSFPLVERQANEVDWWDMVCNVKKLINEKKEDGKVFWQNLAGYKRQEALRPYLSSEEDRKKGKKFARYQLGDLLLHLEKKHGEDWGKVYDEAWERIDKKVEGLSKHIKLEEERRSEDAQSKAALTDWLRAKASFVIEGLKEADKDEFCRCELKLQKWYGDLRGKPFAIEAENSILDISGFSKQYNCAFIWQKDGVKKLNLYLIINYFKGGKLRFKKIKPEAFEANRFYTVINKKSGEIVPMEVNFNFDDPNLIILPLAFGKRQGREFIWNDLLSLETGSLKLANGRVIEKTLYNRRTRQDEPALFVALTFERREVLDSSNIKPMNLIGVDRGENIPAVIALTDPEGCPLSRFKDSLGNPTHILRIGESYKEKQRTIQAKKEVEQRRAGGYSRKYASKAKNLADDMVRNTARDLLYYAVTQDAMLIFENLSRGFGRQGKRTFMAERQYTRMEDWLTAKLAYEGPLPSKTYLSKTLAQYTSKTCSNCGFTITSADYDRVLEKLKKTATGWMTTINGKELKVEGQITYYNRYKRQNVVKDLSVELDRLSEESVNNDISSWTKGRSGEALSLLKKRFSHRPVQEKFVCLNCGFETHADEQAALNIARSWLFLRSQEYKKYQTNKTTGNTDKRAFVETWQSFYRKKLKEVWKPAV

SEQ ID NO: 35939 - protein, 979 aa, synthetic construct
  REGION 1..979: note = engineered CasX variant
QEIKRINKIRRRLVKDSNTKKAGKTGPMKTLLVRVMTPDLRERLENLRKKPENIPQPISNTSRANLNKLLTDYTEMKKAILHVYWEEFQKDPVGLMSRVAQPASKKIDQNKLKPEMDEKGNLTTAGFACSQCGQPLFVYKLEQVSEKGKAYTNYFGRCNVAEHEKLILLAQLKPEKDSDEAVTYSLGKFGQRALDFYSIHVTKESTHPVKPLAQIAGNRYASSPVGKALSDACMGTIASFLSKYQDIIIEHQKVVKGNQKRLESLRELAGKENLEYPSVTLPPQPHTKEGLDAYNEVIARVRMWVNLNLWQKLKLSRDDAKPLLRLKGFPSFPLVERQANEVDWWDMVCNVKKLINEKKEDGKVFWQNLAGYKRQEALRPYLSSEEDRKKGKKFARYQLGDLLLHLEKKHGEDWGKVYDEAWERIDKKVEGLSKHIKLEEERRSEDAQSKAALTDWLRAKASFVIEGLKEADKDEFCRCELKLQKWYGDLRGKPFAIEAENSILDISGFSKQYNCAFIWQKDGVKKLNLYLIINYFKGGKLRFKKIKPEAFEANRFYTVINKKSGEIVPMEVNFNFDDPNLIILPLAFGKRQGREFIWNDLLSLETGSLKLANGRVIEKTLYNRRTRQDEPALFVALTFERREVLDSSNIKPMNLIGVDRGENIPAVIALTDPEGCPLSRFKDSLGNPTHILRIGESYKEKQRTIQAKKEVEQRRAGGYSRKYASKAKNLADDMVRNTARDLLYYAVTQDAMLIFENLSRGFGRQGKRTFMAERQYTRMEDWLTAKLAYEGPLPSKTYLSKTLAQYTSKTCSNCGFTITSADYDRVLEKLKKTATGWMTTINGKELKVEGQITYYNRYKRQNVVKDLSVELDRLSEESVNNDISSWTKGRSGEALSLLKKRFSHRPVQEKFVCLNCGFETHADEQAALNIARSWLFLRSQEYKKYQTNKTTGNTDKRAFVETWQSFYRKKLKEVWKPAV

SEQ ID NO: 35940 - protein, 979 aa, synthetic construct
  REGION 1..979: note = engineered CasX variant
QEIKRINKIRRRLVKDSNTKKAGKTGPMKTLLVRVMTPDLRERLENLRKKPENIPQPISNTSRANLNKLLTDYTEMKKAILHVYWEEFQKDPVGLMSRVAQPASKKIDQNKLKPEMDEKGNLTTAGFACSQCGQPLFVYKLEQVSEKGKAYTNYFGRCNVAEHEKLILLAQLKPEKDSDEAVTYSLGKFGQRALDFYSIHVTKESTHPVKPLAQIAGNRYASTPVGKALSDACMGTIASFLSKYQDIIIEHQKVVKGNQKRLESLRELAGKENLEYPSVTLPPQPHTKEGLDAYNEVIARVRMWVNLNLWQKLKLSRDDAKPLLRLKGFPSFPLVERQANEVDWWDMVCNVKKLINEKKEDGKVFWQNLAGYKRQEALRPYLSSEEDRKKGKKFARYQLGDLLLHLEKKHGEDWGKVYDEAWERIDKKVEGLSKHIKLEEERRSEDAQSKAALTDWLRAKASFVIEGLKEADKDEFCRCELKLQKWYGDLRGKPFAIEAENSILDISGFSKQYNCAFIWQKDGVKKLNLYLIINYFKGGKLRFKKIKPEAFEANRFYTVINKKSGEIVPMEVNFNFDDPNLIILPLAFGKRQGREFIWNDLLSLETGSLKLANGRVIEKTLYNRRTRQDEPALFVALTFERREVLDSSNIKPMNLIGVDRGENIPAVIALTDPEGCPLSRFKDSLGNPTHILRIGESYKEKQRTIQAKKEVEQRRAGGYSRKYASKAKNLADDMVRNTARDLLYYAVTQDAMLIFENLSRGFGRQGKRTFMAERQYTRMEDWLTAKLAYEGPLPSKTYLSKTLAQYTSKTCSNCGFTITSADYDRVLEKLKKTATGWMTTINGKELKVEGQITYYNRYKRQNVVKDLSVELDRLSEESVNNDISSWTKGRSGEALSLLKKRFSHRPVQEKFVCLNCGFETHADEQAALNIARSWLFLRSQEYKKYQTNKTTGNTDKRAFVETWQSFYRKKLKEVWKPAV

SEQ ID NO: 35941 - protein, 979 aa, synthetic construct
  REGION 1..979: note = engineered CasX variant
QEIKRINKIRRRLVKDSNTKKAGKTGPMKTLLVRVMTPDLRERLENLRKKPENIPQPISNTSRANLNKLLTDYTEMKKAILHVYWEEFQKDPVGLMSRVAQPASKKIDQNKLKPEMDEKGNLTTAGFACSQCGQPLFVYKLEQVSEKGKAYTNYFGRCNVAEHEKLILLAQLKPEKDSDEAVTYSLGKFGQRALDFYSIHVTKESTHPVKPLAQIAGNRYASAPVGKALSDACMGTIASFLSKYQDIIIEHQKVVKGNQKRLESLRELAGKENLEYPSVTLPPQPHTKEGLDAYNEVIARVRMWVNLNLWQKLKLSRDDAKPLLRLKGFPSFPLVERQANEVDWWDMVCNVKKLINEKKEDGKVFWQNLAGYKRQEALRPYLSSEEDRKKGKKFARYQLGDLLLHLEKKHGEDWGKVYDEAWERIDKKVEGLSKHIKLEEERRSEDAQSKAALTDWLRAKASFVIEGLKEADKDEFCRCELKLQKWYGDLRGKPFAIEAENSILDISGFSKQYNCAFIWQKDGVKKLNLYLIINYFKGGKLRFKKIKPEAFEANRFYTVINKKSGEIVPMEVNFNFDDPNLIILPLAFGKRQGREFIWNDLLSLETGSLKLANGRVIEKTLYNRRTRQDEPALFVALTFERREVLDSSNIKPMNLIGVDRGENIPAVIALTDPEGCPLSRFKDSLGNPTHILRIGESYKEKQRTIQAKKEVEQRRAGGYSRKYASKAKNLADDMVRNTARDLLYYAVTQDAMLIFENLSRGFGRQGKRTFMAERQYTRMEDWLTAKLAYEGPLPSKTYLSKTLAQYTSKTCSNCGFTITSADYDRVLEKLKKTATGWMTTINGKELKVEGQITYYNRYKRQNVVKDLSVELDRLSEESVNNDISSWTKGRSGEALSLLKKRFSHRPVQEKFVCLNCGFETHADEQAALNIARSWLFLRSQEYKKYQTNKTTGNTDKRAFVETWQSFYRKKLKEVWKPAV

SEQ ID NO: 35942 - protein, 979 aa, synthetic construct
  REGION 1..979: note = engineered CasX variant
QEIKRINKIRRRLVKDSNTKKAGKTGPMKTLLVRVMTPDLRERLENLRKKPENIPQPISNTSRANLNKLLTDYTEMKKAILHVYWEEFQKDPVGLMSRVAQPASKKIDQNKLKPEMDEKGNLTTAGFACSQCGQPLFVYKLEQVSEKGKAYTNYFGRCNVAEHEKLILLAQLKPEKDSDEAVTYSLGKFGQRALDFYSIHVTKESTHPVKPLAQIAGNRYASVPVGKALSDACMGTIASFLSKYQDIIIEHQKVVKGNQKRLESLRELAGKENLEYPSVTLPPQPHTKEGLDAYNEVIARVRMWVNLNLWQKLKLSRDDAKPLLRLKGFPSFPLVERQANEVDWWDMVCNVKKLINEKKEDGKVFWQNLAGYKRQEALRPYLSSEEDRKKGKKFARYQLGDLLLHLEKKHGEDWGKVYDEAWERIDKKVEGLSKHIKLEEERRSEDAQSKAALTDWLRAKASFVIEGLKEADKDEFCRCELKLQKWYGDLRGKPFAIEAENSILDISGFSKQYNCAFIWQKDGVKKLNLYLIINYFKGGKLRFKKIKPEAFEANRFYTVINKKSGEIVPMEVNFNFDDPNLIILPLAFGKRQGREFIWNDLLSLETGSLKLANGRVIEKTLYNRRTRQDEPALFVALTFERREVLDSSNIKPMNLIGVDRGENIPAVIALTDPEGCPLSRFKDSLGNPTHILRIGESYKEKQRTIQAKKEVEQRRAGGYSRKYASKAKNLADDMVRNTARDLLYYAVTQDAMLIFENLSRGFGRQGKRTFMAERQYTRMEDWLTAKLAYEGPLPSKTYLSKTLAQYTSKTCSNCGFTITSADYDRVLEKLKKTATGWMTTINGKELKVEGQITYYNRYKRQNVVKDLSVELDRLSEESVNNDISSWTKGRSGEALSLLKKRFSHRPVQEKFVCLNCGFETHADEQAALNIARSWLFLRSQEYKKYQTNKTTGNTDKRAFVETWQSFYRKKLKEVWKPAV

SEQ ID NO: 35943 - protein, 979 aa, synthetic construct
  REGION 1..979: note = engineered CasX variant
QEIKRINKIRRRLVKDSNTKKAGKTGPMKTLLVRVMTPDLRERLENLRKKPENIPQPISNTSRANLNKLLTDYTEMKKAILHVYWEEFQKDPVGLMSRVAQPASKKIDQNKLKPEMDEKGNLTTAGFACSQCGQPLFVYKLEQVSEKGKAYTNYFGRCNVAEHEKLIKLAQLKPEKDSDEAVTYSLGKFGQRALDFYSIHVTKESTHPVKPLAQIAGNRYASGPVGKALSDACMGTIASFLSKYQDIIIEHQKVVKGNQKRLESLRELAGKENLEYPSVTLPPQPHTKEGLDAYNEVIARVRMWVNLNLWQKLKLSRDDAKPLLRLKGFPSFPLVERQANEVDWWDMVCNVKKLINEKKEDGKVFWQNLAGYKRQEALRPYLSSEEDRKKGKKFARYQLGDLLLHLEKKHGEDWGKVYDEAWERIDKKVEGLSKHIKLEEERRSEDAQSKAALTDWLRAKASFVIEGLKEADKDEFCRCELKLQKWYGDLRGKPFAIEAENSILDISGFSKQYNCAFIWQKDGVKKLNLYLIINYFKGGKLRFKKIKPEAFEANRFYTVINKKSGEIVPMEVNFNFDDPNLIILPLAFGKRQGREFIWNDLLSLETGSLKLANGRVIEKTLYNRRTRQDEPALFVALTFERREVLDSSNIKPMNLIGVDRGENIPAVIALTDPEGCPLSRFKDSLGNPTHILRIGESYKEKQRTIQAKKEVEQRRAGGYSRKYASKAKNLADDMVRNTARDLLYYAVTQDAMLIFENLSRGFGRQGKRTFMAERQYTRMEDWLTAKLAYEGPLPSKTYLSKTLAQYTSKTCSNCGFTITSADYDRVLEKLKKTATGWMTTINGKELKVEGQITYYNRYKRQNVVKDLSVELDRLSEESVNNDISSWTKGRSGEALSLLKKRFSHRPVQEKFVCLNCGFETHADEQAALNIARSWLFLRSQEYKKYQTNKTTGNTDKRAFVETWQSFYRKKLKEVWKPAV

SEQ ID NO: 35944 - protein, 978 aa, synthetic construct
  REGION 1..978: note = engineered CasX variant
QEIKRINKIRRRLVKDSNTKKAGKTGPMKTLLVRVMTPDLRERLENLRKKPENIPQPISNTSRANLNKLLTDYTEMKKAILHVYWEEFQKDPVGLMSRVAQPASKKIDQNKLKPEMDEKGNLTTAGFACSQCGQPLFVYKLEQVSEKGKAYTNYFGRCNVAEHEKLILLAQLKPEKDSDEAVTYSLGKFGQRALDFYSIHVTKESTHPVKPLAQIAGNRYASPVGKALSDACMGTIASFLSKYQDIIIEHQKVVKGNQKRLESLRELAGKENLEYPSVTLPPQPHTKEGLDAYNEVIARVRMWVNLNLWQKLKLSRDDAKPLLRLKGFPSFPLVERQANEVDWWDMVCNVKKLINEKKEDGKVFWQNLAGYKRQEALRPYLSSEEDRKKGKKFARYQLGDLLLHLEKKHGEDWGKVYDEAWERIDKKVEGLSKHIKLEEERRSEDAQSKAALTDWLRAKASFVIEGLKEADKDEFCRCELKLQKWYGDLRGKPFAIEAENSILDISGFSKQYNCAFIWQKDGVKKLNLYLIINYFKGGKLRFKKIKPEAFEANRFYTVINKKSGEIVPMEVNFNFDDPNLIILPLAFGKRQGREFIWNDLLSLETGSLKLANGRVIEKTLYNRRTRQDEPALFVALTFERREVLDSSNIKPMNLIGVDRGENIPAVIALTDPEGCPLSRFKDSLGNPTHILRIGESYKEKQRTIQAKKEVEQRRAGGYSRKYASKAKNLADDMVRNTARDLLYYAVTQDAMLIFENLSRGFGRQGKRTFMAERQYTRMEDWLTAKLAYEGPLPSKTYLSKTLAQYTSKTCSNCGFTITSADYDRVLEKLKKTATGWMTTINGKELKVEGQITYYNRYKRQNVVKDLSVELDRLSEESVNNDISSWTKGRSGEALSLLKKRFSHRPVQEKFVCLNCGFETHADEQAALNIARSWLFLRSQEYKKYQTNKTTGNTDKRAFVETWQSFYRKKLKEVWKPAV

SEQ ID NO: 35945 - protein, 979 aa, synthetic construct
  REGION 1..979: note = engineered CasX variant
QEIKRINKIRRRLVKDSNTKKAGKTGPMKTLLVRVMTPDLRERLENLRKKPENIPQPISNTSRANLNKLLTDYTEMKKAILHVYWEEFQKDPVGLMSRVAQPASKKIDQNKLKPEMDEKGNLTTAGFACSQCGQPLFVYKLEQVSEKGKAYTNYFGRCNVAEHEKLILLAQLKPEKDSDEAVTYSLGKFGQRALDFYSIHVTKESTHPVKPLAQIAGNRYASYPVGKALSDACMGTIASFLSKYQDIIIEHQKVVKGNQKRLESLRELAGKENLEYPSVTLPPQPHTKEGLDAYNEVIARVRMWVNLNLWQKLKLSRDDAKPLLRLKGFPSFPLVERQANEVDWWDMVCNVKKLINEKKEDGKVFWQNLAGYKRQEALRPYLSSEEDVRKKGKKFARYQLGDLLLHLEKKHGEDWGKVYDEAWERIDKKVEGLSKHIKLEEERRSEDAQSKAALTDWLRAKASFVIEGLKEADKDEFCRCELKLQKWYGDLRGKPFAIEAENSILDISGFSKQYNCAFIWQKDGVKKLNLYLIINYFKGGKLRFKKIKPEAFEANRFYTVINKKSGEIVPMEVNFNFDDPNLIILPLAFGKRQGREFIWNDLLSLETGSLKLANGRVIEKTLYNRRTRQDEPALFVALTFERREVLDSSNIKPMNLIGVDRGENIPAVIALTDPEGCPLSRFKDSLGNPTHILRIGESYKEKQRTIQAKKEVEQRRAGGYSRKYASKAKNLADDMVRNTARDLLYYAVTQDAMLIFENLSRGFGRQGKRTFMAERQYTRMEDWLTAKLAYEGLPSKTYLSKTLAQYTSKTCSNCGFTITSADYDRVLEKLKKTATGWMTTINGKELKVEGQITYYNRYKRQNVVKDLSVELDRLSEESVNNDISSWTKGRSGEALSLLKKRFSHRPVQEKFVCLNCGFETHADEQAALNIARSWLFLRSQEYKKYQTNKTTGNTDKRAFVETWQSFYRKKLKEVWKPAV

SEQ ID NO: 35946 - protein, 979 aa, synthetic construct
  REGION 1..979: note = engineered CasX variant
QEIKRINKIRRRLVKDSNTKKAGKTGPMKTLLVRVMTPDLRERLENLRKKPENIPQPISNTSRANLNKLLTDYTEMKKAILHVYWEEFQKDPVGLMSRVAQPASKKIDQNKLKPEMDEKGNLTTAGFACSQCGQPLFVYKLEQVSEKGKAYTNYFGRCNVAEHEKLILLAQLKPEKDSDEAVTYSLGKFGQRALDFYSIHVTKESTHPVKPLAQIAGNRYASHPVGKALSDACMGTIASFLSKYQDIIIEHQKVVKGNQKRLESLRELAGKENLEYPSVTLPPQPHTKEGLDAYNEVIARVRMWVNLNLWQKLKLSRDDAKPLLRLKGFPSFPLVERQANEVDWWDMVCNVKKLINEKKEDGKVFWQNLAGYKRQEALRPYLSSEEDVRKKGKKFARYQLGDLLLHLEKKHGEDWGKVYDEAWERIDKKVEGLSKHIKLEEERRSEDAQSKAALTDWLRAKASFVIEGLKEADKDEFCRCELKLQKWYGDLRGKPFAIEAENSILDISGFSKQYNCAFIWQKDGVKKLNLYLIINYFKGGKLRFKKIKPEAFEANRFYTVINKKSGEIVPMEVNFNFDDPNLIILPLAFGKRQGREFIWNDLLSLETGSLKLANGRVIEKTLYNRRTRQDEPALFVALTFERREVLDSSNIKPMNLIGVDRGENIPAVIALTDPEGCPLSRFKDSLGNPTHILRIGESYKEKQRTIQAKKEVEQRRAGGYSRKYASKAKNLADDMVRNTARDLLYYAVTQDAMLIFENLSRGFGRQGKRTFMAERQYTRMEDWLTAKLAYEGLPSKTYLSKTLAQYTSKTCSNCGFTITSADYDRVLEKLKKTATGWMTTINGKELKVEGQITYYNRYKRQNVVKDLSVELDRLSEESVNNDISSWTKGRSGEALSLLKKRFSHRPVQEKFVCLNCGFETHADEQAALNIARSWLFLRSQEYKKYQTNKTTGNTDKRAFVETWQSFYRKKLKEVWKPAV

SEQ ID NO: 35947 - protein, 979 aa, synthetic construct
  REGION 1..979: note = engineered CasX variant
QEIKRINKIRRRLVKDSNTKKAGKTGPMKTLLVRVMTPDLRERLENLRKKPENIPQPISNTSRANLNKLLTDYTEMKKAILHVYWEEFQKDPVGLMSRVAQPASKKIDQNKLKPEMDEKGNLTTAGFACSQCGQPLFVYKLEQVSEKGKAYTNYFGRCNVAEHEKLILLAQLKPEKDSDEAVTYSLGKFGQRALDFYSIHVTKESTHPVKPLAQIAGNRYASSPVGKALSDACMGTIASFLSKYQDIIIEHQKVVKGNQKRLESLRELAGKENLEYPSVTLPPQPHTKEGLDAYNEVIARVRMWVNLNLWQKLKLSRDDAKPLLRLKGFPSFPLVERQANEVDWWDMVCNVKKLINEKKEDGKVFWQNLAGYKRQEALRPYLSSEEDVRKKGKKFARYQLGDLLLHLEKKHGEDWGKVYDEAWERIDKKVEGLSKHIKLEEERRSEDAQSKAALTDWLRAKASFVIEGLKEADKDEFCRCELKLQKWYGDLRGKPFAIEAENSILDISGFSKQYNCAFIWQKDGVKKLNLYLIINYFKGGKLRFKKIKPEAFEANRFYTVINKKSGEIVPMEVNFNFDDPNLIILPLAFGKRQGREFIWNDLLSLETGSLKLANGRVIEKTLYNRRTRQDEPALFVALTFERREVLDSSNIKPMNLIGVDRGENIPAVIALTDPEGCPLSRFKDSLGNPTHILRIGESYKEKQRTIQAKKEVEQRRAGGYSRKYASKAKNLADDMVRNTARDLLYYAVTQDAMLIFENLSRGFGRQGKRTFMAERQYTRMEDWLTAKLAYEGLPSKTYLSKTLAQYTSKTCSNCGFTITSADYDRVLEKLKKTATGWMTTINGKELKVEGQITYYNRYKRQNVVKDLSVELDRLSEESVNNDISSWTKGRSGEALSLLKKRFSHRPVQEKFVCLNCGFETHADEQAALNIARSWLFLRSQEYKKYQTNKTTGNTDKRAFVETWQSFYRKKLKEVWKPAV

SEQ ID NO: 35948 - protein, 979 aa, synthetic construct
  REGION 1..979: note = engineered CasX variant
QEIKRINKIRRRLVKDSNTKKAGKTGPMKTLLVRVMTPDLRERLENLRKKPENIPQPISNTSRANLNKLLTDYTEMKKAILHVYWEEFQKDPVGLMSRVAQPASKKIDQNKLKPEMDEKGNLTTAGFACSQCGQPLFVYKLEQVSEKGKAYTNYFGRCNVAEHEKLILLAQLKPEKDSDEAVTYSLGKFGQRALDFYSIHVTKESTHPVKPLAQIAGNRYASTPVGKALSDACMGTIASFLSKYQDIIIEHQKVVKGNQKRLESLRELAGKENLEYPSVTLPPQPHTKEGLDAYNEVIARVRMWVNLNLWQKLKLSRDDAKPLLRLKGFPSFPLVERQANEVDWWDMVCNVKKLINEKKEDGKVFWQNLAGYKRQEALRPYLSSEEDVRKKGKKFARYQLGDLLLHLEKKHGEDWGKVYDEAWERIDKKVEGLSKHIKLEEERRSEDAQSKAALTDWLRAKASFVIEGLKEADKDEFCRCELKLQKWYGDLRGKPFAIEAENSILDISGFSKQYNCAFIWQKDGVKKLNLYLIINYFKGGKLRFKKIKPEAFEANRFYTVINKKSGEIVPMEVNFNFDDPNLIILPLAFGKRQGREFIWNDLLSLETGSLKLANGRVIEKTLYNRRTRQDEPALFVALTFERREVLDSSNIKPMNLIGVDRGENIPAVIALTDPEGCPLSRFKDSLGNPTHILRIGESYKEKQRTIQAKKEVEQRRAGGYSRKYASKAKNLADDMVRNTARDLLYYAVTQDAMLIFENLSRGFGRQGKRTFMAERQYTRMEDWLTAKLAYEGLPSKTYLSKTLAQYTSKTCSNCGFTITSADYDRVLEKLKKTATGWMTTINGKELKVEGQITYYNRYKRQNVVKDLSVELDRLSEESVNNDISSWTKGRSGEALSLLKKRFSHRPVQEKFVCLNCGFETHADEQAALNIARSWLFLRSQEYKKYQTNKTTGNTDKRAFVETWQSFYRKKLKEVWKPAV

SEQ ID NO: 35949 - protein, 979 aa, synthetic construct
  REGION 1..979: note = engineered CasX variant
QEIKRINKIRRRLVKDSNTKKAGKTGPMKTLLVRVMTPDLRERLENLRKKPENIPQPISNTSRANLNKLLTDYTEMKKAILHVYWEEFQKDPVGLMSRVAQPASKKIDQNKLKPEMDEKGNLTTAGFACSQCGQPLFVYKLEQVSEKGKAYTNYFGRCNVAEHEKLILLAQLKPEKDSDEAVTYSLGKFGQRALDFYSIHVTKESTHPVKPLAQIAGNRYASAPVGKALSDACMGTIASFLSKYQDIIIEHQKVVKGNQKRLESLRELAGKENLEYPSVTLPPQPHTKEGLDAYNEVIARVRMWVNLNLWQKLKLSRDDAKPLLRLKGFPSFPLVERQANEVDWWDMVCNVKKLINEKKEDGKVFWQNLAGYKRQEALRPYLSSEEDVRKKGKKFARYQLGDLLLHLEKKHGEDWGKVYDEAWERIDKKVEGLSKHIKLEEERRSEDAQSKAALTDWLRAKASFVIEGLKEADKDEFCRCELKLQKWYGDLRGKPFAIEAENSILDISGFSKQYNCAFIWQKDGVKKLNLYLIINYFKGGKLRFKKIKPEAFEANRFYTVINKKSGEIVPMEVNFNFDDPNLIILPLAFGKRQGREFIWNDLLSLETGSLKLANGRVIEKTLYNRRTRQDEPALFVALTFERREVLDSSNIKPMNLIGVDRGENIPAVIALTDPEGCPLSRFKDSLGNPTHILRIGESYKEKQRTIQAKKEVEQRRAGGYSRKYASKAKNLADDMVRNTARDLLYYAVTQDAMLIFENLSRGFGRQGKRTFMAERQYTRMEDWLTAKLAYEGLPSKTYLSKTLAQYTSKTCSNCGFTITSADYDRVLEKLKKTATGWMTTINGKELKVEGQITYYNRYKRQNVVKDLSVELDRLSEESVNNDISSWTKGRSGEALSLLKKRFSHRPVQEKFVCLNCGFETHADEQAALNIARSWLFLRSQEYKKYQTNKTTGNTDKRAFVETWQSFYRKKLKEVWKPAV

SEQ ID NO: 35950 - protein, 979 aa, synthetic construct
  REGION 1..979: note = engineered CasX variant
QEIKRINKIRRRLVKDSNTKKAGKTGPMKTLLVRVMTPDLRERLENLRKKPENIPQPISNTSRANLNKLLTDYTEMKKAILHVYWEEFQKDPVGLMSRVAQPASKKIDQNKLKPEMDEKGNLTTAGFACSQCGQPLFVYKLEQVSEKGKAYTNYFGRCNVAEHEKLILLAQLKPEKDSDEAVTYSLGKFGQRALDFYSIHVTKESTHPVKPLAQIAGNRYASVPVGKALSDACMGTIASFLSKYQDIIIEHQKVVKGNQKRLESLRELAGKENLEYPSVTLPPQPHTKEGLDAYNEVIARVRMWVNLNLWQKLKLSRDDAKPLLRLKGFPSFPLVERQANEVDWWDMVCNVKKLINEKKEDGKVFWQNLAGYKRQEALRPYLSSEEDVRKKGKKFARYQLGDLLLHLEKKHGEDWGKVYDEAWERIDKKVEGLSKHIKLEEERRSEDAQSKAALTDWLRAKASFVIEGLKEADKDEFCRCELKLQKWYGDLRGKPFAIEAENSILDISGFSKQYNCAFIWQKDGVKKLNLYLIINYFKGGKLRFKKIKPEAFEANRFYTVINKKSGEIVPMEVNFNFDDPNLIILPLAFGKRQGREFIWNDLLSLETGSLKLANGRVIEKTLYNRRTRQDEPALFVALTFERREVLDSSNIKPMNLIGVDRGENIPAVIALTDPEGCPLSRFKDSLGNPTHILRIGESYKEKQRTIQAKKEVEQRRAGGYSRKYASKAKNLADDMVRNTARDLLYYAVTQDAMLIFENLSRGFGRQGKRTFMAERQYTRMEDWLTAKLAYEGLPSKTYLSKTLAQYTSKTCSNCGFTITSADYDRVLEKLKKTATGWMTTINGKELKVEGQITYYNRYKRQNVVKDLSVELDRLSEESVNNDISSWTKGRSGEALSLLKKRFSHRPVQEKFVCLNCGFETHADEQAALNIARSWLFLRSQEYKKYQTNKTTGNTDKRAFVETWQSFYRKKLKEVWKPAV

SEQ ID NO: 35951 - protein, 979 aa, synthetic construct
  REGION 1..979: note = engineered CasX variant
QEIKRINKIRRRLVKDSNTKKAGKTGPMKTLLVRVMTPDLRERLENLRKKPENIPQPISNTSRANLNKLLTDYTEMKKAILHVYWEEFQKDPVGLMSRVAQPASKKIDQNKLKPEMDEKGNLTTAGFACSQCGQPLFVYKLEQVSEKGKAYTNYFGRCNVAEHEKLIKLAQLKPEKDSDEAVTYSLGKFGQRALDFYSIHVTKESTHPVKPLAQIAGNRYASGPVGKALSDACMGTIASFLSKYQDIIIEHQKVVKGNQKRLESLRELAGKENLEYPSVTLPPQPHTKEGLDAYNEVIARVRMWVNLNLWQKLKLSRDDAKPLLRLKGFPSFPLVERQANEVDWWDMVCNVKKLINEKKEDGKVFWQNLAGYKRQEALRPYLSSEEDVRKKGKKFARYQLGDLLLHLEKKHGEDWGKVYDEAWERIDKKVEGLSKHIKLEEERRSEDAQSKAALTDWLRAKASFVIEGLKEADKDEFCRCELKLQKWYGDLRGKPFAIEAENSILDISGFSKQYNCAFIWQKDGVKKLNLYLIINYFKGGKLRFKKIKPEAFEANRFYTVINKKSGEIVPMEVNFNFDDPNLIILPLAFGKRQGREFIWNDLLSLETGSLKLANGRVIEKTLYNRRTRQDEPALFVALTFERREVLDSSNIKPMNLIGVDRGENIPAVIALTDPEGCPLSRFKDSLGNPTHILRIGESYKEKQRTIQAKKEVEQRRAGGYSRKYASKAKNLADDMVRNTARDLLYYAVTQDAMLIFENLSRGFGRQGKRTFMAERQYTRMEDWLTAKLAYEGLPSKTYLSKTLAQYTSKTCSNCGFTITSADYDRVLEKLKKTATGWMTTINGKELKVEGQITYYNRYKRQNVVKDLSVELDRLSEESVNNDISSWTKGRSGEALSLLKKRFSHRPVQEKFVCLNCGFETHADEQAALNIARSWLFLRSQEYKKYQTNKTTGNTDKRAFVETWQSFYRKKLKEVWKPAV

SEQ ID NO: 35952 - protein, 978 aa, synthetic construct
  REGION 1..978: note = engineered CasX variant
QEIKRINKIRRRLVKDSNTKKAGKTGPMKTLLVRVMTPDLRERLENLRKKPENIPQPISNTSRANLNKLLTDYTEMKKAILHVYWEEFQKDPVGLMSRVAQPASKKIDQNKLKPEMDEKGNLTTAGFACSQCGQPLFVYKLEQVSEKGKAYTNYFGRCNVAEHEKLILLAQLKPEKDSDEAVTYSLGKFGQRALDFYSIHVTKESTHPVKPLAQIAGNRYASPVGKALSDACMGTIASFLSKYQDIIIEHQKVVKGNQKRLESLRELAGKENLEYPSVTLPPQPHTKEGLDAYNEVIARVRMWVNLNLWQKLKLSRDDAKPLLRLKGFPSFPLVERQANEVDWWDMVCNVKKLINEKKEDGKVFWQNLAGYKRQEALRPYLSSEEDVRKKGKKFARYQLGDLLLHLEKKHGEDWGKVYDEAWERIDKKVEGLSKHIKLEEERRSEDAQSKAALTDWLRAKASFVIEGLKEADKDEFCRCELKLQKWYGDLRGKPFAIEAENSILDISGFSKQYNCAFIWQKDGVKKLNLYLIINYFKGGKLRFKKIKPEAFEANRFYTVINKKSGEIVPMEVNFNFDDPNLIILPLAFGKRQGREFIWNDLLSLETGSLKLANGRVIEKTLYNRRTRQDEPALFVALTFERREVLDSSNIKPMNLIGVDRGENIPAVIALTDPEGCPLSRFKDSLGNPTHILRIGESYKEKQRTIQAKKEVEQRRAGGYSRKYASKAKNLADDMVRNTARDLLYYAVTQDAMLIFENLSRGFGRQGKRTFMAERQYTRMEDWLTAKLAYEGLPSKTYLSKTLAQYTSKTCSNCGFTITSADYDRVLEKLKKTATGWMTTINGKELKVEGQITYYNRYKRQNVVKDLSVELDRLSEESVNNDISSWTKGRSGEALSLLKKRFSHRPVQEKFVCLNCGFETHADEQAALNIARSWLFLRSQEYKKYQTNKTTGNTDKRAFVETWQSFYRKKLKEVWKPAV

SEQ ID NO: 35953 - protein, 978 aa, synthetic construct
  REGION 1..978: note = engineered CasX variant
QEIKRINKIRRRLVKDSNTKKAGKTGPMKTLLVRVMTPDLRERLENLRKKPENIPQPISNTSRANLNKLLTDYTEMKKAILHVYWEEFQKDPVGLMSRVAQPASKKIDQNKLKPEMDEKGNLTTAGFACSQCGQPLFVYKLEQVSEKGKAYTNYFGRCNVAEHEKLILLAQLKPEKDSDEAVTYSLGKFGQRALDFYSIHVTKESTHPVKPLAQIAGNRYASYPVGKALSDACMGTIASFLSKYQDIIIEHQKVVKGNQKRLESLRELAGKENLEYPSVTLPPQPHTKEGLDAYNEVIARVRMWVNLNLWQKLKLSRDDAKPLLRLKGFPSFPLVERQANEVDWWDMVCNVKKLINEKKEDGKVFWQNLAGYKRQEALRPYLSSEEDRKKGKKFARYQLGDLLLHLEKKHGEDWGKVYDEAWERIDKKVEGLSKHIKLEEERRSEDAQSKAALTDWLRAKASFVIEGLKEADKDEFCRCELKLQKWYGDLRGKPFAIEAENSILDISGFSKQYNCAFIWQKDGVKKLNLYLIINYFKGGKLRFKKIKPEAFEANRFYTVINKKSGEIVPMEVNFNFDDPNLIILPLAFGKRQGREFIWNDLLSLETGSLKLANGRVIEKTLYNRRTRQDEPALFVALTFERREVLDSSNIKPMNLIGVDRGENIPAVIALTDPEGCPLSRFKDSLGNPTHILRIGESYKEKQRTIQAKKEVEQRRAGGYSRKYASKAKNLADDMVRNTARDLLYYAVTQDAMLIFENLSRGFGRQGKRTFMAERQYTRMEDWLTAKLAYEGLPSKTYLSKTLAQYTSKTCSNCGFTITSADYDRMLEKLKKTATGWMTTINGKELKVEGQITYYNRYKRQNVVKDLSVELDRLSEESVNNDISSWTKGRSGEALSLLKKRFSHRPVQEKFVCLNCGFETHADEQAALNIARSWLFLRSQEYKKYQTNKTTGNTDKRAFVETWQSFYRKKLKEVWKPAV

SEQ ID NO: 35954 - protein, 978 aa, synthetic construct
  REGION 1..978: note = engineered CasX variant
QEIKRINKIRRRLVKDSNTKKAGKTGPMKTLLVRVMTPDLRERLENLRKKPENIPQPISNTSRANLNKLLTDYTEMKKAILHVYWEEFQKDPVGLMSRVAQPASKKIDQNKLKPEMDEKGNLTTAGFACSQCGQPLFVYKLEQVSEKGKAYTNYFGRCNVAEHEKLILLAQLKPEKDSDEAVTYSLGKFGQRALDFYSIHVTKESTHPVKPLAQIAGNRYASHPVGKALSDACMGTIASFLSKYQDIIIEHQKVVKGNQKRLESLRELAGKENLEYPSVTLPPQPHTKEGLDAYNEVIARVRMWVNLNLWQKLKLSRDDAKPLLRLKGFPSFPLVERQANEVDWWDMVCNVKKLINEKKEDGKVFWQNLAGYKRQEALRPYLSSEEDRKKGKKFARYQLGDLLLHLEKKHGEDWGKVYDEAWERIDKKVEGLSKHIKLEEERRSEDAQSKAALTDWLRAKASFVIEGLKEADKDEFCRCELKLQKWYGDLRGKPFAIEAENSILDISGFSKQYNCAFIWQKDGVKKLNLYLIINYFKGGKLRFKKIKPEAFEANRFYTVINKKSGEIVPMEVNFNFDDPNLIILPLAFGKRQGREFIWNDLLSLETGSLKLANGRVIEKTLYNRRTRQDEPALFVALTFERREVLDSSNIKPMNLIGVDRGENIPAVIALTDPEGCPLSRFKDSLGNPTHILRIGESYKEKQRTIQAKKEVEQRRAGGYSRKYASKAKNLADDMVRNTARDLLYYAVTQDAMLIFENLSRGFGRQGKRTFMAERQYTRMEDWLTAKLAYEGLPSKTYLSKTLAQYTSKTCSNCGFTITSADYDRMLEKLKKTATGWMTTINGKELKVEGQITYYNRYKRQNVVKDLSVELDRLSEESVNNDISSWTKGRSGEALSLLKKRFSHRPVQEKFVCLNCGFETHADEQAALNIARSWLFLRSQEYKKYQTNKTTGNTDKRAFVETWQSFYRKKLKEVWKPAV

SEQ ID NO: 35955 - protein, 978 aa, synthetic construct
  REGION 1..978: note = engineered CasX variant
QEIKRINKIRRRLVKDSNTKKAGKTGPMKTLLVRVMTPDLRERLENLRKKPENIPQPISNTSRANLNKLLTDYTEMKKAILHVYWEEFQKDPVGLMSRVAQPASKKIDQNKLKPEMDEKGNLTTAGFACSQCGQPLFVYKLEQVSEKGKAYTNYFGRCNVAEHEKLILLAQLKPEKDSDEAVTYSLGKFGQRALDFYSIHVTKESTHPVKPLAQIAGNRYASSPVGKALSDACMGTIASFLSKYQDIIIEHQKVVKGNQKRLESLRELAGKENLEYPSVTLPPQPHTKEGLDAYNEVIARVRMWVNLNLWQKLKLSRDDAKPLLRLKGFPSFPLVERQANEVDWWDMVCNVKKLINEKKEDGKVFWQNLAGYKRQEALRPYLSSEEDRKKGKKFARYQLGDLLLHLEKKHGEDWGKVYDEAWERIDKKVEGLSKHIKLEEERRSEDAQSKAALTDWLRAKASFVIEGLKEADKDEFCRCELKLQKWYGDLRGKPFAIEAENSILDISGFSKQYNCAFIWQKDGVKKLNLYLIINYFKGGKLRFKKIKPEAFEANRFYTVINKKSGEIVPMEVNFNFDDPNLIILPLAFGKRQGREFIWNDLLSLETGSLKLANGRVIEKTLYNRRTRQDEPALFVALTFERREVLDSSNIKPMNLIGVDRGENIPAVIALTDPEGCPLSRFKDSLGNPTHILRIGESYKEKQRTIQAKKEVEQRRAGGYSRKYASKAKNLADDMVRNTARDLLYYAVTQDAMLIFENLSRGFGRQGKRTFMAERQYTRMEDWLTAKLAYEGLPSKTYLSKTLAQYTSKTCSNCGFTITSADYDRMLEKLKKTATGWMTTINGKELKVEGQITYYNRYKRQNVVKDLSVELDRLSEESVNNDISSWTKGRSGEALSLLKKRFSHRPVQEKFVCLNCGFETHADEQAALNIARSWLFLRSQEYKKYQTNKTTGNTDKRAFVETWQSFYRKKLKEVWKPAV

SEQ ID NO: 35956 - protein, 978 aa, synthetic construct
  REGION 1..978: note = engineered CasX variant
QEIKRINKIRRRLVKDSNTKKAGKTGPMKTLLVRVMTPDLRERLENLRKKPENIPQPISNTSRANLNKLLTDYTEMKKAILHVYWEEFQKDPVGLMSRVAQPASKKIDQNKLKPEMDEKGNLTTAGFACSQCGQPLFVYKLEQVSEKGKAYTNYFGRCNVAEHEKLILLAQLKPEKDSDEAVTYSLGKFGQRALDFYSIHVTKESTHPVKPLAQIAGNRYASTPVGKALSDACMGTIASFLSKYQDIIIEHQKVVKGNQKRLESLRELAGKENLEYPSVTLPPQPHTKEGLDAYNEVIARVRMWVNLNLWQKLKLSRDDAKPLLRLKGFPSFPLVERQANEVDWWDMVCNVKKLINEKKEDGKVFWQNLAGYKRQEALRPYLSSEEDRKKGKKFARYQLGDLLLHLEKKHGEDWGKVYDEAWERIDKKVEGLSKHIKLEEERRSEDAQSKAALTDWLRAKASFVIEGLKEADKDEFCRCELKLQKWYGDLRGKPFAIEAENSILDISGFSKQYNCAFIWQKDGVKKLNLYLIINYFKGGKLRFKKIKPEAFEANRFYTVINKKSGEIVPMEVNFNFDDPNLIILPLAFGKRQGREFIWNDLLSLETGSLKLANGRVIEKTLYNRRTRQDEPALFVALTFERREVLDSSNIKPMNLIGVDRGENIPAVIALTDPEGCPLSRFKDSLGNPTHILRIGESYKEKQRTIQAKKEVEQRRAGGYSRKYASKAKNLADDMVRNTARDLLYYAVTQDAMLIFENLSRGFGRQGKRTFMAERQYTRMEDWLTAKLAYEGLPSKTYLSKTLAQYTSKTCSNCGFTITSADYDRMLEKLKKTATGWMTTINGKELKVEGQITYYNRYKRQNVVKDLSVELDRLSEESVNNDISSWTKGRSGEALSLLKKRFSHRPVQEKFVCLNCGFETHADEQAALNIARSWLFLRSQEYKKYQTNKTTGNTDKRAFVETWQSFYRKKLKEVWKPAV

SEQ ID NO: 35957 - protein, 978 aa, synthetic construct
  REGION 1..978: note = engineered CasX variant
QEIKRINKIRRRLVKDSNTKKAGKTGPMKTLLVRVMTPDLRERLENLRKKPENIPQPISNTSRANLNKLLTDYTEMKKAILHVYWEEFQKDPVGLMSRVAQPASKKIDQNKLKPEMDEKGNLTTAGFACSQCGQPLFVYKLEQVSEKGKAYTNYFGRCNVAEHEKLILLAQLKPEKDSDEAVTYSLGKFGQRALDFYSIHVTKESTHPVKPLAQIAGNRYASAPVGKALSDACMGTIASFLSKYQDIIIEHQKVVKGNQKRLESLRELAGKENLEYPSVTLPPQPHTKEGLDAYNEVIARVRMWVNLNLWQKLKLSRDDAKPLLRLKGFPSFPLVERQANEVDWWDMVCNVKKLINEKKEDGKVFWQNLAGYKRQEALRPYLSSEEDRKKGKKFARYQLGDLLLHLEKKHGEDWGKVYDEAWERIDKKVEGLSKHIKLEEERRSEDAQSKAALTDWLRAKASFVIEGLKEADKDEFCRCELKLQKWYGDLRGKPFAIEAENSILDISGFSKQYNCAFIWQKDGVKKLNLYLIINYFKGGKLRFKKIKPEAFEANRFYTVINKKSGEIVPMEVNFNFDDPNLIILPLAFGKRQGREFIWNDLLSLETGSLKLANGRVIEKTLYNRRTRQDEPALFVALTFERREVLDSSNIKPMNLIGVDRGENIPAVIALTDPEGCPLSRFKDSLGNPTHILRIGESYKEKQRTIQAKKEVEQRRAGGYSRKYASKAKNLADDMVRNTARDLLYYAVTQDAMLIFENLSRGFGRQGKRTFMAERQYTRMEDWLTAKLAYEGLPSKTYLSKTLAQYTSKTCSNCGFTITSADYDRMLEKLKKTATGWMTTINGKELKVEGQITYYNRYKRQNVVKDLSVELDRLSEESVNNDISSWTKGRSGEALSLLKKRFSHRPVQEKFVCLNCGFETHADEQAALNIARSWLFLRSQEYKKYQTNKTTGNTDKRAFVETWQSFYRKKLKEVWKPAV

SEQ ID NO: 35958 - protein, 978 aa, synthetic construct
  REGION 1..978: note = engineered CasX variant
QEIKRINKIRRRLVKDSNTKKAGKTGPMKTLLVRVMTPDLRERLENLRKKPENIPQPISNTSRANLNKLLTDYTEMKKAILHVYWEEFQKDPVGLMSRVAQPASKKIDQNKLKPEMDEKGNLTTAGFACSQCGQPLFVYKLEQVSEKGKAYTNYFGRCNVAEHEKLILLAQLKPEKDSDEAVTYSLGKFGQRALDFYSIHVTKESTHPVKPLAQIAGNRYASVPVGKALSDACMGTIASFLSKYQDIIIEHQKVVKGNQKRLESLRELAGKENLEYPSVTLPPQPHTKEGLDAYNEVIARVRMWVNLNLWQKLKLSRDDAKPLLRLKGFPSFPLVERQANEVDWWDMVCNVKKLINEKKEDGKVFWQNLAGYKRQEALRPYLSSEEDRKKGKKFARYQLGDLLLHLEKKHGEDWGKVYDEAWERIDKKVEGLSKHIKLEEERRSEDAQSKAALTDWLRAKASFVIEGLKEADKDEFCRCELKLQKWYGDLRGKPFAIEAENSILDISGFSKQYNCAFIWQKDGVKKLNLYLIINYFKGGKLRFKKIKPEAFEANRFYTVINKKSGEIVPMEVNFNFDDPNLIILPLAFGKRQGREFIWNDLLSLETGSLKLANGRVIEKTLYNRRTRQDEPALFVALTFERREVLDSSNIKPMNLIGVDRGENIPAVIALTDPEGCPLSRFKDSLGNPTHILRIGESYKEKQRTIQAKKEVEQRRAGGYSRKYASKAKNLADDMVRNTARDLLYYAVTQDAMLIFENLSRGFGRQGKRTFMAERQYTRMEDWLTAKLAYEGLPSKTYLSKTLAQYTSKTCSNCGFTITSADYDRMLEKLKKTATGWMTTINGKELKVEGQITYYNRYKRQNVVKDLSVELDRLSEESVNNDISSWTKGRSGEALSLLKKRFSHRPVQEKFVCLNCGFETHADEQAALNIARSWLFLRSQEYKKYQTNKTTGNTDKRAFVETWQSFYRKKLKEVWKPAV

SEQ ID NO: 35959 - protein, 978 aa, synthetic construct
  REGION 1..978: note = engineered CasX variant
QEIKRINKIRRRLVKDSNTKKAGKTGPMKTLLVRVMTPDLRERLENLRKKPENIPQPISNTSRANLNKLLTDYTEMKKAILHVYWEEFQKDPVGLMSRVAQPASKKIDQNKLKPEMDEKGNLTTAGFACSQCGQPLFVYKLEQVSEKGKAYTNYFGRCNVAEHEKLIKLAQLKPEKDSDEAVTYSLGKFGQRALDFYSIHVTKESTHPVKPLAQIAGNRYASGPVGKALSDACMGTIASFLSKYQDIIIEHQKVVKGNQKRLESLRELAGKENLEYPSVTLPPQPHTKEGLDAYNEVIARVRMWVNLNLWQKLKLSRDDAKPLLRLKGFPSFPLVERQANEVDWWDMVCNVKKLINEKKEDGKVFWQNLAGYKRQEALRPYLSSEEDRKKGKKFARYQLGDLLLHLEKKHGEDWGKVYDEAWERIDKKVEGLSKHIKLEEERRSEDAQSKAALTDWLRAKASFVIEGLKEADKDEFCRCELKLQKWYGDLRGKPFAIEAENSILDISGFSKQYNCAFIWQKDGVKKLNLYLIINYFKGGKLRFKKIKPEAFEANRFYTVINKKSGEIVPMEVNFNFDDPNLIILPLAFGKRQGREFIWNDLLSLETGSLKLANGRVIEKTLYNRRTRQDEPALFVALTFERREVLDSSNIKPMNLIGVDRGENIPAVIALTDPEGCPLSRFKDSLGNPTHILRIGESYKEKQRTIQAKKEVEQRRAGGYSRKYASKAKNLADDMVRNTARDLLYYAVTQDAMLIFENLSRGFGRQGKRTFMAERQYTRMEDWLTAKLAYEGLPSKTYLSKTLAQYTSKTCSNCGFTITSADYDRMLEKLKKTATGWMTTINGKELKVEGQITYYNRYKRQNVVKDLSVELDRLSEESVNNDISSWTKGRSGEALSLLKKRFSHRPVQEKFVCLNCGFETHADEQAALNIARSWLFLRSQEYKKYQTNKTTGNTDKRAFVETWQSFYRKKLKEVWKPAV

SEQ ID NO: 35960 - protein, 977 aa, synthetic construct
  REGION 1..977: note = engineered CasX variant
QEIKRINKIRRRLVKDSNTKKAGKTGPMKTLLVRVMTPDLRERLENLRKKPENIPQPISNTSRANLNKLLTDYTEMKKAILHVYWEEFQKDPVGLMSRVAQPASKKIDQNKLKPEMDEKGNLTTAGFACSQCGQPLFVYKLEQVSEKGKAYTNYFGRCNVAEHEKLILLAQLKPEKDSDEAVTYSLGKFGQRALDFYSIHVTKESTHPVKPLAQIAGNRYASPVGKALSDACMGTIASFLSKYQDIIIEHQKVVKGNQKRLESLRELAGKENLEYPSVTLPPQPHTKEGLDAYNEVIARVRMWVNLNLWQKLKLSRDDAKPLLRLKGFPSFPLVERQANEVDWWDMVCNVKKLINEKKEDGKVFWQNLAGYKRQEALRPYLSSEEDRKKGKKFARYQLGDLLLHLEKKHGEDWGKVYDEAWERIDKKVEGLSKHIKLEEERRSEDAQSKAALTDWLRAKASFVIEGLKEADKDEFCRCELKLQKWYGDLRGKPFAIEAENSILDISGFSKQYNCAFIWQKDGVKKLNLYLIINYFKGGKLRFKKIKPEAFEANRFYTVINKKSGEIVPMEVNFNFDDPNLIILPLAFGKRQGREFIWNDLLSLETGSLKLANGRVIEKTLYNRRTRQDEPALFVALTFERREVLDSSNIKPMNLIGVDRGENIPAVIALTDPEGCPLSRFKDSLGNPTHILRIGESYKEKQRTIQAKKEVEQRRAGGYSRKYASKAKNLADDMVRNTARDLLYYAVTQDAMLIFENLSRGFGRQGKRTFMAERQYTRMEDWLTAKLAYEGLPSKTYLSKTLAQYTSKTCSNCGFTITSADYDRMLEKLKKTATGWMTTINGKELKVEGQITYYNRYKRQNVVKDLSVELDRLSEESVNNDISSWTKGRSGEALSLLKKRFSHRPVQEKFVCLNCGFETHADEQAALNIARSWLFLRSQEYKKYQTNKTTGNTDKRAFVETWQSFYRKKLKEVWKPAV

SEQ ID NO: 35961 - protein, 978 aa, synthetic construct
  REGION 1..978: note = engineered CasX variant
QEIKRINKIRRRLVKDSNTKKAGKTGPMKTLLVRVMTPDLRERLENLRKKPENIPQPISNTSRANLNKLLTDYTEMKKAILHVYWEEFQKDPVGLMSRVAQPASKKIDQNKLKPEMDEKGNLTTAGFACSQCGQPLFVYKLEQVSEKGKAYTNYFGRCNVAEHEKLILLAQLKPEKDSDEAVTYSLGKFGQRALDFYSIHVTKESTHPVKPLAQIAGNRYASYPVGKALSDACMGTIASFLSKYQDIIIEHQKVVKGNQKRLESLRELAGKENLEYPSVTLPPQPHTKEGLDAYNEVIARVRMWVNLNLWQKLKLSRDDAKPLLRLKGFPSFPLVERQANEVDWWDMVCNVKKLINEKKEDGKVFWQNLAGYKRQEALRPYLSSEEDRKKGKKFARYQLGDLLLHLEKKHGEDWGKVYDEAWERIDKKVEGLSKHIKLEEERRSEDAQSKAALTDWLRAKASFVIEGLKEADKDEFCRCELKLQKWYGDLRGKPFAIEAENSILDISGFSKQYNCAFIWQKDGVKKLNLYLIINYFKGGKLRFKKIKPEAFEANRFYTVINKKSGEIVPMEVNFNFDDPNLIILPLAFGKRQGREFIWNDLLSLETGSLKLANGRVIEKTLYNRRTRQDEPALFVALTFERREVLDSSNIKPMNLIGVDRGENIPAVIALTDPEGCPLSRFKDSLGNPTHILRIGESYKEKQRTIQAKKEVEQRRAGGYSRKYASKAKNLADDMVRNTARDLLYYAVTQDAMLIFENLSRGFGRQGKRTFMAERQYTRMEDWLTAKLAYEGLPSKTYLSKTLAQYTSKTCSNCGFTITSADYDRVLEKLKKTATGWMTTINGKELKVEGQITYYNRYKRQNVVKDLSVELDRLSEESVNNDISSWTKGRQGEALSLLKKRFSHRPVQEKFVCLNCGFETHADEQAALNIARSWLFLRSQEYKKYQTNKTTGNTDKRAFVETWQSFYRKKLKEVWKPAV

SEQ ID NO: 35962 - protein, 978 aa, synthetic construct
  REGION 1..978: note = engineered CasX variant
QEIKRINKIRRRLVKDSNTKKAGKTGPMKTLLVRVMTPDLRERLENLRKKPENIPQPISNTSRANLNKLLTDYTEMKKAILHVYWEEFQKDPVGLMSRVAQPASKKIDQNKLKPEMDEKGNLTTAGFACSQCGQPLFVYKLEQVSEKGKAYTNYFGRCNVAEHEKLILLAQLKPEKDSDEAVTYSLGKFGQRALDFYSIHVTKESTHPVKPLAQIAGNRYASHPVGKALSDACMGTIASFLSKYQDIIIEHQKVVKGNQKRLESLRELAGKENLEYPSVTLPPQPHTKEGLDAYNEVIARVRMWVNLNLWQKLKLSRDDAKPLLRLKGFPSFPLVERQANEVDWWDMVCNVKKLINEKKEDGKVFWQNLAGYKRQEALRPYLSSEEDRKKGKKFARYQLGDLLLHLEKKHGEDWGKVYDEAWERIDKKVEGLSKHIKLEEERRSEDAQSKAALTDWLRAKASFVIEGLKEADKDEFCRCELKLQKWYGDLRGKPFAIEAENSILDISGFSKQYNCAFIWQKDGVKKLNLYLIINYFKGGKLRFKKIKPEAFEANRFYTVINKKSGEIVPMEVNFNFDDPNLIILPLAFGKRQGREFIWNDLLSLETGSLKLANGRVIEKTLYNRRTRQDEPALFVALTFERREVLDSSNIKPMNLIGVDRGENIPAVIALTDPEGCPLSRFKDSLGNPTHILRIGESYKEKQRTIQAKKEVEQRRAGGYSRKYASKAKNLADDMVRNTARDLLYYAVTQDAMLIFENLSRGFGRQGKRTFMAERQYTRMEDWLTAKLAYEGLPSKTYLSKTLAQYTSKTCSNCGFTITSADYDRVLEKLKKTATGWMTTINGKELKVEGQITYYNRYKRQNVVKDLSVELDRLSEESVNNDISSWTKGRQGEALSLLKKRFSHRPVQEKFVCLNCGFETHADEQAALNIARSWLFLRSQEYKKYQTNKTTGNTDKRAFVETWQSFYRKKLKEVWKPAV

SEQ ID NO: 35963 - protein, 978 aa, synthetic construct
  REGION 1..978: note = engineered CasX variant
QEIKRINKIRRRLVKDSNTKKAGKTGPMKTLLVRVMTPDLRERLENLRKKPENIPQPISNTSRANLNKLLTDYTEMKKAILHVYWEEFQKDPVGLMSRVAQPASKKIDQNKLKPEMDEKGNLTTAGFACSQCGQPLFVYKLEQVSEKGKAYTNYFGRCNVAEHEKLILLAQLKPEKDSDEAVTYSLGKFGQRALDFYSIHVTKESTHPVKPLAQIAGNRYASSPVGKALSDACMGTIASFLSKYQDIIIEHQKVVKGNQKRLESLRELAGKENLEYPSVTLPPQPHTKEGLDAYNEVIARVRMWVNLNLWQKLKLSRDDAKPLLRLKGFPSFPLVERQANEVDWWDMVCNVKKLINEKKEDGKVFWQNLAGYKRQEALRPYLSSEEDRKKGKKFARYQLGDLLLHLEKKHGEDWGKVYDEAWERIDKKVEGLSKHIKLEEERRSEDAQSKAALTDWLRAKASFVIEGLKEADKDEFCRCELKLQKWYGDLRGKPFAIEAENSILDISGFSKQYNCAFIWQKDGVKKLNLYLIINYFKGGKLRFKKIKPEAFEANRFYTVINKKSGEIVPMEVNFNFDDPNLIILPLAFGKRQGREFIWNDLLSLETGSLKLANGRVIEKTLYNRRTRQDEPALFVALTFERREVLDSSNIKPMNLIGVDRGENIPAVIALTDPEGCPLSRFKDSLGNPTHILRIGESYKEKQRTIQAKKEVEQRRAGGYSRKYASKAKNLADDMVRNTARDLLYYAVTQDAMLIFENLSRGFGRQGKRTFMAERQYTRMEDWLTAKLAYEGLPSKTYLSKTLAQYTSKTCSNCGFTITSADYDRVLEKLKKTATGWMTTINGKELKVEGQITYYNRYKRQNVVKDLSVELDRLSEESVNNDISSWTKGRQGEALSLLKKRFSHRPVQEKFVCLNCGFETHADEQAALNIARSWLFLRSQEYKKYQTNKTTGNTDKRAFVETWQSFYRKKLKEVWKPAV

SEQ ID NO: 35964 - protein, 978 aa, synthetic construct
  REGION 1..978: note = engineered CasX variant
QEIKRINKIRRRLVKDSNTKKAGKTGPMKTLLVRVMTPDLRERLENLRKKPENIPQPISNTSRANLNKLLTDYTEMKKAILHVYWEEFQKDPVGLMSRVAQPASKKIDQNKLKPEMDEKGNLTTAGFACSQCGQPLFVYKLEQVSEKGKAYTNYFGRCNVAEHEKLILLAQLKPEKDSDEAVTYSLGKFGQRALDFYSIHVTKESTHPVKPLAQIAGNRYASTPVGKALSDACMGTIASFLSKYQDIIIEHQKVVKGNQKRLESLRELAGKENLEYPSVTLPPQPHTKEGLDAYNEVIARVRMWVNLNLWQKLKLSRDDAKPLLRLKGFPSFPLVERQANEVDWWDMVCNVKKLINEKKEDGKVFWQNLAGYKRQEALRPYLSSEEDRKKGKKFARYQLGDLLLHLEKKHGEDWGKVYDEAWERIDKKVEGLSKHIKLEEERRSEDAQSKAALTDWLRAKASFVIEGLKEADKDEFCRCELKLQKWYGDLRGKPFAIEAENSILDISGFSKQYNCAFIWQKDGVKKLNLYLIINYFKGGKLRFKKIKPEAFEANRFYTVINKKSGEIVPMEVNFNFDDPNLIILPLAFGKRQGREFIWNDLLSLETGSLKLANGRVIEKTLYNRRTRQDEPALFVALTFERREVLDSSNIKPMNLIGVDRGENIPAVIALTDPEGCPLSRFKDSLGNPTHILRIGESYKEKQRTIQAKKEVEQRRAGGYSRKYASKAKNLADDMVRNTARDLLYYAVTQDAMLIFENLSRGFGRQGKRTFMAERQYTRMEDWLTAKLAYEGLPSKTYLSKTLAQYTSKTCSNCGFTITSADYDRVLEKLKKTATGWMTTINGKELKVEGQITYYNRYKRQNVVKDLSVELDRLSEESVNNDISSWTKGRQGEALSLLKKRFSHRPVQEKFVCLNCGFETHADEQAALNIARSWLFLRSQEYKKYQTNKTTGNTDKRAFVETWQSFYRKKLKEVWKPAV

SEQ ID NO: 35965 - protein, 978 aa, synthetic construct
  REGION 1..978: note = engineered CasX variant
QEIKRINKIRRRLVKDSNTKKAGKTGPMKTLLVRVMTPDLRERLENLRKKPENIPQPISNTSRANLNKLLTDYTEMKKAILHVYWEEFQKDPVGLMSRVAQPASKKIDQNKLKPEMDEKGNLTTAGFACSQCGQPLFVYKLEQVSEKGKAYTNYFGRCNVAEHEKLILLAQLKPEKDSDEAVTYSLGKFGQRALDFYSIHVTKESTHPVKPLAQIAGNRYASAPVGKALSDACMGTIASFLSKYQDIIIEHQKVVKGNQKRLESLRELAGKENLEYPSVTLPPQPHTKEGLDAYNEVIARVRMWVNLNLWQKLKLSRDDAKPLLRLKGFPSFPLVERQANEVDWWDMVCNVKKLINEKKEDGKVFWQNLAGYKRQEALRPYLSSEEDRKKGKKFARYQLGDLLLHLEKKHGEDWGKVYDEAWERIDKKVEGLSKHIKLEEERRSEDAQSKAALTDWLRAKASFVIEGLKEADKDEFCRCELKLQKWYGDLRGKPFAIEAENSILDISGFSKQYNCAFIWQKDGVKKLNLYLIINYFKGGKLRFKKIKPEAFEANRFYTVINKKSGEIVPMEVNFNFDDPNLIILPLAFGKRQGREFIWNDLLSLETGSLKLANGRVIEKTLYNRRTRQDEPALFVALTFERREVLDSSNIKPMNLIGVDRGENIPAVIALTDPEGCPLSRFKDSLGNPTHILRIGESYKEKQRTIQAKKEVEQRRAGGYSRKYASKAKNLADDMVRNTARDLLYYAVTQDAMLIFENLSRGFGRQGKRTFMAERQYTRMEDWLTAKLAYEGLPSKTYLSKTLAQYTSKTCSNCGFTITSADYDRVLEKLKKTATGWMTTINGKELKVEGQITYYNRYKRQNVVKDLSVELDRLSEESVNNDISSWTKGRQGEALSLLKKRFSHRPVQEKFVCLNCGFETHADEQAALNIARSWLFLRSQEYKKYQTNKTTGNTDKRAFVETWQSFYRKKLKEVWKPAV

SEQ ID NO: 35966 - protein, 978 aa, synthetic construct
  REGION 1..978: note = engineered CasX variant
QEIKRINKIRRRLVKDSNTKKAGKTGPMKTLLVRVMTPDLRERLENLRKKPENIPQPISNTSRANLNKLLTDYTEMKKAILHVYWEEFQKDPVGLMSRVAQPASKKIDQNKLKPEMDEKGNLTTAGFACSQCGQPLFVYKLEQVSEKGKAYTNYFGRCNVAEHEKLILLAQLKPEKDSDEAVTYSLGKFGQRALDFYSIHVTKESTHPVKPLAQIAGNRYASVPVGKALSDACMGTIASFLSKYQDIIIEHQKVVKGNQKRLESLRELAGKENLEYPSVTLPPQPHTKEGLDAYNEVIARVRMWVNLNLWQKLKLSRDDAKPLLRLKGFPSFPLVERQANEVDWWDMVCNVKKLINEKKEDGKVFWQNLAGYKRQEALRPYLSSEEDRKKGKKFARYQLGDLLLHLEKKHGEDWGKVYDEAWERIDKKVEGLSKHIKLEEERRSEDAQSKAALTDWLRAKASFVIEGLKEADKDEFCRCELKLQKWYGDLRGKPFAIEAENSILDISGFSKQYNCAFIWQKDGVKKLNLYLIINYFKGGKLRFKKIKPEAFEANRFYTVINKKSGEIVPMEVNFNFDDPNLIILPLAFGKRQGREFIWNDLLSLETGSLKLANGRVIEKTLYNRRTRQDEPALFVALTFERREVLDSSNIKPMNLIGVDRGENIPAVIALTDPEGCPLSRFKDSLGNPTHILRIGESYKEKQRTIQAKKEVEQRRAGGYSRKYASKAKNLADDMVRNTARDLLYYAVTQDAMLIFENLSRGFGRQGKRTFMAERQYTRMEDWLTAKLAYEGLPSKTYLSKTLAQYTSKTCSNCGFTITSADYDRVLEKLKKTATGWMTTINGKELKVEGQITYYNRYKRQNVVKDLSVELDRLSEESVNNDISSWTKGRQGEALSLLKKRFSHRPVQEKFVCLNCGFETHADEQAALNIARSWLFLRSQEYKKYQTNKTTGNTDKRAFVETWQSFYRKKLKEVWKPAV

SEQ ID NO: 35967 - protein, 978 aa, synthetic construct
  REGION 1..978: note = engineered CasX variant
QEIKRINKIRRRLVKDSNTKKAGKTGPMKTLLVRVMTPDLRERLENLRKKPENIPQPISNTSRANLNKLLTDYTEMKKAILHVYWEEFQKDPVGLMSRVAQPASKKIDQNKLKPEMDEKGNLTTAGFACSQCGQPLFVYKLEQVSEKGKAYTNYFGRCNVAEHEKLIKLAQLKPEKDSDEAVTYSLGKFGQRALDFYSIHVTKESTHPVKPLAQIAGNRYASGPVGKALSDACMGTIASFLSKYQDIIIEHQKVVKGNQKRLESLRELAGKENLEYPSVTLPPQPHTKEGLDAYNEVIARVRMWVNLNLWQKLKLSRDDAKPLLRLKGFPSFPLVERQANEVDWWDMVCNVKKLINEKKEDGKVFWQNLAGYKRQEALRPYLSSEEDRKKGKKFARYQLGDLLLHLEKKHGEDWGKVYDEAWERIDKKVEGLSKHIKLEEERRSEDAQSKAALTDWLRAKASFVIEGLKEADKDEFCRCELKLQKWYGDLRGKPFAIEAENSILDISGFSKQYNCAFIWQKDGVKKLNLYLIINYFKGGKLRFKKIKPEAFEANRFYTVINKKSGEIVPMEVNFNFDDPNLIILPLAFGKRQGREFIWNDLLSLETGSLKLANGRVIEKTLYNRRTRQDEPALFVALTFERREVLDSSNIKPMNLIGVDRGENIPAVIALTDPEGCPLSRFKDSLGNPTHILRIGESYKEKQRTIQAKKEVEQRRAGGYSRKYASKAKNLADDMVRNTARDLLYYAVTQDAMLIFENLSRGFGRQGKRTFMAERQYTRMEDWLTAKLAYEGLPSKTYLSKTLAQYTSKTCSNCGFTITSADYDRVLEKLKKTATGWMTTINGKELKVEGQITYYNRYKRQNVVKDLSVELDRLSEESVNNDISSWTKGRQGEALSLLKKRFSHRPVQEKFVCLNCGFETHADEQAALNIARSWLFLRSQEYKKYQTNKTTGNTDKRAFVETWQSFYRKKLKEVWKPAV

SEQ ID NO: 35968 - protein, 977 aa, synthetic construct
  REGION 1..977: note = engineered CasX variant
QEIKRINKIRRRLVKDSNTKKAGKTGPMKTLLVRVMTPDLRERLENLRKKPENIPQPISNTSRANLNKLLTDYTEMKKAILHVYWEEFQKDPVGLMSRVAQPASKKIDQNKLKPEMDEKGNLTTAGFACSQCGQPLFVYKLEQVSEKGKAYTNYFGRCNVAEHEKLILLAQLKPEKDSDEAVTYSLGKFGQRALDFYSIHVTKESTHPVKPLAQIAGNRYASPVGKALSDACMGTIASFLSKYQDIIIEHQKVVKGNQKRLESLRELAGKENLEYPSVTLPPQPHTKEGLDAYNEVIARVRMWVNLNLWQKLKLSRDDAKPLLRLKGFPSFPLVERQANEVDWWDMVCNVKKLINEKKEDGKVFWQNLAGYKRQEALRPYLSSEEDRKKGKKFARYQLGDLLLHLEKKHGEDWGKVYDEAWERIDKKVEGLSKHIKLEEERRSEDAQSKAALTDWLRAKASFVIEGLKEADKDEFCRCELKLQKWYGDLRGKPFAIEAENSILDISGFSKQYNCAFIWQKDGVKKLNLYLIINYFKGGKLRFKKIKPEAFEANRFYTVINKKSGEIVPMEVNFNFDDPNLIILPLAFGKRQGREFIWNDLLSLETGSLKLANGRVIEKTLYNRRTRQDEPALFVALTFERREVLDSSNIKPMNLIGVDRGENIPAVIALTDPEGCPLSRFKDSLGNPTHILRIGESYKEKQRTIQAKKEVEQRRAGGYSRKYASKAKNLADDMVRNTARDLLYYAVTQDAMLIFENLSRGFGRQGKRTFMAERQYTRMEDWLTAKLAYEGLPSKTYLSKTLAQYTSKTCSNCGFTITSADYDRVLEKLKKTATGWMTTINGKELKVEGQITYYNRYKRQNVVKDLSVELDRLSEESVNNDISSWTKGRQGEALSLLKKRFSHRPVQEKFVCLNCGFETHADEQAALNIARSWLFLRSQEYKKYQTNKTTGNTDKRAFVETWQSFYRKKLKEVWKPAV

SEQ ID NO: 35969 - protein, 978 aa, synthetic construct
  REGION 1..978: note = engineered CasX variant
QEIKRINKIRRRLVKDSNTKKAGKTGPMKTLLVRVMTPDLRERLENLRKKPENIPQPISNTSRANLNKLLTDYTEMKKAILHVYWEEFQKDPVGLMSRVAQPASKKIDQNKLKPEMDEKGNLTTAGFACSQCGQPLFVYKLEQVSEKGKAYTNYFGRCNVAEHEKLILLAQLKPEKDSDEAVTYSLGKFGQRALDFYSIHVTKESTHPVKPLAQIAGNRYASYPVGKALSDACMGTIASFLSKYQDIIIEHQKVVKGNQKRLESLRELAGKENLEYPSVTLPPQPHTKEGLDAYNEVIARVRMWVNLNLWQKLKLSRDDAKPLLRLKGFPSFPLVERQANEVDWWDMVCNVKKLINEKKEDGKVFWQNLAGYKRQEALRPYLSSEEDRKKGKKFARYQLGDLLLHLEKKHGEDWGKVYDEAWERIDKKVEGLSKHIKLEEERRSEDAQSKAALTDWLRAKASFVIEGLKEADKDEFCRCELKLQKWYGDLRGKPFAIEAENSILDISGFSKQYNCAFIWQKDGVKKLNLYLIINYFKGGKLRFKKIKPEAFEANRFYTVINKKSGEIVPMEVNFNFDDPNLIILPLAFGKRQGREFIWNDLLSLETGSLKLANGRVIEKTLYNRRTRQDEPALFVALTFERREVLDSSNIKPMNLIGVDRGENIPAVIALTDPEGCPLSRFKDSLGNPTHILRIGESYKEKQRTIQAKKEVEQRRAGGYSRKYASKAKNLADDMVRNTARDLLYYAVTQDAMLIFENLSRGFGRQGKRTFMAERQYTRMEDWLTAKLAYEGLPSKTYLSKTLAQYTSKTCSNCGFTITSADYDRVLEKLKKTATGWMTTINGKELKVEGQITYYNRYKRQNVVKDLSVELDRLSEESVNNDISSWTKGRSGEALSLLKKRFSHRPVQEKFVCLNCEFETHADEQAALNIARSWLFLRSQEYKKYQTNKTTGNTDKRAFVETWQSFYRKKLKEVWKPAV

SEQ ID NO: 35970 - protein, 978 aa, synthetic construct
  REGION 1..978: note = engineered CasX variant
QEIKRINKIRRRLVKDSNTKKAGKTGPMKTLLVRVMTPDLRERLENLRKKPENIPQPISNTSRANLNKLLTDYTEMKKAILHVYWEEFQKDPVGLMSRVAQPASKKIDQNKLKPEMDEKGNLTTAGFACSQCGQPLFVYKLEQVSEKGKAYTNYFGRCNVAEHEKLILLAQLKPEKDSDEAVTYSLGKFGQRALDFYSIHVTKESTHPVKPLAQIAGNRYASHPVGKALSDACMGTIASFLSKYQDIIIEHQKVVKGNQKRLESLRELAGKENLEYPSVTLPPQPHTKEGLDAYNEVIARVRMWVNLNLWQKLKLSRDDAKPLLRLKGFPSFPLVERQANEVDWWDMVCNVKKLINEKKEDGKVFWQNLAGYKRQEALRPYLSSEEDRKKGKKFARYQLGDLLLHLEKKHGEDWGKVYDEAWERIDKKVEGLSKHIKLEEERRSEDAQSKAALTDWLRAKASFVIEGLKEADKDEFCRCELKLQKWYGDLRGKPFAIEAENSILDISGFSKQYNCAFIWQKDGVKKLNLYLIINYFKGGKLRFKKIKPEAFEANRFYTVINKKSGEIVPMEVNFNFDDPNLIILPLAFGKRQGREFIWNDLLSLETGSLKLANGRVIEKTLYNRRTRQDEPALFVALTFERREVLDSSNIKPMNLIGVDRGENIPAVIALTDPEGCPLSRFKDSLGNPTHILRIGESYKEKQRTIQAKKEVEQRRAGGYSRKYASKAKNLADDMVRNTARDLLYYAVTQDAMLIFENLSRGFGRQGKRTFMAERQYTRMEDWLTAKLAYEGLPSKTYLSKTLAQYTSKTCSNCGFTITSADYDRVLEKLKKTATGWMTTINGKELKVEGQITYYNRYKRQNVVKDLSVELDRLSEESVNNDISSWTKGRSGEALSLLKKRFSHRPVQEKFVCLNCEFETHADEQAALNIARSWLFLRSQEYKKYQTNKTTGNTDKRAFVETWQSFYRKKLKEVWKPAV

SEQ ID NO: 35971 - protein, 978 aa, synthetic construct
  REGION 1..978: note = engineered CasX variant
QEIKRINKIRRRLVKDSNTKKAGKTGPMKTLLVRVMTPDLRERLENLRKKPENIPQPISNTSRANLNKLLTDYTEMKKAILHVYWEEFQKDPVGLMSRVAQPASKKIDQNKLKPEMDEKGNLTTAGFACSQCGQPLFVYKLEQVSEKGKAYTNYFGRCNVAEHEKLILLAQLKPEKDSDEAVTYSLGKFGQRALDFYSIHVTKESTHPVKPLAQIAGNRYASSPVGKALSDACMGTIASFLSKYQDIIIEHQKVVKGNQKRLESLRELAGKENLEYPSVTLPPQPHTKEGLDAYNEVIARVRMWVNLNLWQKLKLSRDDAKPLLRLKGFPSFPLVERQANEVDWWDMVCNVKKLINEKKEDGKVFWQNLAGYKRQEALRPYLSSEEDRKKGKKFARYQLGDLLLHLEKKHGEDWGKVYDEAWERIDKKVEGLSKHIKLEEERRSEDAQSKAALTDWLRAKASFVIEGLKEADKDEFCRCELKLQKWYGDLRGKPFAIEAENSILDISGFSKQYNCAFIWQKDGVKKLNLYLIINYFKGGKLRFKKIKPEAFEANRFYTVINKKSGEIVPMEVNFNFDDPNLIILPLAFGKRQGREFIWNDLLSLETGSLKLANGRVIEKTLYNRRTRQDEPALFVALTFERREVLDSSNIKPMNLIGVDRGENIPAVIALTDPEGCPLSRFKDSLGNPTHILRIGESYKEKQRTIQAKKEVEQRRAGGYSRKYASKAKNLADDMVRNTARDLLYYAVTQDAMLIFENLSRGFGRQGKRTFMAERQYTRMEDWLTAKLAYEGLPSKTYLSKTLAQYTSKTCSNCGFTITSADYDRVLEKLKKTATGWMTTINGKELKVEGQITYYNRYKRQNVVKDLSVELDRLSEESVNNDISSWTKGRSGEALSLLKKRFSHRPVQEKFVCLNCEFETHADEQAALNIARSWLFLRSQEYKKYQTNKTTGNTDKRAFVETWQSFYRKKLKEVWKPAV

SEQ ID NO: 35972 - protein, 978 aa, synthetic construct
  REGION 1..978: note = engineered CasX variant
QEIKRINKIRRRLVKDSNTKKAGKTGPMKTLLVRVMTPDLRERLENLRKKPENIPQPISNTSRANLNKLLTDYTEMKKAILHVYWEEFQKDPVGLMSRVAQPASKKIDQNKLKPEMDEKGNLTTAGFACSQCGQPLFVYKLEQVSEKGKAYTNYFGRCNVAEHEKLILLAQLKPEKDSDEAVTYSLGKFGQRALDFYSIHVTKESTHPVKPLAQIAGNRYASTPVGKALSDACMGTIASFLSKYQDIIIEHQKVVKGNQKRLESLRELAGKENLEYPSVTLPPQPHTKEGLDAYNEVIARVRMWVNLNLWQKLKLSRDDAKPLLRLKGFPSFPLVERQANEVDWWDMVCNVKKLINEKKEDGKVFWQNLAGYKRQEALRPYLSSEEDRKKGKKFARYQLGDLLLHLEKKHGEDWGKVYDEAWERIDKKVEGLSKHIKLEEERRSEDAQSKAALTDWLRAKASFVIEGLKEADKDEFCRCELKLQKWYGDLRGKPFAIEAENSILDISGFSKQYNCAFIWQKDGVKKLNLYLIINYFKGGKLRFKKIKPEAFEANRFYTVINKKSGEIVPMEVNFNFDDPNLIILPLAFGKRQGREFIWNDLLSLETGSLKLANGRVIEKTLYNRRTRQDEPALFVALTFERREVLDSSNIKPMNLIGVDRGENIPAVIALTDPEGCPLSRFKDSLGNPTHILRIGESYKEKQRTIQAKKEVEQRRAGGYSRKYASKAKNLADDMVRNTARDLLYYAVTQDAMLIFENLSRGFGRQGKRTFMAERQYTRMEDWLTAKLAYEGLPSKTYLSKTLAQYTSKTCSNCGFTITSADYDRVLEKLKKTATGWMTTINGKELKVEGQITYYNRYKRQNVVKDLSVELDRLSEESVNNDISSWTKGRSGEALSLLKKRFSHRPVQEKFVCLNCEFETHADEQAALNIARSWLFLRSQEYKKYQTNKTTGNTDKRAFVETWQSFYRKKLKEVWKPAV

SEQ ID NO: 35973 - protein, 978 aa, synthetic construct
  REGION 1..978: note = engineered CasX variant
QEIKRINKIRRRLVKDSNTKKAGKTGPMKTLLVRVMTPDLRERLENLRKKPENIPQPISNTSRANLNKLLTDYTEMKKAILHVYWEEFQKDPVGLMSRVAQPASKKIDQNKLKPEMDEKGNLTTAGFACSQCGQPLFVYKLEQVSEKGKAYTNYFGRCNVAEHEKLILLAQLKPEKDSDEAVTYSLGKFGQRALDFYSIHVTKESTHPVKPLAQIAGNRYASAPVGKALSDACMGTIASFLSKYQDIIIEHQKVVKGNQKRLESLRELAGKENLEYPSVTLPPQPHTKEGLDAYNEVIARVRMWVNLNLWQKLKLSRDDAKPLLRLKGFPSFPLVERQANEVDWWDMVCNVKKLINEKKEDGKVFWQNLAGYKRQEALRPYLSSEEDRKKGKKFARYQLGDLLLHLEKKHGEDWGKVYDEAWERIDKKVEGLSKHIKLEEERRSEDAQSKAALTDWLRAKASFVIEGLKEADKDEFCRCELKLQKWYGDLRGKPFAIEAENSILDISGFSKQYNCAFIWQKDGVKKLNLYLIINYFKGGKLRFKKIKPEAFEANRFYTVINKKSGEIVPMEVNFNFDDPNLIILPLAFGKRQGREFIWNDLLSLETGSLKLANGRVIEKTLYNRRTRQDEPALFVALTFERREVLDSSNIKPMNLIGVDRGENIPAVIALTDPEGCPLSRFKDSLGNPTHILRIGESYKEKQRTIQAKKEVEQRRAGGYSRKYASKAKNLADDMVRNTARDLLYYAVTQDAMLIFENLSRGFGRQGKRTFMAERQYTRMEDWLTAKLAYEGLPSKTYLSKTLAQYTSKTCSNCGFTITSADYDRVLEKLKKTATGWMTTINGKELKVEGQITYYNRYKRQNVVKDLSVELDRLSEESVNNDISSWTKGRSGEALSLLKKRFSHRPVQEKFVCLNCEFETHADEQAALNIARSWLFLRSQEYKKYQTNKTTGNTDKRAFVETWQSFYRKKLKEVWKPAV

SEQ ID NO: 35974 - protein, 978 aa, synthetic construct
  REGION 1..978: note = engineered CasX variant
QEIKRINKIRRRLVKDSNTKKAGKTGPMKTLLVRVMTPDLRERLENLRKKPENIPQPISNTSRANLNKLLTDYTEMKKAILHVYWEEFQKDPVGLMSRVAQPASKKIDQNKLKPEMDEKGNLTTAGFACSQCGQPLFVYKLEQVSEKGKAYTNYFGRCNVAEHEKLILLAQLKPEKDSDEAVTYSLGKFGQRALDFYSIHVTKESTHPVKPLAQIAGNRYASVPVGKALSDACMGTIASFLSKYQDIIIEHQKVVKGNQKRLESLRELAGKENLEYPSVTLPPQPHTKEGLDAYNEVIARVRMWVNLNLWQKLKLSRDDAKPLLRLKGFPSFPLVERQANEVDWWDMVCNVKKLINEKKEDGKVFWQNLAGYKRQEALRPYLSSEEDRKKGKKFARYQLGDLLLHLEKKHGEDWGKVYDEAWERIDKKVEGLSKHIKLEEERRSEDAQSKAALTDWLRAKASFVIEGLKEADKDEFCRCELKLQKWYGDLRGKPFAIEAENSILDISGFSKQYNCAFIWQKDGVKKLNLYLIINYFKGGKLRFKKIKPEAFEANRFYTVINKKSGEIVPMEVNFNFDDPNLIILPLAFGKRQGREFIWNDLLSLETGSLKLANGRVIEKTLYNRRTRQDEPALFVALTFERREVLDSSNIKPMNLIGVDRGENIPAVIALTDPEGCPLSRFKDSLGNPTHILRIGESYKEKQRTIQAKKEVEQRRAGGYSRKYASKAKNLADDMVRNTARDLLYYAVTQDAMLIFENLSRGFGRQGKRTFMAERQYTRMEDWLTAKLAYEGLPSKTYLSKTLAQYTSKTCSNCGFTITSADYDRVLEKLKKTATGWMTTINGKELKVEGQITYYNRYKRQNVVKDLSVELDRLSEESVNNDISSWTKGRSGEALSLLKKRFSHRPVQEKFVCLNCEFETHADEQAALNIARSWLFLRSQEYKKYQTNKTTGNTDKRAFVETWQSFYRKKLKEVWKPAV

SEQ ID NO: 35975 - protein, 978 aa, synthetic construct
  REGION 1..978: note = engineered CasX variant
QEIKRINKIRRRLVKDSNTKKAGKTGPMKTLLVRVMTPDLRERLENLRKKPENIPQPISNTSRANLNKLLTDYTEMKKAILHVYWEEFQKDPVGLMSRVAQPASKKIDQNKLKPEMDEKGNLTTAGFACSQCGQPLFVYKLEQVSEKGKAYTNYFGRCNVAEHEKLIKLAQLKPEKDSDEAVTYSLGKFGQRALDFYSIHVTKESTHPVKPLAQIAGNRYASGPVGKALSDACMGTIASFLSKYQDIIIEHQKVVKGNQKRLESLRELAGKENLEYPSVTLPPQPHTKEGLDAYNEVIARVRMWVNLNLWQKLKLSRDDAKPLLRLKGFPSFPLVERQANEVDWWDMVCNVKKLINEKKEDGKVFWQNLAGYKRQEALRPYLSSEEDRKKGKKFARYQLGDLLLHLEKKHGEDWGKVYDEAWERIDKKVEGLSKHIKLEEERRSEDAQSKAALTDWLRAKASFVIEGLKEADKDEFCRCELKLQKWYGDLRGKPFAIEAENSILDISGFSKQYNCAFIWQKDGVKKLNLYLIINYFKGGKLRFKKIKPEAFEANRFYTVINKKSGEIVPMEVNFNFDDPNLIILPLAFGKRQGREFIWNDLLSLETGSLKLANGRVIEKTLYNRRTRQDEPALFVALTFERREVLDSSNIKPMNLIGVDRGENIPAVIALTDPEGCPLSRFKDSLGNPTHILRIGESYKEKQRTIQAKKEVEQRRAGGYSRKYASKAKNLADDMVRNTARDLLYYAVTQDAMLIFENLSRGFGRQGKRTFMAERQYTRMEDWLTAKLAYEGLPSKTYLSKTLAQYTSKTCSNCGFTITSADYDRVLEKLKKTATGWMTTINGKELKVEGQITYYNRYKRQNVVKDLSVELDRLSEESVNNDISSWTKGRSGEALSLLKKRFSHRPVQEKFVCLNCEFETHADEQAALNIARSWLFLRSQEYKKYQTNKTTGNTDKRAFVETWQSFYRKKLKEVWKPAV

SEQ ID NO: 35976 - protein, 977 aa, synthetic construct
  REGION 1..977: note = engineered CasX variant
QEIKRINKIRRRLVKDSNTKKAGKTGPMKTLLVRVMTPDLRERLENLRKKPENIPQPISNTSRANLNKLLTDYTEMKKAILHVYWEEFQKDPVGLMSRVAQPASKKIDQNKLKPEMDEKGNLTTAGFACSQCGQPLFVYKLEQVSEKGKAYTNYFGRCNVAEHEKLILLAQLKPEKDSDEAVTYSLGKFGQRALDFYSIHVTKESTHPVKPLAQIAGNRYASPVGKALSDACMGTIASFLSKYQDIIIEHQKVVKGNQKRLESLRELAGKENLEYPSVTLPPQPHTKEGLDAYNEVIARVRMWVNLNLWQKLKLSRDDAKPLLRLKGFPSFPLVERQANEVDWWDMVCNVKKLINEKKEDGKVFWQNLAGYKRQEALRPYLSSEEDRKKGKKFARYQLGDLLLHLEKKHGEDWGKVYDEAWERIDKKVEGLSKHIKLEEERRSEDAQSKAALTDWLRAKASFVIEGLKEADKDEFCRCELKLQKWYGDLRGKPFAIEAENSILDISGFSKQYNCAFIWQKDGVKKLNLYLIINYFKGGKLRFKKIKPEAFEANRFYTVINKKSGEIVPMEVNFNFDDPNLIILPLAFGKRQGREFIWNDLLSLETGSLKLANGRVIEKTLYNRRTRQDEPALFVALTFERREVLDSSNIKPMNLIGVDRGENIPAVIALTDPEGCPLSRFKDSLGNPTHILRIGESYKEKQRTIQAKKEVEQRRAGGYSRKYASKAKNLADDMVRNTARDLLYYAVTQDAMLIFENLSRGFGRQGKRTFMAERQYTRMEDWLTAKLAYEGLPSKTYLSKTLAQYTSKTCSNCGFTITSADYDRVLEKLKKTATGWMTTINGKELKVEGQITYYNRYKRQNVVKDLSVELDRLSEESVNNDISSWTKGRSGEALSLLKKRFSHRPVQEKFVCLNCEFETHADEQAALNIARSWLFLRSQEYKKYQTNKTTGNTDKRAFVETWQSFYRKKLKEVWKPAV

SEQ ID NO: 35977 - protein, 979 aa, synthetic construct
  REGION 1..979: note = engineered CasX variant
QEIKRINKIRRRLVKDSNTKKAGKTGPMKTLLVRVMTPDLRERLENLRKKPENIPQPISNTSRANLNKLLTDYTEMKKAILHVYWEEFQKDPVGLMSRVAQPASKKIDQNKLKPEMDEKGNLTTAGFACSQCGQPLFVYKLEQVSEKGKAYTNYFGRCNVAEHEKLILLAQLKPEKDSDEAVTYSLGKFGQRALDFYSIHVTKESTHPVKPLAQIAGNRYASYPVGKALSDACMGTIASFLSKYQDIIIEHQKVVKGNQKRLESLRELAGKENLEYPSVTLPPQPHTKEGLDAYNEVIARVRMWVNLNLWQKLKLSRDDAKPLLRLKGFPSFPLVERQANEVDWWDMVCNVKKLINEKKEDGKVFWQNLAGYKRQEALRPYLSSEEDRKKGKKFARYQLGDLLLHLEKKHGEDWGKVYDEAWERIDKKVEGLSKHIKLEEERRSEDAQSKAALTDWLRAKASFVIEGLKEADKDEFCRCELKLQKWYGDLRGKPFAIEAENSILDISGFSKQYNCAFIWQKDGVKKLNLYLIINYFKGGKLRFKKIKPEAFEANRFYTVINKKSGEIVPMEVNFNFDDPNLIILPLAFGKRQGREFIWNDLLSLETGSLKLANGRVIEKTLYNRRTRQDEPALFVALTFERREVLDSSNIKPMNLIGVDRGENIPAVIALTDPEGCPLSRFKDSLGNPTHILRIGESYKEKQRTIQAKKEVEQRRAGGYSRKYASKAKNLADDMVRNTARDLLYYAVTQDAMLIFENLSRGFGRQGKRTFMAERQYTRMEDWLTAKLAYEGLPSKTYLSKTLAQYTSKTCSNCGFTITSADYDRVLEKLKKTATGWMTTINGKELKVEGQITYYNRYKRQNVVKDLSVELDRLSEESVNNDISSWTKGRSGEALSLLKKRFSHRPVQEKFVCLNCGFETHADEQAALNIARSWLFLRSQEYKKYQTNKTSTGNTDKRAFVETWQSFYRKKLKEVWKPAV

SEQ ID NO: 35978 - protein, 979 aa, synthetic construct
  REGION 1..979: note = engineered CasX variant
QEIKRINKIRRRLVKDSNTKKAGKTGPMKTLLVRVMTPDLRERLENLRKKPENIPQPISNTSRANLNKLLTDYTEMKKAILHVYWEEFQKDPVGLMSRVAQPASKKIDQNKLKPEMDEKGNLTTAGFACSQCGQPLFVYKLEQVSEKGKAYTNYFGRCNVAEHEKLILLAQLKPEKDSDEAVTYSLGKFGQRALDFYSIHVTKESTHPVKPLAQIAGNRYASHPVGKALSDACMGTIASFLSKYQDIIIEHQKVVKGNQKRLESLRELAGKENLEYPSVTLPPQPHTKEGLDAYNEVIARVRMWVNLNLWQKLKLSRDDAKPLLRLKGFPSFPLVERQANEVDWWDMVCNVKKLINEKKEDGKVFWQNLAGYKRQEALRPYLSSEEDRKKGKKFARYQLGDLLLHLEKKHGEDWGKVYDEAWERIDKKVEGLSKHIKLEEERRSEDAQSKAALTDWLRAKASFVIEGLKEADKDEFCRCELKLQKWYGDLRGKPFAIEAENSILDISGFSKQYNCAFIWQKDGVKKLNLYLIINYFKGGKLRFKKIKPEAFEANRFYTVINKKSGEIVPMEVNFNFDDPNLIILPLAFGKRQGREFIWNDLLSLETGSLKLANGRVIEKTLYNRRTRQDEPALFVALTFERREVLDSSNIKPMNLIGVDRGENIPAVIALTDPEGCPLSRFKDSLGNPTHILRIGESYKEKQRTIQAKKEVEQRRAGGYSRKYASKAKNLADDMVRNTARDLLYYAVTQDAMLIFENLSRGFGRQGKRTFMAERQYTRMEDWLTAKLAYEGLPSKTYLSKTLAQYTSKTCSNCGFTITSADYDRVLEKLKKTATGWMTTINGKELKVEGQITYYNRYKRQNVVKDLSVELDRLSEESVNNDISSWTKGRSGEALSLLKKRFSHRPVQEKFVCLNCGFETHADEQAALNIARSWLFLRSQEYKKYQTNKTSTGNTDKRAFVETWQSFYRKKLKEVWKPAV

SEQ ID NO: 35979 - protein, 979 aa, synthetic construct
  REGION 1..979: note = engineered CasX variant
QEIKRINKIRRRLVKDSNTKKAGKTGPMKTLLVRVMTPDLRERLENLRKKPENIPQPISNTSRANLNKLLTDYTEMKKAILHVYWEEFQKDPVGLMSRVAQPASKKIDQNKLKPEMDEKGNLTTAGFACSQCGQPLFVYKLEQVSEKGKAYTNYFGRCNVAEHEKLILLAQLKPEKDSDEAVTYSLGKFGQRALDFYSIHVTKESTHPVKPLAQIAGNRYASSPVGKALSDACMGTIASFLSKYQDIIIEHQKVVKGNQKRLESLRELAGKENLEYPSVTLPPQPHTKEGLDAYNEVIARVRMWVNLNLWQKLKLSRDDAKPLLRLKGFPSFPLVERQANEVDWWDMVCNVKKLINEKKEDGKVFWQNLAGYKRQEALRPYLSSEEDRKKGKKFARYQLGDLLLHLEKKHGEDWGKVYDEAWERIDKKVEGLSKHIKLEEERRSEDAQSKAALTDWLRAKASFVIEGLKEADKDEFCRCELKLQKWYGDLRGKPFAIEAENSILDISGFSKQYNCAFIWQKDGVKKLNLYLIINYFKGGKLRFKKIKPEAFEANRFYTVINKKSGEIVPMEVNFNFDDPNLIILPLAFGKRQGREFIWNDLLSLETGSLKLANGRVIEKTLYNRRTRQDEPALFVALTFERREVLDSSNIKPMNLIGVDRGENIPAVIALTDPEGCPLSRFKDSLGNPTHILRIGESYKEKQRTIQAKKEVEQRRAGGYSRKYASKAKNLADDMVRNTARDLLYYAVTQDAMLIFENLSRGFGRQGKRTFMAERQYTRMEDWLTAKLAYEGLPSKTYLSKTLAQYTSKTCSNCGFTITSADYDRVLEKLKKTATGWMTTINGKELKVEGQITYYNRYKRQNVVKDLSVELDRLSEESVNNDISSWTKGRSGEALSLLKKRFSHRPVQEKFVCLNCGFETHADEQAALNIARSWLFLRSQEYKKYQTNKTSTGNTDKRAFVETWQSFYRKKLKEVWKPAV

SEQ ID NO: 35980 - protein, 979 aa, synthetic construct
  REGION 1..979: note = engineered CasX variant
QEIKRINKIRRRLVKDSNTKKAGKTGPMKTLLVRVMTPDLRERLENLRKKPENIPQPISNTSRANLNKLLTDYTEMKKAILHVYWEEFQKDPVGLMSRVAQPASKKIDQNKLKPEMDEKGNLTTAGFACSQCGQPLFVYKLEQVSEKGKAYTNYFGRCNVAEHEKLILLAQLKPEKDSDEAVTYSLGKFGQRALDFYSIHVTKESTHPVKPLAQIAGNRYASTPVGKALSDACMGTIASFLSKYQDIIIEHQKVVKGNQKRLESLRELAGKENLEYPSVTLPPQPHTKEGLDAYNEVIARVRMWVNLNLWQKLKLSRDDAKPLLRLKGFPSFPLVERQANEVDWWDMVCNVKKLINEKKEDGKVFWQNLAGYKRQEALRPYLSSEEDRKKGKKFARYQLGDLLLHLEKKHGEDWGKVYDEAWERIDKKVEGLSKHIKLEEERRSEDAQSKAALTDWLRAKASFVIEGLKEADKDEFCRCELKLQKWYGDLRGKPFAIEAENSILDISGFSKQYNCAFIWQKDGVKKLNLYLIINYFKGGKLRFKKIKPEAFEANRFYTVINKKSGEIVPMEVNFNFDDPNLIILPLAFGKRQGREFIWNDLLSLETGSLKLANGRVIEKTLYNRRTRQDEPALFVALTFERREVLDSSNIKPMNLIGVDRGENIPAVIALTDPEGCPLSRFKDSLGNPTHILRIGESYKEKQRTIQAKKEVEQRRAGGYSRKYASKAKNLADDMVRNTARDLLYYAVTQDAMLIFENLSRGFGRQGKRTFMAERQYTRMEDWLTAKLAYEGLPSKTYLSKTLAQYTSKTCSNCGFTITSADYDRVLEKLKKTATGWMTTINGKELKVEGQITYYNRYKRQNVVKDLSVELDRLSEESVNNDISSWTKGRSGEALSLLKKRFSHRPVQEKFVCLNCGFETHADEQAALNIARSWLFLRSQEYKKYQTNKTSTGNTDKRAFVETWQSFYRKKLKEVWKPAV

SEQ ID NO: 35981 - protein, 979 aa, synthetic construct
  REGION 1..979: note = engineered CasX variant
QEIKRINKIRRRLVKDSNTKKAGKTGPMKTLLVRVMTPDLRERLENLRKKPENIPQPISNTSRANLNKLLTDYTEMKKAILHVYWEEFQKDPVGLMSRVAQPASKKIDQNKLKPEMDEKGNLTTAGFACSQCGQPLFVYKLEQVSEKGKAYTNYFGRCNVAEHEKLILLAQLKPEKDSDEAVTYSLGKFGQRALDFYSIHVTKESTHPVKPLAQIAGNRYASAPVGKALSDACMGTIASFLSKYQDIIIEHQKVVKGNQKRLESLRELAGKENLEYPSVTLPPQPHTKEGLDAYNEVIARVRMWVNLNLWQKLKLSRDDAKPLLRLKGFPSFPLVERQANEVDWWDMVCNVKKLINEKKEDGKVFWQNLAGYKRQEALRPYLSSEEDRKKGKKFARYQLGDLLLHLEKKHGEDWGKVYDEAWERIDKKVEGLSKHIKLEEERRSEDAQSKAALTDWLRAKASFVIEGLKEADKDEFCRCELKLQKWYGDLRGKPFAIEAENSILDISGFSKQYNCAFIWQKDGVKKLNLYLIINYFKGGKLRFKKIKPEAFEANRFYTVINKKSGEIVPMEVNFNFDDPNLIILPLAFGKRQGREFIWNDLLSLETGSLKLANGRVIEKTLYNRRTRQDEPALFVALTFERREVLDSSNIKPMNLIGVDRGENIPAVIALTDPEGCPLSRFKDSLGNPTHILRIGESYKEKQRTIQAKKEVEQRRAGGYSRKYASKAKNLADDMVRNTARDLLYYAVTQDAMLIFENLSRGFGRQGKRTFMAERQYTRMEDWLTAKLAYEGLPSKTYLSKTLAQYTSKTCSNCGFTITSADYDRVLEKLKKTATGWMTTINGKELKVEGQITYYNRYKRQNVVKDLSVELDRLSEESVNNDISSWTKGRSGEALSLLKKRFSHRPVQEKFVCLNCGFETHADEQAALNIARSWLFLRSQEYKKYQTNKTSTGNTDKRAFVETWQSFYRKKLKEVWKPAV

SEQ ID NO: 35982 - protein, 979 aa, synthetic construct
  REGION 1..979: note = engineered CasX variant
QEIKRINKIRRRLVKDSNTKKAGKTGPMKTLLVRVMTPDLRERLENLRKKPENIPQPISNTSRANLNKLLTDYTEMKKAILHVYWEEFQKDPVGLMSRVAQPASKKIDQNKLKPEMDEKGNLTTAGFACSQCGQPLFVYKLEQVSEKGKAYTNYFGRCNVAEHEKLILLAQLKPEKDSDEAVTYSLGKFGQRALDFYSIHVTKESTHPVKPLAQIAGNRYASVPVGKALSDACMGTIASFLSKYQDIIIEHQKVVKGNQKRLESLRELAGKENLEYPSVTLPPQPHTKEGLDAYNEVIARVRMWVNLNLWQKLKLSRDDAKPLLRLKGFPSFPLVERQANEVDWWDMVCNVKKLINEKKEDGKVFWQNLAGYKRQEALRPYLSSEEDRKKGKKFARYQLGDLLLHLEKKHGEDWGKVYDEAWERIDKKVEGLSKHIKLEEERRSEDAQSKAALTDWLRAKASFVIEGLKEADKDEFCRCELKLQKWYGDLRGKPFAIEAENSILDISGFSKQYNCAFIWQKDGVKKLNLYLIINYFKGGKLRFKKIKPEAFEANRFYTVINKKSGEIVPMEVNFNFDDPNLIILPLAFGKRQGREFIWNDLLSLETGSLKLANGRVIEKTLYNRRTRQDEPALFVALTFERREVLDSSNIKPMNLIGVDRGENIPAVIALTDPEGCPLSRFKDSLGNPTHILRIGESYKEKQRTIQAKKEVEQRRAGGYSRKYASKAKNLADDMVRNTARDLLYYAVTQDAMLIFENLSRGFGRQGKRTFMAERQYTRMEDWLTAKLAYEGLPSKTYLSKTLAQYTSKTCSNCGFTITSADYDRVLEKLKKTATGWMTTINGKELKVEGQITYYNRYKRQNVVKDLSVELDRLSEESVNNDISSWTKGRSGEALSLLKKRFSHRPVQEKFVCLNCGFETHADEQAALNIARSWLFLRSQEYKKYQTNKTSTGNTDKRAFVETWQSFYRKKLKEVWKPAV

SEQ ID NO: 35983 - protein, 979 aa, synthetic construct
  REGION 1..979: note = engineered CasX variant
QEIKRINKIRRRLVKDSNTKKAGKTGPMKTLLVRVMTPDLRERLENLRKKPENIPQPISNTSRANLNKLLTDYTEMKKAILHVYWEEFQKDPVGLMSRVAQPASKKIDQNKLKPEMDEKGNLTTAGFACSQCGQPLFVYKLEQVSEKGKAYTNYFGRCNVAEHEKLIKLAQLKPEKDSDEAVTYSLGKFGQRALDFYSIHVTKESTHPVKPLAQIAGNRYASGPVGKALSDACMGTIASFLSKYQDIIIEHQKVVKGNQKRLESLRELAGKENLEYPSVTLPPQPHTKEGLDAYNEVIARVRMWVNLNLWQKLKLSRDDAKPLLRLKGFPSFPLVERQANEVDWWDMVCNVKKLINEKKEDGKVFWQNLAGYKRQEALRPYLSSEEDRKKGKKFARYQLGDLLLHLEKKHGEDWGKVYDEAWERIDKKVEGLSKHIKLEEERRSEDAQSKAALTDWLRAKASFVIEGLKEADKDEFCRCELKLQKWYGDLRGKPFAIEAENSILDISGFSKQYNCAFIWQKDGVKKLNLYLIINYFKGGKLRFKKIKPEAFEANRFYTVINKKSGEIVPMEVNFNFDDPNLIILPLAFGKRQGREFIWNDLLSLETGSLKLANGRVIEKTLYNRRTRQDEPALFVALTFERREVLDSSNIKPMNLIGVDRGENIPAVIALTDPEGCPLSRFKDSLGNPTHILRIGESYKEKQRTIQAKKEVEQRRAGGYSRKYASKAKNLADDMVRNTARDLLYYAVTQDAMLIFENLSRGFGRQGKRTFMAERQYTRMEDWLTAKLAYEGLPSKTYLSKTLAQYTSKTCSNCGFTITSADYDRVLEKLKKTATGWMTTINGKELKVEGQITYYNRYKRQNVVKDLSVELDRLSEESVNNDISSWTKGRSGEALSLLKKRFSHRPVQEKFVCLNCGFETHADEQAALNIARSWLFLRSQEYKKYQTNKTSTGNTDKRAFVETWQSFYRKKLKEVWKPAV

SEQ ID NO: 35984 - protein, 978 aa, synthetic construct
  REGION 1..978: note = engineered CasX variant
QEIKRINKIRRRLVKDSNTKKAGKTGPMKTLLVRVMTPDLRERLENLRKKPENIPQPISNTSRANLNKLLTDYTEMKKAILHVYWEEFQKDPVGLMSRVAQPASKKIDQNKLKPEMDEKGNLTTAGFACSQCGQPLFVYKLEQVSEKGKAYTNYFGRCNVAEHEKLILLAQLKPEKDSDEAVTYSLGKFGQRALDFYSIHVTKESTHPVKPLAQIAGNRYASPVGKALSDACMGTIASFLSKYQDIIIEHQKVVKGNQKRLESLRELAGKENLEYPSVTLPPQPHTKEGLDAYNEVIARVRMWVNLNLWQKLKLSRDDAKPLLRLKGFPSFPLVERQANEVDWWDMVCNVKKLINEKKEDGKVFWQNLAGYKRQEALRPYLSSEEDRKKGKKFARYQLGDLLLHLEKKHGEDWGKVYDEAWERIDKKVEGLSKHIKLEEERRSEDAQSKAALTDWLRAKASFVIEGLKEADKDEFCRCELKLQKWYGDLRGKPFAIEAENSILDISGFSKQYNCAFIWQKDGVKKLNLYLIINYFKGGKLRFKKIKPEAFEANRFYTVINKKSGEIVPMEVNFNFDDPNLIILPLAFGKRQGREFIWNDLLSLETGSLKLANGRVIEKTLYNRRTRQDEPALFVALTFERREVLDSSNIKPMNLIGVDRGENIPAVIALTDPEGCPLSRFKDSLGNPTHILRIGESYKEKQRTIQAKKEVEQRRAGGYSRKYASKAKNLADDMVRNTARDLLYYAVTQDAMLIFENLSRGFGRQGKRTFMAERQYTRMEDWLTAKLAYEGLPSKTYLSKTLAQYTSKTCSNCGFTITSADYDRVLEKLKKTATGWMTTINGKELKVEGQITYYNRYKRQNVVKDLSVELDRLSEESVNNDISSWTKGRSGEALSLLKKRFSHRPVQEKFVCLNCGFETHADEQAALNIARSWLFLRSQEYKKYQTNKTSTGNTDKRAFVETWQSFYRKKLKEVWKPAV

SEQ ID NO: 35985 - protein, 979 aa, synthetic construct
  REGION 1..979: note = engineered CasX variant
QEIKRINKIRRRLVKDSNTKKAGKTGPMKTLLVRVMTPDLRERLENLRKKPENIPQPISNTSRANLNKLLTDYTEMKKAILHVYWEEFQKDPVGLMSRVAQPASKKIDQNKLKPEMDEKGNLTTAGFACSQCGQPLFVYKLEQVSEKGKAYTNYFGRCNVAEHEKLILLAQLKPEKDSDEAVTYSLGKFGQRALDFYSIHVTKESTHPVKPLAQIAGNRYASYPVGKALSDACMGTIASFLSKYQDIIIEHQKVVKGNQKRLESLRELAGKENLEYPSVTLPPQPHTKEGLDAYNEVIARVRMWVNLNLWQKLKLSRDDAKPLLRLKGFPSFPLVERQANEVDWWDMVCNVKKLINEKKEDGKVFWQNLAGYKRQEALRPYLSSEEDRKKGKKFARYQLGDLLLHLEKKHGEDWGKVYDEAWERIDKKVEGLSKHIKLEEERRSEDAQSKAALTDWLRAKASFVIEGLKEADKDEFCRCELKLQKWYGDLRGKPFAIEAENSILDISGFSKQYNCAFIWQKDGVKKLNLYLIINYFKGGKLRFKKIKPEAFEANRFYTVINKKSGEIVPMEVNFNFDDPNLIILPLAFGKRQGREFIWNDLLSLETGSLKLANGRVIEKTLYNRRTRQDEPALFVALTFERREVLDSSNIKPMNLIGVDRGENIPAVIALTDPEGCPLSRFKDSLGNPTHILRIGESYKEKQRTIQAKKEVEQRRAGGYSRKYASKAKNLADDMVRNTARDLLYYAVTQDAMLIFENLSRGFGRQGKRTFMAERQYTRMEDWLTAKLAYEGLPSKTYLSKTLAQYTSKTCSNCGFTITSADYDRVLEKLKKTATGWMTTINGKELKVEGQITYYNRYKRQNVVKDLSVELDRLSEESVNNDISSWTKGRSGEALSLLKKRFSHRPVQEKFVCLNCGFETHADEQAALNIARSWLFLRSQEYKKYQTNKTTGKNTDKRAFVETWQSFYRKKLKEVWKPAV

SEQ ID NO: 35986 - protein, 979 aa, synthetic construct
  REGION 1..979: note = engineered CasX variant
QEIKRINKIRRRLVKDSNTKKAGKTGPMKTLLVRVMTPDLRERLENLRKKPENIPQPISNTSRANLNKLLTDYTEMKKAILHVYWEEFQKDPVGLMSRVAQPASKKIDQNKLKPEMDEKGNLTTAGFACSQCGQPLFVYKLEQVSEKGKAYTNYFGRCNVAEHEKLILLAQLKPEKDSDEAVTYSLGKFGQRALDFYSIHVTKESTHPVKPLAQIAGNRYASHPVGKALSDACMGTIASFLSKYQDIIIEHQKVVKGNQKRLESLRELAGKENLEYPSVTLPPQPHTKEGLDAYNEVIARVRMWVNLNLWQKLKLSRDDAKPLLRLKGFPSFPLVERQANEVDWWDMVCNVKKLINEKKEDGKVFWQNLAGYKRQEALRPYLSSEEDRKKGKKFARYQLGDLLLHLEKKHGEDWGKVYDEAWERIDKKVEGLSKHIKLEEERRSEDAQSKAALTDWLRAKASFVIEGLKEADKDEFCRCELKLQKWYGDLRGKPFAIEAENSILDISGFSKQYNCAFIWQKDGVKKLNLYLIINYFKGGKLRFKKIKPEAFEANRFYTVINKKSGEIVPMEVNFNFDDPNLIILPLAFGKRQGREFIWNDLLSLETGSLKLANGRVIEKTLYNRRTRQDEPALFVALTFERREVLDSSNIKPMNLIGVDRGENIPAVIALTDPEGCPLSRFKDSLGNPTHILRIGESYKEKQRTIQAKKEVEQRRAGGYSRKYASKAKNLADDMVRNTARDLLYYAVTQDAMLIFENLSRGFGRQGKRTFMAERQYTRMEDWLTAKLAYEGLPSKTYLSKTLAQYTSKTCSNCGFTITSADYDRVLEKLKKTATGWMTTINGKELKVEGQITYYNRYKRQNVVKDLSVELDRLSEESVNNDISSWTKGRSGEALSLLKKRFSHRPVQEKFVCLNCGFETHADEQAALNIARSWLFLRSQEYKKYQTNKTTGKNTDKRAFVETWQSFYRKKLKEVWKPAV

SEQ ID NO: 35987 - protein, 979 aa, synthetic construct
  REGION 1..979: note = engineered CasX variant
QEIKRINKIRRRLVKDSNTKKAGKTGPMKTLLVRVMTPDLRERLENLRKKPENIPQPISNTSRANLNKLLTDYTEMKKAILHVYWEEFQKDPVGLMSRVAQPASKKIDQNKLKPEMDEKGNLTTAGFACSQCGQPLFVYKLEQVSEKGKAYTNYFGRCNVAEHEKLILLAQLKPEKDSDEAVTYSLGKFGQRALDFYSIHVTKESTHPVKPLAQIAGNRYASSPVGKALSDACMGTIASFLSKYQDIIIEHQKVVKGNQKRLESLRELAGKENLEYPSVTLPPQPHTKEGLDAYNEVIARVRMWVNLNLWQKLKLSRDDAKPLLRLKGFPSFPLVERQANEVDWWDMVCNVKKLINEKKEDGKVFWQNLAGYKRQEALRPYLSSEEDRKKGKKFARYQLGDLLLHLEKKHGEDWGKVYDEAWERIDKKVEGLSKHIKLEEERRSEDAQSKAALTDWLRAKASFVIEGLKEADKDEFCRCELKLQKWYGDLRGKPFAIEAENSILDISGFSKQYNCAFIWQKDGVKKLNLYLIINYFKGGKLRFKKIKPEAFEANRFYTVINKKSGEIVPMEVNFNFDDPNLIILPLAFGKRQGREFIWNDLLSLETGSLKLANGRVIEKTLYNRRTRQDEPALFVALTFERREVLDSSNIKPMNLIGVDRGENIPAVIALTDPEGCPLSRFKDSLGNPTHILRIGESYKEKQRTIQAKKEVEQRRAGGYSRKYASKAKNLADDMVRNTARDLLYYAVTQDAMLIFENLSRGFGRQGKRTFMAERQYTRMEDWLTAKLAYEGLPSKTYLSKTLAQYTSKTCSNCGFTITSADYDRVLEKLKKTATGWMTTINGKELKVEGQITYYNRYKRQNVVKDLSVELDRLSEESVNNDISSWTKGRSGEALSLLKKRFSHRPVQEKFVCLNCGFETHADEQAALNIARSWLFLRSQEYKKYQTNKTTGKNTDKRAFVETWQSFYRKKLKEVWKPAV

SEQ ID NO: 35988 - protein, 979 aa, synthetic construct
  REGION 1..979: note = engineered CasX variant
QEIKRINKIRRRLVKDSNTKKAGKTGPMKTLLVRVMTPDLRERLENLRKKPENIPQPISNTSRANLNKLLTDYTEMKKAILHVYWEEFQKDPVGLMSRVAQPASKKIDQNKLKPEMDEKGNLTTAGFACSQCGQPLFVYKLEQVSEKGKAYTNYFGRCNVAEHEKLILLAQLKPEKDSDEAVTYSLGKFGQRALDFYSIHVTKESTHPVKPLAQIAGNRYASTPVGKALSDACMGTIASFLSKYQDIIIEHQKVVKGNQKRLESLRELAGKENLEYPSVTLPPQPHTKEGLDAYNEVIARVRMWVNLNLWQKLKLSRDDAKPLLRLKGFPSFPLVERQANEVDWWDMVCNVKKLINEKKEDGKVFWQNLAGYKRQEALRPYLSSEEDRKKGKKFARYQLGDLLLHLEKKHGEDWGKVYDEAWERIDKKVEGLSKHIKLEEERRSEDAQSKAALTDWLRAKASFVIEGLKEADKDEFCRCELKLQKWYGDLRGKPFAIEAENSILDISGFSKQYNCAFIWQKDGVKKLNLYLIINYFKGGKLRFKKIKPEAFEANRFYTVINKKSGEIVPMEVNFNFDDPNLIILPLAFGKRQGREFIWNDLLSLETGSLKLANGRVIEKTLYNRRTRQDEPALFVALTFERREVLDSSNIKPMNLIGVDRGENIPAVIALTDPEGCPLSRFKDSLGNPTHILRIGESYKEKQRTIQAKKEVEQRRAGGYSRKYASKAKNLADDMVRNTARDLLYYAVTQDAMLIFENLSRGFGRQGKRTFMAERQYTRMEDWLTAKLAYEGLPSKTYLSKTLAQYTSKTCSNCGFTITSADYDRVLEKLKKTATGWMTTINGKELKVEGQITYYNRYKRQNVVKDLSVELDRLSEESVNNDISSWTKGRSGEALSLLKKRFSHRPVQEKFVCLNCGFETHADEQAALNIARSWLFLRSQEYKKYQTNKTTGKNTDKRAFVETWQSFYRKKLKEVWKPAV

SEQ ID NO: 35989 - protein, 979 aa, synthetic construct
  REGION 1..979: note = engineered CasX variant
QEIKRINKIRRRLVKDSNTKKAGKTGPMKTLLVRVMTPDLRERLENLRKKPENIPQPISNTSRANLNKLLTDYTEMKKAILHVYWEEFQKDPVGLMSRVAQPASKKIDQNKLKPEMDEKGNLTTAGFACSQCGQPLFVYKLEQVSEKGKAYTNYFGRCNVAEHEKLILLAQLKPEKDSDEAVTYSLGKFGQRALDFYSIHVTKESTHPVKPLAQIAGNRYASAPVGKALSDACMGTIASFLSKYQDIIIEHQKVVKGNQKRLESLRELAGKENLEYPSVTLPPQPHTKEGLDAYNEVIARVRMWVNLNLWQKLKLSRDDAKPLLRLKGFPSFPLVERQANEVDWWDMVCNVKKLINEKKEDGKVFWQNLAGYKRQEALRPYLSSEEDRKKGKKFARYQLGDLLLHLEKKHGEDWGKVYDEAWERIDKKVEGLSKHIKLEEERRSEDAQSKAALTDWLRAKASFVIEGLKEADKDEFCRCELKLQKWYGDLRGKPFAIEAENSILDISGFSKQYNCAFIWQKDGVKKLNLYLIINYFKGGKLRFKKIKPEAFEANRFYTVINKKSGEIVPMEVNFNFDDPNLIILPLAFGKRQGREFIWNDLLSLETGSLKLANGRVIEKTLYNRRTRQDEPALFVALTFERREVLDSSNIKPMNLIGVDRGENIPAVIALTDPEGCPLSRFKDSLGNPTHILRIGESYKEKQRTIQAKKEVEQRRAGGYSRKYASKAKNLADDMVRNTARDLLYYAVTQDAMLIFENLSRGFGRQGKRTFMAERQYTRMEDWLTAKLAYEGLPSKTYLSKTLAQYTSKTCSNCGFTITSADYDRVLEKLKKTATGWMTTINGKELKVEGQITYYNRYKRQNVVKDLSVELDRLSEESVNNDISSWTKGRSGEALSLLKKRFSHRPVQEKFVCLNCGFETHADEQAALNIARSWLFLRSQEYKKYQTNKTTGKNTDKRAFVETWQSFYRKKLKEVWKPAV

SEQ ID NO: 35990 - protein, 979 aa, synthetic construct
  REGION 1..979: note = engineered CasX variant
QEIKRINKIRRRLVKDSNTKKAGKTGPMKTLLVRVMTPDLRERLENLRKKPENIPQPISNTSRANLNKLLTDYTEMKKAILHVYWEEFQKDPVGLMSRVAQPASKKIDQNKLKPEMDEKGNLTTAGFACSQCGQPLFVYKLEQVSEKGKAYTNYFGRCNVAEHEKLILLAQLKPEKDSDEAVTYSLGKFGQRALDFYSIHVTKESTHPVKPLAQIAGNRYASVPVGKALSDACMGTIASFLSKYQDIIIEHQKVVKGNQKRLESLRELAGKENLEYPSVTLPPQPHTKEGLDAYNEVIARVRMWVNLNLWQKLKLSRDDAKPLLRLKGFPSFPLVERQANEVDWWDMVCNVKKLINEKKEDGKVFWQNLAGYKRQEALRPYLSSEEDRKKGKKFARYQLGDLLLHLEKKHGEDWGKVYDEAWERIDKKVEGLSKHIKLEEERRSEDAQSKAALTDWLRAKASFVIEGLKEADKDEFCRCELKLQKWYGDLRGKPFAIEAENSILDISGFSKQYNCAFIWQKDGVKKLNLYLIINYFKGGKLRFKKIKPEAFEANRFYTVINKKSGEIVPMEVNFNFDDPNLIILPLAFGKRQGREFIWNDLLSLETGSLKLANGRVIEKTLYNRRTRQDEPALFVALTFERREVLDSSNIKPMNLIGVDRGENIPAVIALTDPEGCPLSRFKDSLGNPTHILRIGESYKEKQRTIQAKKEVEQRRAGGYSRKYASKAKNLADDMVRNTARDLLYYAVTQDAMLIFENLSRGFGRQGKRTFMAERQYTRMEDWLTAKLAYEGLPSKTYLSKTLAQYTSKTCSNCGFTITSADYDRVLEKLKKTATGWMTTINGKELKVEGQITYYNRYKRQNVVKDLSVELDRLSEESVNNDISSWTKGRSGEALSLLKKRFSHRPVQEKFVCLNCGFETHADEQAALNIARSWLFLRSQEYKKYQTNKTTGKNTDKRAFVETWQSFYRKKLKEVWKPAV

SEQ ID NO: 35991 - protein, 979 aa, synthetic construct
  REGION 1..979: note = engineered CasX variant
QEIKRINKIRRRLVKDSNTKKAGKTGPMKTLLVRVMTPDLRERLENLRKKPENIPQPISNTSRANLNKLLTDYTEMKKAILHVYWEEFQKDPVGLMSRVAQPASKKIDQNKLKPEMDEKGNLTTAGFACSQCGQPLFVYKLEQVSEKGKAYTNYFGRCNVAEHEKLIKLAQLKPEKDSDEAVTYSLGKFGQRALDFYSIHVTKESTHPVKPLAQIAGNRYASGPVGKALSDACMGTIASFLSKYQDIIIEHQKVVKGNQKRLESLRELAGKENLEYPSVTLPPQPHTKEGLDAYNEVIARVRMWVNLNLWQKLKLSRDDAKPLLRLKGFPSFPLVERQANEVDWWDMVCNVKKLINEKKEDGKVFWQNLAGYKRQEALRPYLSSEEDRKKGKKFARYQLGDLLLHLEKKHGEDWGKVYDEAWERIDKKVEGLSKHIKLEEERRSEDAQSKAALTDWLRAKASFVIEGLKEADKDEFCRCELKLQKWYGDLRGKPFAIEAENSILDISGFSKQYNCAFIWQKDGVKKLNLYLIINYFKGGKLRFKKIKPEAFEANRFYTVINKKSGEIVPMEVNFNFDDPNLIILPLAFGKRQGREFIWNDLLSLETGSLKLANGRVIEKTLYNRRTRQDEPALFVALTFERREVLDSSNIKPMNLIGVDRGENIPAVIALTDPEGCPLSRFKDSLGNPTHILRIGESYKEKQRTIQAKKEVEQRRAGGYSRKYASKAKNLADDMVRNTARDLLYYAVTQDAMLIFENLSRGFGRQGKRTFMAERQYTRMEDWLTAKLAYEGLPSKTYLSKTLAQYTSKTCSNCGFTITSADYDRVLEKLKKTATGWMTTINGKELKVEGQITYYNRYKRQNVVKDLSVELDRLSEESVNNDISSWTKGRSGEALSLLKKRFSHRPVQEKFVCLNCGFETHADEQAALNIARSWLFLRSQEYKKYQTNKTTGKNTDKRAFVETWQSFYRKKLKEVWKPAV

SEQ ID NO: 35992 - protein, 978 aa, synthetic construct
  REGION 1..978: note = engineered CasX variant
QEIKRINKIRRRLVKDSNTKKAGKTGPMKTLLVRVMTPDLRERLENLRKKPENIPQPISNTSRANLNKLLTDYTEMKKAILHVYWEEFQKDPVGLMSRVAQPASKKIDQNKLKPEMDEKGNLTTAGFACSQCGQPLFVYKLEQVSEKGKAYTNYFGRCNVAEHEKLILLAQLKPEKDSDEAVTYSLGKFGQRALDFYSIHVTKESTHPVKPLAQIAGNRYASPVGKALSDACMGTIASFLSKYQDIIIEHQKVVKGNQKRLESLRELAGKENLEYPSVTLPPQPHTKEGLDAYNEVIARVRMWVNLNLWQKLKLSRDDAKPLLRLKGFPSFPLVERQANEVDWWDMVCNVKKLINEKKEDGKVFWQNLAGYKRQEALRPYLSSEEDRKKGKKFARYQLGDLLLHLEKKHGEDWGKVYDEAWERIDKKVEGLSKHIKLEEERRSEDAQSKAALTDWLRAKASFVIEGLKEADKDEFCRCELKLQKWYGDLRGKPFAIEAENSILDISGFSKQYNCAFIWQKDGVKKLNLYLIINYFKGGKLRFKKIKPEAFEANRFYTVINKKSGEIVPMEVNFNFDDPNLIILPLAFGKRQGREFIWNDLLSLETGSLKLANGRVIEKTLYNRRTRQDEPALFVALTFERREVLDSSNIKPMNLIGVDRGENIPAVIALTDPEGCPLSRFKDSLGNPTHILRIGESYKEKQRTIQAKKEVEQRRAGGYSRKYASKAKNLADDMVRNTARDLLYYAVTQDAMLIFENLSRGFGRQGKRTFMAERQYTRMEDWLTAKLAYEGLPSKTYLSKTLAQYTSKTCSNCGFTITSADYDRVLEKLKKTATGWMTTINGKELKVEGQITYYNRYKRQNVVKDLSVELDRLSEESVNNDISSWTKGRSGEALSLLKKRFSHRPVQEKFVCLNCGFETHADEQAALNIARSWLFLRSQEYKKYQTNKTTGKNTDKRAFVETWQSFYRKKLKEVWKPAV

SEQ ID NO: 35993 - protein, 978 aa, synthetic construct
  REGION 1..978: note = engineered CasX variant
QEIKRINKIRRRLVKDSNTKKAGKTGPMKTLLVRVMTPDLRERLENLRKKPENIPQPISNTSRANLNKLLTDYTEMKKAILHVYWEEFQKDPVGLMSRVAQPASKKIDQNKLKPEMDEKGNLTTAGFACSQCGQPLFVYKLEQVSEKGKAYTNYFGRCNVAEHEKLILLAQLKPEKDSDEAVTYSLGKFGQRALDFYSIHVTKESTHPVKPLAQIAGNRYASYPVGKALSDACMGTIASFLSKYQDIIIEHQKVVKGNQKRLESLRELAGKENLEYPSVTLPPQPHTKEGLDAYNEVIARVRMWVNLNLWQKLKLSRDDAKPLLRLKKFPSFPLVERQANEVDWWDMVCNVKKLINEKKEDGKVFWQNLAGYKRQEALRPYLSSEEDRKKGKKFARYQLGDLLLHLEKKHGEDWGKVYDEAWERIDKKVEGLSKHIKLEEERRSEDAQSKAALTDWLRAKASFVIEGLKEADKDEFCRCELKLQKWYGDLRGKPFAIEAENSILDISGFSKQYNCAFIWQKDGVKKLNLYLIINYFKGGKLRFKKIKPEAFEANRFYTVINKKSGEIVPMEVNFNFDDPNLIILPLAFGKRQGREFIWNDLLSLETGSLKLANGRVIEKTLYNRRTRQDEPALFVALTFERREVLDSSNIKPMNLIGVDRGENIPAVIALTDPEGCPLSRFKDSLGNPTHILRIGESYKEKQRTIQAKKEVEQRRAGGYSRKYASKAKNLADDMVRNTARDLLYYAVTQDAMLIFENLSRGFGRQGKRTFMAERQYTRMEDWLTAKLAYEGLPSKTYLSKTLAQYTSKTCSNCGFTITSADYDRVLEKLKKTATGWMTTINGKELKVEGQITYYNRYKRQNVVKDLSVELDRLSEESVNNDISSWTKGRSGEALSLLKKRFSHRPVQEKFVCLNCGFETHADEQAALNIARSWLFLRSQEYKKYQTNKTTGNTDKRAFVETWQSFYRKKLKEVWKPAV

SEQ ID NO: 35994 - protein, 978 aa, synthetic construct
  REGION 1..978: note = engineered CasX variant
QEIKRINKIRRRLVKDSNTKKAGKTGPMKTLLVRVMTPDLRERLENLRKKPENIPQPISNTSRANLNKLLTDYTEMKKAILHVYWEEFQKDPVGLMSRVAQPASKKIDQNKLKPEMDEKGNLTTAGFACSQCGQPLFVYKLEQVSEKGKAYTNYFGRCNVAEHEKLILLAQLKPEKDSDEAVTYSLGKFGQRALDFYSIHVTKESTHPVKPLAQIAGNRYASHPVGKALSDACMGTIASFLSKYQDIIIEHQKVVKGNQKRLESLRELAGKENLEYPSVTLPPQPHTKEGLDAYNEVIARVRMWVNLNLWQKLKLSRDDAKPLLRLKKFPSFPLVERQANEVDWWDMVCNVKKLINEKKEDGKVFWQNLAGYKRQEALRPYLSSEEDRKKGKKFARYQLGDLLLHLEKKHGEDWGKVYDEAWERIDKKVEGLSKHIKLEEERRSEDAQSKAALTDWLRAKASFVIEGLKEADKDEFCRCELKLQKWYGDLRGKPFAIEAENSILDISGFSKQYNCAFIWQKDGVKKLNLYLIINYFKGGKLRFKKIKPEAFEANRFYTVINKKSGEIVPMEVNFNFDDPNLIILPLAFGKRQGREFIWNDLLSLETGSLKLANGRVIEKTLYNRRTRQDEPALFVALTFERREVLDSSNIKPMNLIGVDRGENIPAVIALTDPEGCPLSRFKDSLGNPTHILRIGESYKEKQRTIQAKKEVEQRRAGGYSRKYASKAKNLADDMVRNTARDLLYYAVTQDAMLIFENLSRGFGRQGKRTFMAERQYTRMEDWLTAKLAYEGLPSKTYLSKTLAQYTSKTCSNCGFTITSADYDRVLEKLKKTATGWMTTINGKELKVEGQITYYNRYKRQNVVKDLSVELDRLSEESVNNDISSWTKGRSGEALSLLKKRFSHRPVQEKFVCLNCGFETHADEQAALNIARSWLFLRSQEYKKYQTNKTTGNTDKRAFVETWQSFYRKKLKEVWKPAV

SEQ ID NO: 35995 - protein, 978 aa, synthetic construct
  REGION 1..978: note = engineered CasX variant
QEIKRINKIRRRLVKDSNTKKAGKTGPMKTLLVRVMTPDLRERLENLRKKPENIPQPISNTSRANLNKLLTDYTEMKKAILHVYWEEFQKDPVGLMSRVAQPASKKIDQNKLKPEMDEKGNLTTAGFACSQCGQPLFVYKLEQVSEKGKAYTNYFGRCNVAEHEKLILLAQLKPEKDSDEAVTYSLGKFGQRALDFYSIHVTKESTHPVKPLAQIAGNRYASSPVGKALSDACMGTIASFLSKYQDIIIEHQKVVKGNQKRLESLRELAGKENLEYPSVTLPPQPHTKEGLDAYNEVIARVRMWVNLNLWQKLKLSRDDAKPLLRLKKFPSFPLVERQANEVDWWDMVCNVKKLINEKKEDGKVFWQNLAGYKRQEALRPYLSSEEDRKKGKKFARYQLGDLLLHLEKKHGEDWGKVYDEAWERIDKKVEGLSKHIKLEEERRSEDAQSKAALTDWLRAKASFVIEGLKEADKDEFCRCELKLQKWYGDLRGKPFAIEAENSILDISGFSKQYNCAFIWQKDGVKKLNLYLIINYFKGGKLRFKKIKPEAFEANRFYTVINKKSGEIVPMEVNFNFDDPNLIILPLAFGKRQGREFIWNDLLSLETGSLKLANGRVIEKTLYNRRTRQDEPALFVALTFERREVLDSSNIKPMNLIGVDRGENIPAVIALTDPEGCPLSRFKDSLGNPTHILRIGESYKEKQRTIQAKKEVEQRRAGGYSRKYASKAKNLADDMVRNTARDLLYYAVTQDAMLIFENLSRGFGRQGKRTFMAERQYTRMEDWLTAKLAYEGLPSKTYLSKTLAQYTSKTCSNCGFTITSADYDRVLEKLKKTATGWMTTINGKELKVEGQITYYNRYKRQNVVKDLSVELDRLSEESVNNDISSWTKGRSGEALSLLKKRFSHRPVQEKFVCLNCGFETHADEQAALNIARSWLFLRSQEYKKYQTNKTTGNTDKRAFVETWQSFYRKKLKEVWKPAV

SEQ ID NO: 35996 - protein, 978 aa, synthetic construct
  REGION 1..978: note = engineered CasX variant
QEIKRINKIRRRLVKDSNTKKAGKTGPMKTLLVRVMTPDLRERLENLRKKPENIPQPISNTSRANLNKLLTDYTEMKKAILHVYWEEFQKDPVGLMSRVAQPASKKIDQNKLKPEMDEKGNLTTAGFACSQCGQPLFVYKLEQVSEKGKAYTNYFGRCNVAEHEKLILLAQLKPEKDSDEAVTYSLGKFGQRALDFYSIHVTKESTHPVKPLAQIAGNRYASTPVGKALSDACMGTIASFLSKYQDIIIEHQKVVKGNQKRLESLRELAGKENLEYPSVTLPPQPHTKEGLDAYNEVIARVRMWVNLNLWQKLKLSRDDAKPLLRLKKFPSFPLVERQANEVDWWDMVCNVKKLINEKKEDGKVFWQNLAGYKRQEALRPYLSSEEDRKKGKKFARYQLGDLLLHLEKKHGEDWGKVYDEAWERIDKKVEGLSKHIKLEEERRSEDAQSKAALTDWLRAKASFVIEGLKEADKDEFCRCELKLQKWYGDLRGKPFAIEAENSILDISGFSKQYNCAFIWQKDGVKKLNLYLIINYFKGGKLRFKKIKPEAFEANRFYTVINKKSGEIVPMEVNFNFDDPNLIILPLAFGKRQGREFIWNDLLSLETGSLKLANGRVIEKTLYNRRTRQDEPALFVALTFERREVLDSSNIKPMNLIGVDRGENIPAVIALTDPEGCPLSRFKDSLGNPTHILRIGESYKEKQRTIQAKKEVEQRRAGGYSRKYASKAKNLADDMVRNTARDLLYYAVTQDAMLIFENLSRGFGRQGKRTFMAERQYTRMEDWLTAKLAYEGLPSKTYLSKTLAQYTSKTCSNCGFTITSADYDRVLEKLKKTATGWMTTINGKELKVEGQITYYNRYKRQNVVKDLSVELDRLSEESVNNDISSWTKGRSGEALSLLKKRFSHRPVQEKFVCLNCGFETHADEQAALNIARSWLFLRSQEYKKYQTNKTTGNTDKRAFVETWQSFYRKKLKEVWKPAV

SEQ ID NO: 35997 - protein, 978 aa, synthetic construct
  REGION 1..978: note = engineered CasX variant
QEIKRINKIRRRLVKDSNTKKAGKTGPMKTLLVRVMTPDLRERLENLRKKPENIPQPISNTSRANLNKLLTDYTEMKKAILHVYWEEFQKDPVGLMSRVAQPASKKIDQNKLKPEMDEKGNLTTAGFACSQCGQPLFVYKLEQVSEKGKAYTNYFGRCNVAEHEKLILLAQLKPEKDSDEAVTYSLGKFGQRALDFYSIHVTKESTHPVKPLAQIAGNRYASAPVGKALSDACMGTIASFLSKYQDIIIEHQKVVKGNQKRLESLRELAGKENLEYPSVTLPPQPHTKEGLDAYNEVIARVRMWVNLNLWQKLKLSRDDAKPLLRLKKFPSFPLVERQANEVDWWDMVCNVKKLINEKKEDGKVFWQNLAGYKRQEALRPYLSSEEDRKKGKKFARYQLGDLLLHLEKKHGEDWGKVYDEAWERIDKKVEGLSKHIKLEEERRSEDAQSKAALTDWLRAKASFVIEGLKEADKDEFCRCELKLQKWYGDLRGKPFAIEAENSILDISGFSKQYNCAFIWQKDGVKKLNLYLIINYFKGGKLRFKKIKPEAFEANRFYTVINKKSGEIVPMEVNFNFDDPNLIILPLAFGKRQGREFIWNDLLSLETGSLKLANGRVIEKTLYNRRTRQDEPALFVALTFERREVLDSSNIKPMNLIGVDRGENIPAVIALTDPEGCPLSRFKDSLGNPTHILRIGESYKEKQRTIQAKKEVEQRRAGGYSRKYASKAKNLADDMVRNTARDLLYYAVTQDAMLIFENLSRGFGRQGKRTFMAERQYTRMEDWLTAKLAYEGLPSKTYLSKTLAQYTSKTCSNCGFTITSADYDRVLEKLKKTATGWMTTINGKELKVEGQITYYNRYKRQNVVKDLSVELDRLSEESVNNDISSWTKGRSGEALSLLKKRFSHRPVQEKFVCLNCGFETHADEQAALNIARSWLFLRSQEYKKYQTNKTTGNTDKRAFVETWQSFYRKKLKEVWKPAV

SEQ ID NO: 35998 - protein, 978 aa, synthetic construct
  REGION 1..978: note = engineered CasX variant
QEIKRINKIRRRLVKDSNTKKAGKTGPMKTLLVRVMTPDLRERLENLRKKPENIPQPISNTSRANLNKLLTDYTEMKKAILHVYWEEFQKDPVGLMSRVAQPASKKIDQNKLKPEMDEKGNLTTAGFACSQCGQPLFVYKLEQVSEKGKAYTNYFGRCNVAEHEKLILLAQLKPEKDSDEAVTYSLGKFGQRALDFYSIHVTKESTHPVKPLAQIAGNRYASVPVGKALSDACMGTIASFLSKYQDIIIEHQKVVKGNQKRLESLRELAGKENLEYPSVTLPPQPHTKEGLDAYNEVIARVRMWVNLNLWQKLKLSRDDAKPLLRLKKFPSFPLVERQANEVDWWDMVCNVKKLINEKKEDGKVFWQNLAGYKRQEALRPYLSSEEDRKKGKKFARYQLGDLLLHLEKKHGEDWGKVYDEAWERIDKKVEGLSKHIKLEEERRSEDAQSKAALTDWLRAKASFVIEGLKEADKDEFCRCELKLQKWYGDLRGKPFAIEAENSILDISGFSKQYNCAFIWQKDGVKKLNLYLIINYFKGGKLRFKKIKPEAFEANRFYTVINKKSGEIVPMEVNFNFDDPNLIILPLAFGKRQGREFIWNDLLSLETGSLKLANGRVIEKTLYNRRTRQDEPALFVALTFERREVLDSSNIKPMNLIGVDRGENIPAVIALTDPEGCPLSRFKDSLGNPTHILRIGESYKEKQRTIQAKKEVEQRRAGGYSRKYASKAKNLADDMVRNTARDLLYYAVTQDAMLIFENLSRGFGRQGKRTFMAERQYTRMEDWLTAKLAYEGLPSKTYLSKTLAQYTSKTCSNCGFTITSADYDRVLEKLKKTATGWMTTINGKELKVEGQITYYNRYKRQNVVKDLSVELDRLSEESVNNDISSWTKGRSGEALSLLKKRFSHRPVQEKFVCLNCGFETHADEQAALNIARSWLFLRSQEYKKYQTNKTTGNTDKRAFVETWQSFYRKKLKEVWKPAV

SEQ ID NO: 35999 - protein, 978 aa, synthetic construct
  REGION 1..978: note = engineered CasX variant
QEIKRINKIRRRLVKDSNTKKAGKTGPMKTLLVRVMTPDLRERLENLRKKPENIPQPISNTSRANLNKLLTDYTEMKKAILHVYWEEFQKDPVGLMSRVAQPASKKIDQNKLKPEMDEKGNLTTAGFACSQCGQPLFVYKLEQVSEKGKAYTNYFGRCNVAEHEKLIKLAQLKPEKDSDEAVTYSLGKFGQRALDFYSIHVTKESTHPVKPLAQIAGNRYASGPVGKALSDACMGTIASFLSKYQDIIIEHQKVVKGNQKRLESLRELAGKENLEYPSVTLPPQPHTKEGLDAYNEVIARVRMWVNLNLWQKLKLSRDDAKPLLRLKKFPSFPLVERQANEVDWWDMVCNVKKLINEKKEDGKVFWQNLAGYKRQEALRPYLSSEEDRKKGKKFARYQLGDLLLHLEKKHGEDWGKVYDEAWERIDKKVEGLSKHIKLEEERRSEDAQSKAALTDWLRAKASFVIEGLKEADKDEFCRCELKLQKWYGDLRGKPFAIEAENSILDISGFSKQYNCAFIWQKDGVKKLNLYLIINYFKGGKLRFKKIKPEAFEANRFYTVINKKSGEIVPMEVNFNFDDPNLIILPLAFGKRQGREFIWNDLLSLETGSLKLANGRVIEKTLYNRRTRQDEPALFVALTFERREVLDSSNIKPMNLIGVDRGENIPAVIALTDPEGCPLSRFKDSLGNPTHILRIGESYKEKQRTIQAKKEVEQRRAGGYSRKYASKAKNLADDMVRNTARDLLYYAVTQDAMLIFENLSRGFGRQGKRTFMAERQYTRMEDWLTAKLAYEGLPSKTYLSKTLAQYTSKTCSNCGFTITSADYDRVLEKLKKTATGWMTTINGKELKVEGQITYYNRYKRQNVVKDLSVELDRLSEESVNNDISSWTKGRSGEALSLLKKRFSHRPVQEKFVCLNCGFETHADEQAALNIARSWLFLRSQEYKKYQTNKTTGNTDKRAFVETWQSFYRKKLKEVWKPAV

SEQ ID NO: 36000 - protein, 977 aa, synthetic construct
  REGION 1..977: note = engineered CasX variant
QEIKRINKIRRRLVKDSNTKKAGKTGPMKTLLVRVMTPDLRERLENLRKKPENIPQPISNTSRANLNKLLTDYTEMKKAILHVYWEEFQKDPVGLMSRVAQPASKKIDQNKLKPEMDEKGNLTTAGFACSQCGQPLFVYKLEQVSEKGKAYTNYFGRCNVAEHEKLILLAQLKPEKDSDEAVTYSLGKFGQRALDFYSIHVTKESTHPVKPLAQIAGNRYASPVGKALSDACMGTIASFLSKYQDIIIEHQKVVKGNQKRLESLRELAGKENLEYPSVTLPPQPHTKEGLDAYNEVIARVRMWVNLNLWQKLKLSRDDAKPLLRLKKFPSFPLVERQANEVDWWDMVCNVKKLINEKKEDGKVFWQNLAGYKRQEALRPYLSSEEDRKKGKKFARYQLGDLLLHLEKKHGEDWGKVYDEAWERIDKKVEGLSKHIKLEEERRSEDAQSKAALTDWLRAKASFVIEGLKEADKDEFCRCELKLQKWYGDLRGKPFAIEAENSILDISGFSKQYNCAFIWQKDGVKKLNLYLIINYFKGGKLRFKKIKPEAFEANRFYTVINKKSGEIVPMEVNFNFDDPNLIILPLAFGKRQGREFIWNDLLSLETGSLKLANGRVIEKTLYNRRTRQDEPALFVALTFERREVLDSSNIKPMNLIGVDRGENIPAVIALTDPEGCPLSRFKDSLGNPTHILRIGESYKEKQRTIQAKKEVEQRRAGGYSRKYASKAKNLADDMVRNTARDLLYYAVTQDAMLIFENLSRGFGRQGKRTFMAERQYTRMEDWLTAKLAYEGLPSKTYLSKTLAQYTSKTCSNCGFTITSADYDRVLEKLKKTATGWMTTINGKELKVEGQITYYNRYKRQNVVKDLSVELDRLSEESVNNDISSWTKGRSGEALSLLKKRFSHRPVQEKFVCLNCGFETHADEQAALNIARSWLFLRSQEYKKYQTNKTTGNTDKRAFVETWQSFYRKKLKEVWKPAV

SEQ ID NO: 36001 - protein, 978 aa, synthetic construct
  REGION 1..978: note = engineered CasX variant
QEIKRINKIRRRLVKDSNTKKAGKTGPMKTLLVRVMTPDLRERLENLRKKPENIPQPISNTSRANLNKLLTDYTEMKKAILHVYWEEFQKDPVGLMSRVAQPASKKIDQNKLKPEMDEKGNLTTAGFACSQCGQPLFVYKLEQVSEKGKAYTNYFGRCNVAEHEKLILLAQLKPEKDSDEAVTYSLGKFGQRALDFYSIHVTKESTHPVKPLAQIAGNRYASYPVGKALSDACMGTIASFLSKYQDIIIEHQKVVKGNQKRLESLRELAGKENLEYPSVTLPPQPHTKEGLDAYNEVIARVRMWVNLNLWQKLKLSRDDAKPLLRLKGFPSFPLVERQANEVDWWDMVCNVKKLINEKKEDGKVFWQNLAGYKRQEALRPYLSSEEDRKKGKKFARYQLGDLLLHLEKKHGEDWGKVYDEAWERIDKKVEGLSKHIKLEEERRSEDAQSKAALTDWLRAKASFVIEGLKEADKDEFCRCELKLQKWYGDLRGKPFAIEAENSILDISGFSKQYNCAFIWQKDGVKKLNLYLIINYFKGGKLRFKKIKPEAFEANRFYTVINKKSGEIVPMEVNFNFDDPNLIILPLAFGKRQGREFIWNDLLSLETGSLKLANGRVIEKTLYNRRTRQDEPALFVALTFERREVLDSSNIKPMNLIGVDRGENIPAVIALTDPEGCPLSRFKDSLGNPTHILRIGERYKEKQRTIQAKKEVEQRRAGGYSRKYASKAKNLADDMVRNTARDLLYYAVTQDAMLIFENLSRGFGRQGKRTFMAERQYTRMEDWLTAKLAYEGLPSKTYLSKTLAQYTSKTCSNCGFTITSADYDRVLEKLKKTATGWMTTINGKELKVEGQITYYNRYKRQNVVKDLSVELDRLSEESVNNDISSWTKGRSGEALSLLKKRFSHRPVQEKFVCLNCGFETHADEQAALNIARSWLFLRSQEYKKYQTNKTTGNTDKRAFVETWQSFYRKKLKEVWKPAV

SEQ ID NO: 36002 - protein, 978 aa, synthetic construct
  REGION 1..978: note = engineered CasX variant
QEIKRINKIRRRLVKDSNTKKAGKTGPMKTLLVRVMTPDLRERLENLRKKPENIPQPISNTSRANLNKLLTDYTEMKKAILHVYWEEFQKDPVGLMSRVAQPASKKIDQNKLKPEMDEKGNLTTAGFACSQCGQPLFVYKLEQVSEKGKAYTNYFGRCNVAEHEKLILLAQLKPEKDSDEAVTYSLGKFGQRALDFYSIHVTKESTHPVKPLAQIAGNRYASHPVGKALSDACMGTIASFLSKYQDIIIEHQKVVKGNQKRLESLRELAGKENLEYPSVTLPPQPHTKEGLDAYNEVIARVRMWVNLNLWQKLKLSRDDAKPLLRLKGFPSFPLVERQANEVDWWDMVCNVKKLINEKKEDGKVFWQNLAGYKRQEALRPYLSSEEDRKKGKKFARYQLGDLLLHLEKKHGEDWGKVYDEAWERIDKKVEGLSKHIKLEEERRSEDAQSKAALTDWLRAKASFVIEGLKEADKDEFCRCELKLQKWYGDLRGKPFAIEAENSILDISGFSKQYNCAFIWQKDGVKKLNLYLIINYFKGGKLRFKKIKPEAFEANRFYTVINKKSGEIVPMEVNFNFDDPNLIILPLAFGKRQGREFIWNDLLSLETGSLKLANGRVIEKTLYNRRTRQDEPALFVALTFERREVLDSSNIKPMNLIGVDRGENIPAVIALTDPEGCPLSRFKDSLGNPTHILRIGERYKEKQRTIQAKKEVEQRRAGGYSRKYASKAKNLADDMVRNTARDLLYYAVTQDAMLIFENLSRGFGRQGKRTFMAERQYTRMEDWLTAKLAYEGLPSKTYLSKTLAQYTSKTCSNCGFTITSADYDRVLEKLKKTATGWMTTINGKELKVEGQITYYNRYKRQNVVKDLSVELDRLSEESVNNDISSWTKGRSGEALSLLKKRFSHRPVQEKFVCLNCGFETHADEQAALNIARSWLFLRSQEYKKYQTNKTTGNTDKRAFVETWQSFYRKKLKEVWKPAV

SEQ ID NO: 36003 - protein, 978 aa, synthetic construct
  REGION 1..978: note = engineered CasX variant
QEIKRINKIRRRLVKDSNTKKAGKTGPMKTLLVRVMTPDLRERLENLRKKPENIPQPISNTSRANLNKLLTDYTEMKKAILHVYWEEFQKDPVGLMSRVAQPASKKIDQNKLKPEMDEKGNLTTAGFACSQCGQPLFVYKLEQVSEKGKAYTNYFGRCNVAEHEKLILLAQLKPEKDSDEAVTYSLGKFGQRALDFYSIHVTKESTHPVKPLAQIAGNRYASSPVGKALSDACMGTIASFLSKYQDIIIEHQKVVKGNQKRLESLRELAGKENLEYPSVTLPPQPHTKEGLDAYNEVIARVRMWVNLNLWQKLKLSRDDAKPLLRLKGFPSFPLVERQANEVDWWDMVCNVKKLINEKKEDGKVFWQNLAGYKRQEALRPYLSSEEDRKKGKKFARYQLGDLLLHLEKKHGEDWGKVYDEAWERIDKKVEGLSKHIKLEEERRSEDAQSKAALTDWLRAKASFVIEGLKEADKDEFCRCELKLQKWYGDLRGKPFAIEAENSILDISGFSKQYNCAFIWQKDGVKKLNLYLIINYFKGGKLRFKKIKPEAFEANRFYTVINKKSGEIVPMEVNFNFDDPNLIILPLAFGKRQGREFIWNDLLSLETGSLKLANGRVIEKTLYNRRTRQDEPALFVALTFERREVLDSSNIKPMNLIGVDRGENIPAVIALTDPEGCPLSRFKDSLGNPTHILRIGERYKEKQRTIQAKKEVEQRRAGGYSRKYASKAKNLADDMVRNTARDLLYYAVTQDAMLIFENLSRGFGRQGKRTFMAERQYTRMEDWLTAKLAYEGLPSKTYLSKTLAQYTSKTCSNCGFTITSADYDRVLEKLKKTATGWMTTINGKELKVEGQITYYNRYKRQNVVKDLSVELDRLSEESVNNDISSWTKGRSGEALSLLKKRFSHRPVQEKFVCLNCGFETHADEQAALNIARSWLFLRSQEYKKYQTNKTTGNTDKRAFVETWQSFYRKKLKEVWKPAV

SEQ ID NO: 36004 - protein, 978 aa, synthetic construct
  REGION 1..978: note = engineered CasX variant
QEIKRINKIRRRLVKDSNTKKAGKTGPMKTLLVRVMTPDLRERLENLRKKPENIPQPISNTSRANLNKLLTDYTEMKKAILHVYWEEFQKDPVGLMSRVAQPASKKIDQNKLKPEMDEKGNLTTAGFACSQCGQPLFVYKLEQVSEKGKAYTNYFGRCNVAEHEKLILLAQLKPEKDSDEAVTYSLGKFGQRALDFYSIHVTKESTHPVKPLAQIAGNRYASTPVGKALSDACMGTIASFLSKYQDIIIEHQKVVKGNQKRLESLRELAGKENLEYPSVTLPPQPHTKEGLDAYNEVIARVRMWVNLNLWQKLKLSRDDAKPLLRLKGFPSFPLVERQANEVDWWDMVCNVKKLINEKKEDGKVFWQNLAGYKRQEALRPYLSSEEDRKKGKKFARYQLGDLLLHLEKKHGEDWGKVYDEAWERIDKKVEGLSKHIKLEEERRSEDAQSKAALTDWLRAKASFVIEGLKEADKDEFCRCELKLQKWYGDLRGKPFAIEAENSILDISGFSKQYNCAFIWQKDGVKKLNLYLIINYFKGGKLRFKKIKPEAFEANRFYTVINKKSGEIVPMEVNFNFDDPNLIILPLAFGKRQGREFIWNDLLSLETGSLKLANGRVIEKTLYNRRTRQDEPALFVALTFERREVLDSSNIKPMNLIGVDRGENIPAVIALTDPEGCPLSRFKDSLGNPTHILRIGERYKEKQRTIQAKKEVEQRRAGGYSRKYASKAKNLADDMVRNTARDLLYYAVTQDAMLIFENLSRGFGRQGKRTFMAERQYTRMEDWLTAKLAYEGLPSKTYLSKTLAQYTSKTCSNCGFTITSADYDRVLEKLKKTATGWMTTINGKELKVEGQITYYNRYKRQNVVKDLSVELDRLSEESVNNDISSWTKGRSGEALSLLKKRFSHRPVQEKFVCLNCGFETHADEQAALNIARSWLFLRSQEYKKYQTNKTTGNTDKRAFVETWQSFYRKKLKEVWKPAV

SEQ ID NO: 36005 - protein, 978 aa, synthetic construct
  REGION 1..978: note = engineered CasX variant
QEIKRINKIRRRLVKDSNTKKAGKTGPMKTLLVRVMTPDLRERLENLRKKPENIPQPISNTSRANLNKLLTDYTEMKKAILHVYWEEFQKDPVGLMSRVAQPASKKIDQNKLKPEMDEKGNLTTAGFACSQCGQPLFVYKLEQVSEKGKAYTNYFGRCNVAEHEKLILLAQLKPEKDSDEAVTYSLGKFGQRALDFYSIHVTKESTHPVKPLAQIAGNRYASAPVGKALSDACMGTIASFLSKYQDIIIEHQKVVKGNQKRLESLRELAGKENLEYPSVTLPPQPHTKEGLDAYNEVIARVRMWVNLNLWQKLKLSRDDAKPLLRLKGFPSFPLVERQANEVDWWDMVCNVKKLINEKKEDGKVFWQNLAGYKRQEALRPYLSSEEDRKKGKKFARYQLGDLLLHLEKKHGEDWGKVYDEAWERIDKKVEGLSKHIKLEEERRSEDAQSKAALTDWLRAKASFVIEGLKEADKDEFCRCELKLQKWYGDLRGKPFAIEAENSILDISGFSKQYNCAFIWQKDGVKKLNLYLIINYFKGGKLRFKKIKPEAFEANRFYTVINKKSGEIVPMEVNFNFDDPNLIILPLAFGKRQGREFIWNDLLSLETGSLKLANGRVIEKTLYNRRTRQDEPALFVALTFERREVLDSSNIKPMNLIGVDRGENIPAVIALTDPEGCPLSRFKDSLGNPTHILRIGERYKEKQRTIQAKKEVEQRRAGGYSRKYASKAKNLADDMVRNTARDLLYYAVTQDAMLIFENLSRGFGRQGKRTFMAERQYTRMEDWLTAKLAYEGLPSKTYLSKTLAQYTSKTCSNCGFTITSADYDRVLEKLKKTATGWMTTINGKELKVEGQITYYNRYKRQNVVKDLSVELDRLSEESVNNDISSWTKGRSGEALSLLKKRFSHRPVQEKFVCLNCGFETHADEQAALNIARSWLFLRSQEYKKYQTNKTTGNTDKRAFVETWQSFYRKKLKEVWKPAV

SEQ ID NO: 36006 - protein, 978 aa, synthetic construct
  REGION 1..978: note = engineered CasX variant
QEIKRINKIRRRLVKDSNTKKAGKTGPMKTLLVRVMTPDLRERLENLRKKPENIPQPISNTSRANLNKLLTDYTEMKKAILHVYWEEFQKDPVGLMSRVAQPASKKIDQNKLKPEMDEKGNLTTAGFACSQCGQPLFVYKLEQVSEKGKAYTNYFGRCNVAEHEKLILLAQLKPEKDSDEAVTYSLGKFGQRALDFYSIHVTKESTHPVKPLAQIAGNRYASVPVGKALSDACMGTIASFLSKYQDIIIEHQKVVKGNQKRLESLRELAGKENLEYPSVTLPPQPHTKEGLDAYNEVIARVRMWVNLNLWQKLKLSRDDAKPLLRLKGFPSFPLVERQANEVDWWDMVCNVKKLINEKKEDGKVFWQNLAGYKRQEALRPYLSSEEDRKKGKKFARYQLGDLLLHLEKKHGEDWGKVYDEAWERIDKKVEGLSKHIKLEEERRSEDAQSKAALTDWLRAKASFVIEGLKEADKDEFCRCELKLQKWYGDLRGKPFAIEAENSILDISGFSKQYNCAFIWQKDGVKKLNLYLIINYFKGGKLRFKKIKPEAFEANRFYTVINKKSGEIVPMEVNFNFDDPNLIILPLAFGKRQGREFIWNDLLSLETGSLKLANGRVIEKTLYNRRTRQDEPALFVALTFERREVLDSSNIKPMNLIGVDRGENIPAVIALTDPEGCPLSRFKDSLGNPTHILRIGERYKEKQRTIQAKKEVEQRRAGGYSRKYASKAKNLADDMVRNTARDLLYYAVTQDAMLIFENLSRGFGRQGKRTFMAERQYTRMEDWLTAKLAYEGLPSKTYLSKTLAQYTSKTCSNCGFTITSADYDRVLEKLKKTATGWMTTINGKELKVEGQITYYNRYKRQNVVKDLSVELDRLSEESVNNDISSWTKGRSGEALSLLKKRFSHRPVQEKFVCLNCGFETHADEQAALNIARSWLFLRSQEYKKYQTNKTTGNTDKRAFVETWQSFYRKKLKEVWKPAV

SEQ ID NO: 36007 - protein, 978 aa, synthetic construct
  REGION 1..978: note = engineered CasX variant
QEIKRINKIRRRLVKDSNTKKAGKTGPMKTLLVRVMTPDLRERLENLRKKPENIPQPISNTSRANLNKLLTDYTEMKKAILHVYWEEFQKDPVGLMSRVAQPASKKIDQNKLKPEMDEKGNLTTAGFACSQCGQPLFVYKLEQVSEKGKAYTNYFGRCNVAEHEKLIKLAQLKPEKDSDEAVTYSLGKFGQRALDFYSIHVTKESTHPVKPLAQIAGNRYASGPVGKALSDACMGTIASFLSKYQDIIIEHQKVVKGNQKRLESLRELAGKENLEYPSVTLPPQPHTKEGLDAYNEVIARVRMWVNLNLWQKLKLSRDDAKPLLRLKGFPSFPLVERQANEVDWWDMVCNVKKLINEKKEDGKVFWQNLAGYKRQEALRPYLSSEEDRKKGKKFARYQLGDLLLHLEKKHGEDWGKVYDEAWERIDKKVEGLSKHIKLEEERRSEDAQSKAALTDWLRAKASFVIEGLKEADKDEFCRCELKLQKWYGDLRGKPFAIEAENSILDISGFSKQYNCAFIWQKDGVKKLNLYLIINYFKGGKLRFKKIKPEAFEANRFYTVINKKSGEIVPMEVNFNFDDPNLIILPLAFGKRQGREFIWNDLLSLETGSLKLANGRVIEKTLYNRRTRQDEPALFVALTFERREVLDSSNIKPMNLIGVDRGENIPAVIALTDPEGCPLSRFKDSLGNPTHILRIGERYKEKQRTIQAKKEVEQRRAGGYSRKYASKAKNLADDMVRNTARDLLYYAVTQDAMLIFENLSRGFGRQGKRTFMAERQYTRMEDWLTAKLAYEGLPSKTYLSKTLAQYTSKTCSNCGFTITSADYDRVLEKLKKTATGWMTTINGKELKVEGQITYYNRYKRQNVVKDLSVELDRLSEESVNNDISSWTKGRSGEALSLLKKRFSHRPVQEKFVCLNCGFETHADEQAALNIARSWLFLRSQEYKKYQTNKTTGNTDKRAFVETWQSFYRKKLKEVWKPAV

SEQ ID NO: 36008 - protein, 977 aa, synthetic construct
  REGION 1..977: note = engineered CasX variant
QEIKRINKIRRRLVKDSNTKKAGKTGPMKTLLVRVMTPDLRERLENLRKKPENIPQPISNTSRANLNKLLTDYTEMKKAILHVYWEEFQKDPVGLMSRVAQPASKKIDQNKLKPEMDEKGNLTTAGFACSQCGQPLFVYKLEQVSEKGKAYTNYFGRCNVAEHEKLILLAQLKPEKDSDEAVTYSLGKFGQRALDFYSIHVTKESTHPVKPLAQIAGNRYASPVGKALSDACMGTIASFLSKYQDIIIEHQKVVKGNQKRLESLRELAGKENLEYPSVTLPPQPHTKEGLDAYNEVIARVRMWVNLNLWQKLKLSRDDAKPLLRLKGFPSFPLVERQANEVDWWDMVCNVKKLINEKKEDGKVFWQNLAGYKRQEALRPYLSSEEDRKKGKKFARYQLGDLLLHLEKKHGEDWGKVYDEAWERIDKKVEGLSKHIKLEEERRSEDAQSKAALTDWLRAKASFVIEGLKEADKDEFCRCELKLQKWYGDLRGKPFAIEAENSILDISGFSKQYNCAFIWQKDGVKKLNLYLIINYFKGGKLRFKKIKPEAFEANRFYTVINKKSGEIVPMEVNFNFDDPNLIILPLAFGKRQGREFIWNDLLSLETGSLKLANGRVIEKTLYNRRTRQDEPALFVALTFERREVLDSSNIKPMNLIGVDRGENIPAVIALTDPEGCPLSRFKDSLGNPTHILRIGERYKEKQRTIQAKKEVEQRRAGGYSRKYASKAKNLADDMVRNTARDLLYYAVTQDAMLIFENLSRGFGRQGKRTFMAERQYTRMEDWLTAKLAYEGLPSKTYLSKTLAQYTSKTCSNCGFTITSADYDRVLEKLKKTATGWMTTINGKELKVEGQITYYNRYKRQNVVKDLSVELDRLSEESVNNDISSWTKGRSGEALSLLKKRFSHRPVQEKFVCLNCGFETHADEQAALNIARSWLFLRSQEYKKYQTNKTTGNTDKRAFVETWQSFYRKKLKEVWKPAV

SEQ ID NO: 36009 - protein, 978 aa, synthetic construct
  REGION 1..978: note = engineered CasX variant
QEIKRINKIRRRLVKDSNTKKAGKTGPMKTLLVRVMTPDLRERLENLRKKPENIPQPISNTSRANLNKLLTDYTEMKKAILHVYWEEFQKDPVGLMSRVAQPASKKIDQNKLKPEMDEKGNLTTAGFACSQCGQPLFVYKLEQVSEKGKAYTNYFGRCNVAEHEKLILLAQLKPEKDSDEAVTYSLGKFGQRALDFYSIHVTKESTHPVKPLAQIAGNRYASYPVGKALSDACMGTIASFLSKYQDIIIEHQKVVKGNQKRLESLRELAGKENLEYPSVTLPPQPHTKEGLDAYNEVIARVRMWVNLNLWQKLKLSRDDAKPLLRLKGFPSFPLVERQANEVDWWDMVCNVKKLINEKKEDGKVFWQNLAGYKRQEALRPYLSSEEDRKKGKKFARYQLGDLLLHLEKKHGEDWGKVYDEAWERIDKKVEGLSKHIKLEEERRSEDAQSKAALTDWLRAKASFVIEGLKEADKDEFCRCELKLQKWYGDLRGKPFAIEAENSILDISGFSKQYNCAFIWQKDGVKKLNLYLIINYFKGGKLRFKKIKPEAFEANRFYTVINKKSGEIVPMEVNFNFDDPNLIILPLAFGKRQGREFIWNDLLSLETGSLQLANGRVIEKTLYNRRTRQDEPALFVALTFERREVLDSSNIKPMNLIGVDRGENIPAVIALTDPEGCPLSRFKDSLGNPTHILRIGESYKEKQRTIQAKKEVEQRRAGGYSRKYASKAKNLADDMVRNTARDLLYYAVTQDAMLIFENLSRGFGRQGKRTFMAERQYTRMEDWLTAKLAYEGLPSKTYLSKTLAQYTSKTCSNCGFTITSADYDRVLEKLKKTATGWMTTINGKELKVEGQITYYNRYKRQNVVKDLSVELDRLSEESVNNDISSWTKGRSGEALSLLKKRFSHRPVQEKFVCLNCGFETHADEQAALNIARSWLFLRSQEYKKYQTNKTTGNTDKRAFVETWQSFYRKKLKEVWKPAV

SEQ ID NO: 36010 - protein, 978 aa, synthetic construct
  REGION 1..978: note = engineered CasX variant
QEIKRINKIRRRLVKDSNTKKAGKTGPMKTLLVRVMTPDLRERLENLRKKPENIPQPISNTSRANLNKLLTDYTEMKKAILHVYWEEFQKDPVGLMSRVAQPASKKIDQNKLKPEMDEKGNLTTAGFACSQCGQPLFVYKLEQVSEKGKAYTNYFGRCNVAEHEKLILLAQLKPEKDSDEAVTYSLGKFGQRALDFYSIHVTKESTHPVKPLAQIAGNRYASHPVGKALSDACMGTIASFLSKYQDIIIEHQKVVKGNQKRLESLRELAGKENLEYPSVTLPPQPHTKEGLDAYNEVIARVRMWVNLNLWQKLKLSRDDAKPLLRLKGFPSFPLVERQANEVDWWDMVCNVKKLINEKKEDGKVFWQNLAGYKRQEALRPYLSSEEDRKKGKKFARYQLGDLLLHLEKKHGEDWGKVYDEAWERIDKKVEGLSKHIKLEEERRSEDAQSKAALTDWLRAKASFVIEGLKEADKDEFCRCELKLQKWYGDLRGKPFAIEAENSILDISGFSKQYNCAFIWQKDGVKKLNLYLIINYFKGGKLRFKKIKPEAFEANRFYTVINKKSGEIVPMEVNFNFDDPNLIILPLAFGKRQGREFIWNDLLSLETGSLQLANGRVIEKTLYNRRTRQDEPALFVALTFERREVLDSSNIKPMNLIGVDRGENIPAVIALTDPEGCPLSRFKDSLGNPTHILRIGESYKEKQRTIQAKKEVEQRRAGGYSRKYASKAKNLADDMVRNTARDLLYYAVTQDAMLIFENLSRGFGRQGKRTFMAERQYTRMEDWLTAKLAYEGLPSKTYLSKTLAQYTSKTCSNCGFTITSADYDRVLEKLKKTATGWMTTINGKELKVEGQITYYNRYKRQNVVKDLSVELDRLSEESVNNDISSWTKGRSGEALSLLKKRFSHRPVQEKFVCLNCGFETHADEQAALNIARSWLFLRSQEYKKYQTNKTTGNTDKRAFVETWQSFYRKKLKEVWKPAV

SEQ ID NO: 36011 - protein, 978 aa, synthetic construct
  REGION 1..978: note = engineered CasX variant
QEIKRINKIRRRLVKDSNTKKAGKTGPMKTLLVRVMTPDLRERLENLRKKPENIPQPISNTSRANLNKLLTDYTEMKKAILHVYWEEFQKDPVGLMSRVAQPASKKIDQNKLKPEMDEKGNLTTAGFACSQCGQPLFVYKLEQVSEKGKAYTNYFGRCNVAEHEKLILLAQLKPEKDSDEAVTYSLGKFGQRALDFYSIHVTKESTHPVKPLAQIAGNRYASSPVGKALSDACMGTIASFLSKYQDIIIEHQKVVKGNQKRLESLRELAGKENLEYPSVTLPPQPHTKEGLDAYNEVIARVRMWVNLNLWQKLKLSRDDAKPLLRLKGFPSFPLVERQANEVDWWDMVCNVKKLINEKKEDGKVFWQNLAGYKRQEALRPYLSSEEDRKKGKKFARYQLGDLLLHLEKKHGEDWGKVYDEAWERIDKKVEGLSKHIKLEEERRSEDAQSKAALTDWLRAKASFVIEGLKEADKDEFCRCELKLQKWYGDLRGKPFAIEAENSILDISGFSKQYNCAFIWQKDGVKKLNLYLIINYFKGGKLRFKKIKPEAFEANRFYTVINKKSGEIVPMEVNFNFDDPNLIILPLAFGKRQGREFIWNDLLSLETGSLQLANGRVIEKTLYNRRTRQDEPALFVALTFERREVLDSSNIKPMNLIGVDRGENIPAVIALTDPEGCPLSRFKDSLGNPTHILRIGESYKEKQRTIQAKKEVEQRRAGGYSRKYASKAKNLADDMVRNTARDLLYYAVTQDAMLIFENLSRGFGRQGKRTFMAERQYTRMEDWLTAKLAYEGLPSKTYLSKTLAQYTSKTCSNCGFTITSADYDRVLEKLKKTATGWMTTINGKELKVEGQITYYNRYKRQNVVKDLSVELDRLSEESVNNDISSWTKGRSGEALSLLKKRFSHRPVQEKFVCLNCGFETHADEQAALNIARSWLFLRSQEYKKYQTNKTTGNTDKRAFVETWQSFYRKKLKEVWKPAV

SEQ ID NO: 36012 - protein, 978 aa, synthetic construct
  REGION 1..978: note = engineered CasX variant
QEIKRINKIRRRLVKDSNTKKAGKTGPMKTLLVRVMTPDLRERLENLRKKPENIPQPISNTSRANLNKLLTDYTEMKKAILHVYWEEFQKDPVGLMSRVAQPASKKIDQNKLKPEMDEKGNLTTAGFACSQCGQPLFVYKLEQVSEKGKAYTNYFGRCNVAEHEKLILLAQLKPEKDSDEAVTYSLGKFGQRALDFYSIHVTKESTHPVKPLAQIAGNRYASTPVGKALSDACMGTIASFLSKYQDIIIEHQKVVKGNQKRLESLRELAGKENLEYPSVTLPPQPHTKEGLDAYNEVIARVRMWVNLNLWQKLKLSRDDAKPLLRLKGFPSFPLVERQANEVDWWDMVCNVKKLINEKKEDGKVFWQNLAGYKRQEALRPYLSSEEDRKKGKKFARYQLGDLLLHLEKKHGEDWGKVYDEAWERIDKKVEGLSKHIKLEEERRSEDAQSKAALTDWLRAKASFVIEGLKEADKDEFCRCELKLQKWYGDLRGKPFAIEAENSILDISGFSKQYNCAFIWQKDGVKKLNLYLIINYFKGGKLRFKKIKPEAFEANRFYTVINKKSGEIVPMEVNFNFDDPNLIILPLAFGKRQGREFIWNDLLSLETGSLQLANGRVIEKTLYNRRTRQDEPALFVALTFERREVLDSSNIKPMNLIGVDRGENIPAVIALTDPEGCPLSRFKDSLGNPTHILRIGESYKEKQRTIQAKKEVEQRRAGGYSRKYASKAKNLADDMVRNTARDLLYYAVTQDAMLIFENLSRGFGRQGKRTFMAERQYTRMEDWLTAKLAYEGLPSKTYLSKTLAQYTSKTCSNCGFTITSADYDRVLEKLKKTATGWMTTINGKELKVEGQITYYNRYKRQNVVKDLSVELDRLSEESVNNDISSWTKGRSGEALSLLKKRFSHRPVQEKFVCLNCGFETHADEQAALNIARSWLFLRSQEYKKYQTNKTTGNTDKRAFVETWQSFYRKKLKEVWKPAV

SEQ ID NO: 36013 - protein, 978 aa, synthetic construct
  REGION 1..978: note = engineered CasX variant
QEIKRINKIRRRLVKDSNTKKAGKTGPMKTLLVRVMTPDLRERLENLRKKPENIPQPISNTSRANLNKLLTDYTEMKKAILHVYWEEFQKDPVGLMSRVAQPASKKIDQNKLKPEMDEKGNLTTAGFACSQCGQPLFVYKLEQVSEKGKAYTNYFGRCNVAEHEKLILLAQLKPEKDSDEAVTYSLGKFGQRALDFYSIHVTKESTHPVKPLAQIAGNRYASAPVGKALSDACMGTIASFLSKYQDIIIEHQKVVKGNQKRLESLRELAGKENLEYPSVTLPPQPHTKEGLDAYNEVIARVRMWVNLNLWQKLKLSRDDAKPLLRLKGFPSFPLVERQANEVDWWDMVCNVKKLINEKKEDGKVFWQNLAGYKRQEALRPYLSSEEDRKKGKKFARYQLGDLLLHLEKKHGEDWGKVYDEAWERIDKKVEGLSKHIKLEEERRSEDAQSKAALTDWLRAKASFVIEGLKEADKDEFCRCELKLQKWYGDLRGKPFAIEAENSILDISGFSKQYNCAFIWQKDGVKKLNLYLIINYFKGGKLRFKKIKPEAFEANRFYTVINKKSGEIVPMEVNFNFDDPNLIILPLAFGKRQGREFIWNDLLSLETGSLQLANGRVIEKTLYNRRTRQDEPALFVALTFERREVLDSSNIKPMNLIGVDRGENIPAVIALTDPEGCPLSRFKDSLGNPTHILRIGESYKEKQRTIQAKKEVEQRRAGGYSRKYASKAKNLADDMVRNTARDLLYYAVTQDAMLIFENLSRGFGRQGKRTFMAERQYTRMEDWLTAKLAYEGLPSKTYLSKTLAQYTSKTCSNCGFTITSADYDRVLEKLKKTATGWMTTINGKELKVEGQITYYNRYKRQNVVKDLSVELDRLSEESVNNDISSWTKGRSGEALSLLKKRFSHRPVQEKFVCLNCGFETHADEQAALNIARSWLFLRSQEYKKYQTNKTTGNTDKRAFVETWQSFYRKKLKEVWKPAV

SEQ ID NO: 36014 - protein, 978 aa, synthetic construct
  REGION 1..978: note = engineered CasX variant
QEIKRINKIRRRLVKDSNTKKAGKTGPMKTLLVRVMTPDLRERLENLRKKPENIPQPISNTSRANLNKLLTDYTEMKKAILHVYWEEFQKDPVGLMSRVAQPASKKIDQNKLKPEMDEKGNLTTAGFACSQCGQPLFVYKLEQVSEKGKAYTNYFGRCNVAEHEKLILLAQLKPEKDSDEAVTYSLGKFGQRALDFYSIHVTKESTHPVKPLAQIAGNRYASVPVGKALSDACMGTIASFLSKYQDIIIEHQKVVKGNQKRLESLRELAGKENLEYPSVTLPPQPHTKEGLDAYNEVIARVRMWVNLNLWQKLKLSRDDAKPLLRLKGFPSFPLVERQANEVDWWDMVCNVKKLINEKKEDGKVFWQNLAGYKRQEALRPYLSSEEDRKKGKKFARYQLGDLLLHLEKKHGEDWGKVYDEAWERIDKKVEGLSKHIKLEEERRSEDAQSKAALTDWLRAKASFVIEGLKEADKDEFCRCELKLQKWYGDLRGKPFAIEAENSILDISGFSKQYNCAFIWQKDGVKKLNLYLIINYFKGGKLRFKKIKPEAFEANRFYTVINKKSGEIVPMEVNFNFDDPNLIILPLAFGKRQGREFIWNDLLSLETGSLQLANGRVIEKTLYNRRTRQDEPALFVALTFERREVLDSSNIKPMNLIGVDRGENIPAVIALTDPEGCPLSRFKDSLGNPTHILRIGESYKEKQRTIQAKKEVEQRRAGGYSRKYASKAKNLADDMVRNTARDLLYYAVTQDAMLIFENLSRGFGRQGKRTFMAERQYTRMEDWLTAKLAYEGLPSKTYLSKTLAQYTSKTCSNCGFTITSADYDRVLEKLKKTATGWMTTINGKELKVEGQITYYNRYKRQNVVKDLSVELDRLSEESVNNDISSWTKGRSGEALSLLKKRFSHRPVQEKFVCLNCGFETHADEQAALNIARSWLFLRSQEYKKYQTNKTTGNTDKRAFVETWQSFYRKKLKEVWKPAV

SEQ ID NO: 36015 - protein, 978 aa, synthetic construct
  REGION 1..978: note = engineered CasX variant
QEIKRINKIRRRLVKDSNTKKAGKTGPMKTLLVRVMTPDLRERLENLRKKPENIPQPISNTSRANLNKLLTDYTEMKKAILHVYWEEFQKDPVGLMSRVAQPASKKIDQNKLKPEMDEKGNLTTAGFACSQCGQPLFVYKLEQVSEKGKAYTNYFGRCNVAEHEKLIKLAQLKPEKDSDEAVTYSLGKFGQRALDFYSIHVTKESTHPVKPLAQIAGNRYASGPVGKALSDACMGTIASFLSKYQDIIIEHQKVVKGNQKRLESLRELAGKENLEYPSVTLPPQPHTKEGLDAYNEVIARVRMWVNLNLWQKLKLSRDDAKPLLRLKGFPSFPLVERQANEVDWWDMVCNVKKLINEKKEDGKVFWQNLAGYKRQEALRPYLSSEEDRKKGKKFARYQLGDLLLHLEKKHGEDWGKVYDEAWERIDKKVEGLSKHIKLEEERRSEDAQSKAALTDWLRAKASFVIEGLKEADKDEFCRCELKLQKWYGDLRGKPFAIEAENSILDISGFSKQYNCAFIWQKDGVKKLNLYLIINYFKGGKLRFKKIKPEAFEANRFYTVINKKSGEIVPMEVNFNFDDPNLIILPLAFGKRQGREFIWNDLLSLETGSLQLANGRVIEKTLYNRRTRQDEPALFVALTFERREVLDSSNIKPMNLIGVDRGENIPAVIALTDPEGCPLSRFKDSLGNPTHILRIGESYKEKQRTIQAKKEVEQRRAGGYSRKYASKAKNLADDMVRNTARDLLYYAVTQDAMLIFENLSRGFGRQGKRTFMAERQYTRMEDWLTAKLAYEGLPSKTYLSKTLAQYTSKTCSNCGFTITSADYDRVLEKLKKTATGWMTTINGKELKVEGQITYYNRYKRQNVVKDLSVELDRLSEESVNNDISSWTKGRSGEALSLLKKRFSHRPVQEKFVCLNCGFETHADEQAALNIARSWLFLRSQEYKKYQTNKTTGNTDKRAFVETWQSFYRKKLKEVWKPAV

SEQ ID NO: 36016 - protein, 977 aa, synthetic construct
  REGION 1..977: note = engineered CasX variant
QEIKRINKIRRRLVKDSNTKKAGKTGPMKTLLVRVMTPDLRERLENLRKKPENIPQPISNTSRANLNKLLTDYTEMKKAILHVYWEEFQKDPVGLMSRVAQPASKKIDQNKLKPEMDEKGNLTTAGFACSQCGQPLFVYKLEQVSEKGKAYTNYFGRCNVAEHEKLILLAQLKPEKDSDEAVTYSLGKFGQRALDFYSIHVTKESTHPVKPLAQIAGNRYASPVGKALSDACMGTIASFLSKYQDIIIEHQKVVKGNQKRLESLRELAGKENLEYPSVTLPPQPHTKEGLDAYNEVIARVRMWVNLNLWQKLKLSRDDAKPLLRLKGFPSFPLVERQANEVDWWDMVCNVKKLINEKKEDGKVFWQNLAGYKRQEALRPYLSSEEDRKKGKKFARYQLGDLLLHLEKKHGEDWGKVYDEAWERIDKKVEGLSKHIKLEEERRSEDAQSKAALTDWLRAKASFVIEGLKEADKDEFCRCELKLQKWYGDLRGKPFAIEAENSILDISGFSKQYNCAFIWQKDGVKKLNLYLIINYFKGGKLRFKKIKPEAFEANRFYTVINKKSGEIVPMEVNFNFDDPNLIILPLAFGKRQGREFIWNDLLSLETGSLQLANGRVIEKTLYNRRTRQDEPALFVALTFERREVLDSSNIKPMNLIGVDRGENIPAVIALTDPEGCPLSRFKDSLGNPTHILRIGESYKEKQRTIQAKKEVEQRRAGGYSRKYASKAKNLADDMVRNTARDLLYYAVTQDAMLIFENLSRGFGRQGKRTFMAERQYTRMEDWLTAKLAYEGLPSKTYLSKTLAQYTSKTCSNCGFTITSADYDRVLEKLKKTATGWMTTINGKELKVEGQITYYNRYKRQNVVKDLSVELDRLSEESVNNDISSWTKGRSGEALSLLKKRFSHRPVQEKFVCLNCGFETHADEQAALNIARSWLFLRSQEYKKYQTNKTTGNTDKRAFVETWQSFYRKKLKEVWKPAV

SEQ ID NO: 36017 - protein, 979 aa, synthetic construct
  REGION 1..979: note = engineered CasX variant
QEIKRINKIRRRLVKDSNTKKAGKTGPMKTLLVRVMTPDLRERLENLRKKPENIPQPISNTSRANLNKLLTDYTEMKKAILHVYWEEFQKDPVGLMSRVAQPASKKIDQNKLKPEMDEKGNLTTAGFACSQCGQPLFVYKLEQVSEKGKAYTNYFGRCNVAEHEKLILLAQLKPEKDSDEAVTYSLGKFGQRALDFYSIHVTKESTHPVKPLAQIAGNRYASYPVGKALSDACMGTIASFLSKYQDIIIEHQKVVKGNQKRLESLRELAGKENLEYPSVTLPPQPHTKEGVDAYNEVIARVRTWWVNLNLWQKLKLSRDDAKPLLRLKGFPSFPLVERQANEVDWWDMVCNVKKLINEKKEDGKVFWQNLAGYKRQEALRPYLSSEEDRKKGKKFARYQLGDLLLHLEKKHGEDWGKVYDEAWERIDKKVEGLSKHIKLEEERRSEDAQSKAALTDWLRAKASFVIEGLKEADKDEFCRCELKLQKWYGDLRGKPFAIEAENSILDISGFSKQYNCAFIWQKDGVKKLNLYLIINYFKGGKLRFKKIKPEAFEANRFYTVINKKSGEIVPMEVNFNFDDPNLIILPLAFGKRQGREFIWNDLLSLETGSLKLANGRVIEKTLYNRRTRQDEPALFVALTFERREVLDSSNIKPMNLIGVDRGENIPAVIALTDPEGCPLSRFKDSLGNPTHILRIGESYKEKQRTIQAKKEVEQRRAGGYSRKYASKAKNLADDMVRNTARDLLYYAVTQDAMLIFENLSRGFGRQGKRTFMAERQYTRMEDWLTAKLAYEGLPSKTYLSKTLAQYTSKTCSNCGFTITSADYDRVLEKLKKTATGWMTTINGKELKVEGQITYYNRYKRQNVVKDLSVELDRLSEESVNNDISSWTKGRSGEALSLLKKRFSHRPVQEKFVCLNCGFETHADEQAALNIARSWLFLRSQEYKKYQTNKTTGNTDKRAFVETWQSFYRKKLKEVWKPAV

SEQ ID NO: 36018 - protein, 979 aa, synthetic construct
  REGION 1..979: note = engineered CasX variant
QEIKRINKIRRRLVKDSNTKKAGKTGPMKTLLVRVMTPDLRERLENLRKKPENIPQPISNTSRANLNKLLTDYTEMKKAILHVYWEEFQKDPVGLMSRVAQPASKKIDQNKLKPEMDEKGNLTTAGFACSQCGQPLFVYKLEQVSEKGKAYTNYFGRCNVAEHEKLILLAQLKPEKDSDEAVTYSLGKFGQRALDFYSIHVTKESTHPVKPLAQIAGNRYASHPVGKALSDACMGTIASFLSKYQDIIIEHQKVVKGNQKRLESLRELAGKENLEYPSVTLPPQPHTKEGVDAYNEVIARVRTWWVNLNLWQKLKLSRDDAKPLLRLKGFPSFPLVERQANEVDWWDMVCNVKKLINEKKEDGKVFWQNLAGYKRQEALRPYLSSEEDRKKGKKFARYQLGDLLLHLEKKHGEDWGKVYDEAWERIDKKVEGLSKHIKLEEERRSEDAQSKAALTDWLRAKASFVIEGLKEADKDEFCRCELKLQKWYGDLRGKPFAIEAENSILDISGFSKQYNCAFIWQKDGVKKLNLYLIINYFKGGKLRFKKIKPEAFEANRFYTVINKKSGEIVPMEVNFNFDDPNLIILPLAFGKRQGREFIWNDLLSLETGSLKLANGRVIEKTLYNRRTRQDEPALFVALTFERREVLDSSNIKPMNLIGVDRGENIPAVIALTDPEGCPLSRFKDSLGNPTHILRIGESYKEKQRTIQAKKEVEQRRAGGYSRKYASKAKNLADDMVRNTARDLLYYAVTQDAMLIFENLSRGFGRQGKRTFMAERQYTRMEDWLTAKLAYEGLPSKTYLSKTLAQYTSKTCSNCGFTITSADYDRVLEKLKKTATGWMTTINGKELKVEGQITYYNRYKRQNVVKDLSVELDRLSEESVNNDISSWTKGRSGEALSLLKKRFSHRPVQEKFVCLNCGFETHADEQAALNIARSWLFLRSQEYKKYQTNKTTGNTDKRAFVETWQSFYRKKLKEVWKPAV

SEQ ID NO: 36019 - protein, 979 aa, synthetic construct
  REGION 1..979: note = engineered CasX variant
QEIKRINKIRRRLVKDSNTKKAGKTGPMKTLLVRVMTPDLRERLENLRKKPENIPQPISNTSRANLNKLLTDYTEMKKAILHVYWEEFQKDPVGLMSRVAQPASKKIDQNKLKPEMDEKGNLTTAGFACSQCGQPLFVYKLEQVSEKGKAYTNYFGRCNVAEHEKLILLAQLKPEKDSDEAVTYSLGKFGQRALDFYSIHVTKESTHPVKPLAQIAGNRYASSPVGKALSDACMGTIASFLSKYQDIIIEHQKVVKGNQKRLESLRELAGKENLEYPSVTLPPQPHTKEGVDAYNEVIARVRTWWVNLNLWQKLKLSRDDAKPLLRLKGFPSFPLVERQANEVDWWDMVCNVKKLINEKKEDGKVFWQNLAGYKRQEALRPYLSSEEDRKKGKKFARYQLGDLLLHLEKKHGEDWGKVYDEAWERIDKKVEGLSKHIKLEEERRSEDAQSKAALTDWLRAKASFVIEGLKEADKDEFCRCELKLQKWYGDLRGKPFAIEAENSILDISGFSKQYNCAFIWQKDGVKKLNLYLIINYFKGGKLRFKKIKPEAFEANRFYTVINKKSGEIVPMEVNFNFDDPNLIILPLAFGKRQGREFIWNDLLSLETGSLKLANGRVIEKTLYNRRTRQDEPALFVALTFERREVLDSSNIKPMNLIGVDRGENIPAVIALTDPEGCPLSRFKDSLGNPTHILRIGESYKEKQRTIQAKKEVEQRRAGGYSRKYASKAKNLADDMVRNTARDLLYYAVTQDAMLIFENLSRGFGRQGKRTFMAERQYTRMEDWLTAKLAYEGLPSKTYLSKTLAQYTSKTCSNCGFTITSADYDRVLEKLKKTATGWMTTINGKELKVEGQITYYNRYKRQNVVKDLSVELDRLSEESVNNDISSWTKGRSGEALSLLKKRFSHRPVQEKFVCLNCGFETHADEQAALNIARSWLFLRSQEYKKYQTNKTTGNTDKRAFVETWQSFYRKKLKEVWKPAV

SEQ ID NO: 36020 - protein, 979 aa, synthetic construct
  REGION 1..979: note = engineered CasX variant
QEIKRINKIRRRLVKDSNTKKAGKTGPMKTLLVRVMTPDLRERLENLRKKPENIPQPISNTSRANLNKLLTDYTEMKKAILHVYWEEFQKDPVGLMSRVAQPASKKIDQNKLKPEMDEKGNLTTAGFACSQCGQPLFVYKLEQVSEKGKAYTNYFGRCNVAEHEKLILLAQLKPEKDSDEAVTYSLGKFGQRALDFYSIHVTKESTHPVKPLAQIAGNRYASTPVGKALSDACMGTIASFLSKYQDIIIEHQKVVKGNQKRLESLRELAGKENLEYPSVTLPPQPHTKEGVDAYNEVIARVRTWWVNLNLWQKLKLSRDDAKPLLRLKGFPSFPLVERQANEVDWWDMVCNVKKLINEKKEDGKVFWQNLAGYKRQEALRPYLSSEEDRKKGKKFARYQLGDLLLHLEKKHGEDWGKVYDEAWERIDKKVEGLSKHIKLEEERRSEDAQSKAALTDWLRAKASFVIEGLKEADKDEFCRCELKLQKWYGDLRGKPFAIEAENSILDISGFSKQYNCAFIWQKDGVKKLNLYLIINYFKGGKLRFKKIKPEAFEANRFYTVINKKSGEIVPMEVNFNFDDPNLIILPLAFGKRQGREFIWNDLLSLETGSLKLANGRVIEKTLYNRRTRQDEPALFVALTFERREVLDSSNIKPMNLIGVDRGENIPAVIALTDPEGCPLSRFKDSLGNPTHILRIGESYKEKQRTIQAKKEVEQRRAGGYSRKYASKAKNLADDMVRNTARDLLYYAVTQDAMLIFENLSRGFGRQGKRTFMAERQYTRMEDWLTAKLAYEGLPSKTYLSKTLAQYTSKTCSNCGFTITSADYDRVLEKLKKTATGWMTTINGKELKVEGQITYYNRYKRQNVVKDLSVELDRLSEESVNNDISSWTKGRSGEALSLLKKRFSHRPVQEKFVCLNCGFETHADEQAALNIARSWLFLRSQEYKKYQTNKTTGNTDKRAFVETWQSFYRKKLKEVWKPAV

SEQ ID NO: 36021 - protein, 979 aa, synthetic construct
  REGION 1..979: note = engineered CasX variant
QEIKRINKIRRRLVKDSNTKKAGKTGPMKTLLVRVMTPDLRERLENLRKKPENIPQPISNTSRANLNKLLTDYTEMKKAILHVYWEEFQKDPVGLMSRVAQPASKKIDQNKLKPEMDEKGNLTTAGFACSQCGQPLFVYKLEQVSEKGKAYTNYFGRCNVAEHEKLILLAQLKPEKDSDEAVTYSLGKFGQRALDFYSIHVTKESTHPVKPLAQIAGNRYASAPVGKALSDACMGTIASFLSKYQDIIIEHQKVVKGNQKRLESLRELAGKENLEYPSVTLPPQPHTKEGVDAYNEVIARVRTWWVNLNLWQKLKLSRDDAKPLLRLKGFPSFPLVERQANEVDWWDMVCNVKKLINEKKEDGKVFWQNLAGYKRQEALRPYLSSEEDRKKGKKFARYQLGDLLLHLEKKHGEDWGKVYDEAWERIDKKVEGLSKHIKLEEERRSEDAQSKAALTDWLRAKASFVIEGLKEADKDEFCRCELKLQKWYGDLRGKPFAIEAENSILDISGFSKQYNCAFIWQKDGVKKLNLYLIINYFKGGKLRFKKIKPEAFEANRFYTVINKKSGEIVPMEVNFNFDDPNLIILPLAFGKRQGREFIWNDLLSLETGSLKLANGRVIEKTLYNRRTRQDEPALFVALTFERREVLDSSNIKPMNLIGVDRGENIPAVIALTDPEGCPLSRFKDSLGNPTHILRIGESYKEKQRTIQAKKEVEQRRAGGYSRKYASKAKNLADDMVRNTARDLLYYAVTQDAMLIFENLSRGFGRQGKRTFMAERQYTRMEDWLTAKLAYEGLPSKTYLSKTLAQYTSKTCSNCGFTITSADYDRVLEKLKKTATGWMTTINGKELKVEGQITYYNRYKRQNVVKDLSVELDRLSEESVNNDISSWTKGRSGEALSLLKKRFSHRPVQEKFVCLNCGFETHADEQAALNIARSWLFLRSQEYKKYQTNKTTGNTDKRAFVETWQSFYRKKLKEVWKPAV

SEQ ID NO: 36022 - protein, 979 aa, synthetic construct
  REGION 1..979: note = engineered CasX variant
QEIKRINKIRRRLVKDSNTKKAGKTGPMKTLLVRVMTPDLRERLENLRKKPENIPQPISNTSRANLNKLLTDYTEMKKAILHVYWEEFQKDPVGLMSRVAQPASKKIDQNKLKPEMDEKGNLTTAGFACSQCGQPLFVYKLEQVSEKGKAYTNYFGRCNVAEHEKLILLAQLKPEKDSDEAVTYSLGKFGQRALDFYSIHVTKESTHPVKPLAQIAGNRYASVPVGKALSDACMGTIASFLSKYQDIIIEHQKVVKGNQKRLESLRELAGKENLEYPSVTLPPQPHTKEGVDAYNEVIARVRTWWVNLNLWQKLKLSRDDAKPLLRLKGFPSFPLVERQANEVDWWDMVCNVKKLINEKKEDGKVFWQNLAGYKRQEALRPYLSSEEDRKKGKKFARYQLGDLLLHLEKKHGEDWGKVYDEAWERIDKKVEGLSKHIKLEEERRSEDAQSKAALTDWLRAKASFVIEGLKEADKDEFCRCELKLQKWYGDLRGKPFAIEAENSILDISGFSKQYNCAFIWQKDGVKKLNLYLIINYFKGGKLRFKKIKPEAFEANRFYTVINKKSGEIVPMEVNFNFDDPNLIILPLAFGKRQGREFIWNDLLSLETGSLKLANGRVIEKTLYNRRTRQDEPALFVALTFERREVLDSSNIKPMNLIGVDRGENIPAVIALTDPEGCPLSRFKDSLGNPTHILRIGESYKEKQRTIQAKKEVEQRRAGGYSRKYASKAKNLADDMVRNTARDLLYYAVTQDAMLIFENLSRGFGRQGKRTFMAERQYTRMEDWLTAKLAYEGLPSKTYLSKTLAQYTSKTCSNCGFTITSADYDRVLEKLKKTATGWMTTINGKELKVEGQITYYNRYKRQNVVKDLSVELDRLSEESVNNDISSWTKGRSGEALSLLKKRFSHRPVQEKFVCLNCGFETHADEQAALNIARSWLFLRSQEYKKYQTNKTTGNTDKRAFVETWQSFYRKKLKEVWKPAV

SEQ ID NO: 36023 - protein, 979 aa, synthetic construct
  REGION 1..979: note = engineered CasX variant
QEIKRINKIRRRLVKDSNTKKAGKTGPMKTLLVRVMTPDLRERLENLRKKPENIPQPISNTSRANLNKLLTDYTEMKKAILHVYWEEFQKDPVGLMSRVAQPASKKIDQNKLKPEMDEKGNLTTAGFACSQCGQPLFVYKLEQVSEKGKAYTNYFGRCNVAEHEKLIKLAQLKPEKDSDEAVTYSLGKFGQRALDFYSIHVTKESTHPVKPLAQIAGNRYASGPVGKALSDACMGTIASFLSKYQDIIIEHQKVVKGNQKRLESLRELAGKENLEYPSVTLPPQPHTKEGVDAYNEVIARVRTWWVNLNLWQKLKLSRDDAKPLLRLKGFPSFPLVERQANEVDWWDMVCNVKKLINEKKEDGKVFWQNLAGYKRQEALRPYLSSEEDRKKGKKFARYQLGDLLLHLEKKHGEDWGKVYDEAWERIDKKVEGLSKHIKLEEERRSEDAQSKAALTDWLRAKASFVIEGLKEADKDEFCRCELKLQKWYGDLRGKPFAIEAENSILDISGFSKQYNCAFIWQKDGVKKLNLYLIINYFKGGKLRFKKIKPEAFEANRFYTVINKKSGEIVPMEVNFNFDDPNLIILPLAFGKRQGREFIWNDLLSLETGSLKLANGRVIEKTLYNRRTRQDEPALFVALTFERREVLDSSNIKPMNLIGVDRGENIPAVIALTDPEGCPLSRFKDSLGNPTHILRIGESYKEKQRTIQAKKEVEQRRAGGYSRKYASKAKNLADDMVRNTARDLLYYAVTQDAMLIFENLSRGFGRQGKRTFMAERQYTRMEDWLTAKLAYEGLPSKTYLSKTLAQYTSKTCSNCGFTITSADYDRVLEKLKKTATGWMTTINGKELKVEGQITYYNRYKRQNVVKDLSVELDRLSEESVNNDISSWTKGRSGEALSLLKKRFSHRPVQEKFVCLNCGFETHADEQAALNIARSWLFLRSQEYKKYQTNKTTGNTDKRAFVETWQSFYRKKLKEVWKPAV

SEQ ID NO: 36024 - protein, 978 aa, synthetic construct
  REGION 1..978: note = engineered CasX variant
QEIKRINKIRRRLVKDSNTKKAGKTGPMKTLLVRVMTPDLRERLENLRKKPENIPQPISNTSRANLNKLLTDYTEMKKAILHVYWEEFQKDPVGLMSRVAQPASKKIDQNKLKPEMDEKGNLTTAGFACSQCGQPLFVYKLEQVSEKGKAYTNYFGRCNVAEHEKLILLAQLKPEKDSDEAVTYSLGKFGQRALDFYSIHVTKESTHPVKPLAQIAGNRYASPVGKALSDACMGTIASFLSKYQDIIIEHQKVVKGNQKRLESLRELAGKENLEYPSVTLPPQPHTKEGVDAYNEVIARVRTWWVNLNLWQKLKLSRDDAKPLLRLKGFPSFPLVERQANEVDWWDMVCNVKKLINEKKEDGKVFWQNLAGYKRQEALRPYLSSEEDRKKGKKFARYQLGDLLLHLEKKHGEDWGKVYDEAWERIDKKVEGLSKHIKLEEERRSEDAQSKAALTDWLRAKASFVIEGLKEADKDEFCRCELKLQKWYGDLRGKPFAIEAENSILDISGFSKQYNCAFIWQKDGVKKLNLYLIINYFKGGKLRFKKIKPEAFEANRFYTVINKKSGEIVPMEVNFNFDDPNLIILPLAFGKRQGREFIWNDLLSLETGSLKLANGRVIEKTLYNRRTRQDEPALFVALTFERREVLDSSNIKPMNLIGVDRGENIPAVIALTDPEGCPLSRFKDSLGNPTHILRIGESYKEKQRTIQAKKEVEQRRAGGYSRKYASKAKNLADDMVRNTARDLLYYAVTQDAMLIFENLSRGFGRQGKRTFMAERQYTRMEDWLTAKLAYEGLPSKTYLSKTLAQYTSKTCSNCGFTITSADYDRVLEKLKKTATGWMTTINGKELKVEGQITYYNRYKRQNVVKDLSVELDRLSEESVNNDISSWTKGRSGEALSLLKKRFSHRPVQEKFVCLNCGFETHADEQAALNIARSWLFLRSQEYKKYQTNKTTGNTDKRAFVETWQSFYRKKLKEVWKPAV

SEQ ID NO: 36025 - protein, 979 aa, synthetic construct
  REGION 1..979: note = engineered CasX variant
QEIKRINKIRRRLVKDSNTKKAGKTGPMKTLLVRVMTPDLRERLENLRKKPENIPQPISNTSRANLNKLLTDYTEMKKAILHVYWEEFQKDPVGLMSRVAQPASKKIDQNKLKPEMDEKGNLTTAGFACSQCGQPLFVYKLEQVSEKGKAYTNYFGRCNVAEHEKLILLAQLKPEKDSDEAVTYSLGKFGQRALDFYSIHVTKESTHPVKPLAQIAGNRYASYPVGKALSDACMGTIASFLSKYQDIIIEHQKVVKGNQKRLESLRELAGKENLEYPSVTLPPQPHTKEGVDAYNEVIARVRTWVNLNLWQKLKLSRDDAKPLLRLKGFPSFPLVERQQANEVDWWDMVCNVKKLINEKKEDGKVFWQNLAGYKRQEALRPYLSSEEDRKKGKKFARYQLGDLLLHLEKKHGEDWGKVYDEAWERIDKKVEGLSKHIKLEEERRSEDAQSKAALTDWLRAKASFVIEGLKEADKDEFCRCELKLQKWYGDLRGKPFAIEAENSILDISGFSKQYNCAFIWQKDGVKKLNLYLIINYFKGGKLRFKKIKPEAFEANRFYTVINKKSGEIVPMEVNFNFDDPNLIILPLAFGKRQGREFIWNDLLSLETGSLKLANGRVIEKTLYNRRTRQDEPALFVALTFERREVLDSSNIKPMNLIGVDRGENIPAVIALTDPEGCPLSRFKDSLGNPTHILRIGESYKEKQRTIQAKKEVEQRRAGGYSRKYASKAKNLADDMVRNTARDLLYYAVTQDAMLIFENLSRGFGRQGKRTFMAERQYTRMEDWLTAKLAYEGLPSKTYLSKTLAQYTSKTCSNCGFTITSADYDRVLEKLKKTATGWMTTINGKELKVEGQITYYNRYKRQNVVKDLSVELDRLSEESVNNDISSWTKGRSGEALSLLKKRFSHRPVQEKFVCLNCGFETHADEQAALNIARSWLFLRSQEYKKYQTNKTTGNTDKRAFVETWQSFYRKKLKEVWKPAV

SEQ ID NO: 36026 - protein, 979 aa, synthetic construct
  REGION 1..979: note = engineered CasX variant
QEIKRINKIRRRLVKDSNTKKAGKTGPMKTLLVRVMTPDLRERLENLRKKPENIPQPISNTSRANLNKLLTDYTEMKKAILHVYWEEFQKDPVGLMSRVAQPASKKIDQNKLKPEMDEKGNLTTAGFACSQCGQPLFVYKLEQVSEKGKAYTNYFGRCNVAEHEKLILLAQLKPEKDSDEAVTYSLGKFGQRALDFYSIHVTKESTHPVKPLAQIAGNRYASHPVGKALSDACMGTIASFLSKYQDIIIEHQKVVKGNQKRLESLRELAGKENLEYPSVTLPPQPHTKEGVDAYNEVIARVRTWVNLNLWQKLKLSRDDAKPLLRLKGFPSFPLVERQQANEVDWWDMVCNVKKLINEKKEDGKVFWQNLAGYKRQEALRPYLSSEEDRKKGKKFARYQLGDLLLHLEKKHGEDWGKVYDEAWERIDKKVEGLSKHIKLEEERRSEDAQSKAALTDWLRAKASFVIEGLKEADKDEFCRCELKLQKWYGDLRGKPFAIEAENSILDISGFSKQYNCAFIWQKDGVKKLNLYLIINYFKGGKLRFKKIKPEAFEANRFYTVINKKSGEIVPMEVNFNFDDPNLIILPLAFGKRQGREFIWNDLLSLETGSLKLANGRVIEKTLYNRRTRQDEPALFVALTFERREVLDSSNIKPMNLIGVDRGENIPAVIALTDPEGCPLSRFKDSLGNPTHILRIGESYKEKQRTIQAKKEVEQRRAGGYSRKYASKAKNLADDMVRNTARDLLYYAVTQDAMLIFENLSRGFGRQGKRTFMAERQYTRMEDWLTAKLAYEGLPSKTYLSKTLAQYTSKTCSNCGFTITSADYDRVLEKLKKTATGWMTTINGKELKVEGQITYYNRYKRQNVVKDLSVELDRLSEESVNNDISSWTKGRSGEALSLLKKRFSHRPVQEKFVCLNCGFETHADEQAALNIARSWLFLRSQEYKKYQTNKTTGNTDKRAFVETWQSFYRKKLKEVWKPAV

SEQ ID NO: 36027 - protein, 979 aa, synthetic construct
  REGION 1..979: note = engineered CasX variant
QEIKRINKIRRRLVKDSNTKKAGKTGPMKTLLVRVMTPDLRERLENLRKKPENIPQPISNTSRANLNKLLTDYTEMKKAILHVYWEEFQKDPVGLMSRVAQPASKKIDQNKLKPEMDEKGNLTTAGFACSQCGQPLFVYKLEQVSEKGKAYTNYFGRCNVAEHEKLILLAQLKPEKDSDEAVTYSLGKFGQRALDFYSIHVTKESTHPVKPLAQIAGNRYASSPVGKALSDACMGTIASFLSKYQDIIIEHQKVVKGNQKRLESLRELAGKENLEYPSVTLPPQPHTKEGVDAYNEVIARVRTWVNLNLWQKLKLSRDDAKPLLRLKGFPSFPLVERQQANEVDWWDMVCNVKKLINEKKEDGKVFWQNLAGYKRQEALRPYLSSEEDRKKGKKFARYQLGDLLLHLEKKHGEDWGKVYDEAWERIDKKVEGLSKHIKLEEERRSEDAQSKAALTDWLRAKASFVIEGLKEADKDEFCRCELKLQKWYGDLRGKPFAIEAENSILDISGFSKQYNCAFIWQKDGVKKLNLYLIINYFKGGKLRFKKIKPEAFEANRFYTVINKKSGEIVPMEVNFNFDDPNLIILPLAFGKRQGREFIWNDLLSLETGSLKLANGRVIEKTLYNRRTRQDEPALFVALTFERREVLDSSNIKPMNLIGVDRGENIPAVIALTDPEGCPLSRFKDSLGNPTHILRIGESYKEKQRTIQAKKEVEQRRAGGYSRKYASKAKNLADDMVRNTARDLLYYAVTQDAMLIFENLSRGFGRQGKRTFMAERQYTRMEDWLTAKLAYEGLPSKTYLSKTLAQYTSKTCSNCGFTITSADYDRVLEKLKKTATGWMTTINGKELKVEGQITYYNRYKRQNVVKDLSVELDRLSEESVNNDISSWTKGRSGEALSLLKKRFSHRPVQEKFVCLNCGFETHADEQAALNIARSWLFLRSQEYKKYQTNKTTGNTDKRAFVETWQSFYRKKLKEVWKPAV

SEQ ID NO: 36028 - protein, 979 aa, synthetic construct
  REGION 1..979: note = engineered CasX variant
QEIKRINKIRRRLVKDSNTKKAGKTGPMKTLLVRVMTPDLRERLENLRKKPENIPQPISNTSRANLNKLLTDYTEMKKAILHVYWEEFQKDPVGLMSRVAQPASKKIDQNKLKPEMDEKGNLTTAGFACSQCGQPLFVYKLEQVSEKGKAYTNYFGRCNVAEHEKLILLAQLKPEKDSDEAVTYSLGKFGQRALDFYSIHVTKESTHPVKPLAQIAGNRYASTPVGKALSDACMGTIASFLSKYQDIIIEHQKVVKGNQKRLESLRELAGKENLEYPSVTLPPQPHTKEGVDAYNEVIARVRTWVNLNLWQKLKLSRDDAKPLLRLKGFPSFPLVERQQANEVDWWDMVCNVKKLINEKKEDGKVFWQNLAGYKRQEALRPYLSSEEDRKKGKKFARYQLGDLLLHLEKKHGEDWGKVYDEAWERIDKKVEGLSKHIKLEEERRSEDAQSKAALTDWLRAKASFVIEGLKEADKDEFCRCELKLQKWYGDLRGKPFAIEAENSILDISGFSKQYNCAFIWQKDGVKKLNLYLIINYFKGGKLRFKKIKPEAFEANRFYTVINKKSGEIVPMEVNFNFDDPNLIILPLAFGKRQGREFIWNDLLSLETGSLKLANGRVIEKTLYNRRTRQDEPALFVALTFERREVLDSSNIKPMNLIGVDRGENIPAVIALTDPEGCPLSRFKDSLGNPTHILRIGESYKEKQRTIQAKKEVEQRRAGGYSRKYASKAKNLADDMVRNTARDLLYYAVTQDAMLIFENLSRGFGRQGKRTFMAERQYTRMEDWLTAKLAYEGLPSKTYLSKTLAQYTSKTCSNCGFTITSADYDRVLEKLKKTATGWMTTINGKELKVEGQITYYNRYKRQNVVKDLSVELDRLSEESVNNDISSWTKGRSGEALSLLKKRFSHRPVQEKFVCLNCGFETHADEQAALNIARSWLFLRSQEYKKYQTNKTTGNTDKRAFVETWQSFYRKKLKEVWKPAV

SEQ ID NO: 36029 - protein, 979 aa, synthetic construct
  REGION 1..979: note = engineered CasX variant
QEIKRINKIRRRLVKDSNTKKAGKTGPMKTLLVRVMTPDLRERLENLRKKPENIPQPISNTSRANLNKLLTDYTEMKKAILHVYWEEFQKDPVGLMSRVAQPASKKIDQNKLKPEMDEKGNLTTAGFACSQCGQPLFVYKLEQVSEKGKAYTNYFGRCNVAEHEKLILLAQLKPEKDSDEAVTYSLGKFGQRALDFYSIHVTKESTHPVKPLAQIAGNRYASAPVGKALSDACMGTIASFLSKYQDIIIEHQKVVKGNQKRLESLRELAGKENLEYPSVTLPPQPHTKEGVDAYNEVIARVRTWVNLNLWQKLKLSRDDAKPLLRLKGFPSFPLVERQQANEVDWWDMVCNVKKLINEKKEDGKVFWQNLAGYKRQEALRPYLSSEEDRKKGKKFARYQLGDLLLHLEKKHGEDWGKVYDEAWERIDKKVEGLSKHIKLEEERRSEDAQSKAALTDWLRAKASFVIEGLKEADKDEFCRCELKLQKWYGDLRGKPFAIEAENSILDISGFSKQYNCAFIWQKDGVKKLNLYLIINYFKGGKLRFKKIKPEAFEANRFYTVINKKSGEIVPMEVNFNFDDPNLIILPLAFGKRQGREFIWNDLLSLETGSLKLANGRVIEKTLYNRRTRQDEPALFVALTFERREVLDSSNIKPMNLIGVDRGENIPAVIALTDPEGCPLSRFKDSLGNPTHILRIGESYKEKQRTIQAKKEVEQRRAGGYSRKYASKAKNLADDMVRNTARDLLYYAVTQDAMLIFENLSRGFGRQGKRTFMAERQYTRMEDWLTAKLAYEGLPSKTYLSKTLAQYTSKTCSNCGFTITSADYDRVLEKLKKTATGWMTTINGKELKVEGQITYYNRYKRQNVVKDLSVELDRLSEESVNNDISSWTKGRSGEALSLLKKRFSHRPVQEKFVCLNCGFETHADEQAALNIARSWLFLRSQEYKKYQTNKTTGNTDKRAFVETWQSFYRKKLKEVWKPAV

SEQ ID NO: 36030 - protein, 979 aa, synthetic construct
  REGION 1..979: note = engineered CasX variant
QEIKRINKIRRRLVKDSNTKKAGKTGPMKTLLVRVMTPDLRERLENLRKKPENIPQPISNTSRANLNKLLTDYTEMKKAILHVYWEEFQKDPVGLMSRVAQPASKKIDQNKLKPEMDEKGNLTTAGFACSQCGQPLFVYKLEQVSEKGKAYTNYFGRCNVAEHEKLILLAQLKPEKDSDEAVTYSLGKFGQRALDFYSIHVTKESTHPVKPLAQIAGNRYASVPVGKALSDACMGTIASFLSKYQDIIIEHQKVVKGNQKRLESLRELAGKENLEYPSVTLPPQPHTKEGVDAYNEVIARVRTWVNLNLWQKLKLSRDDAKPLLRLKGFPSFPLVERQQANEVDWWDMVCNVKKLINEKKEDGKVFWQNLAGYKRQEALRPYLSSEEDRKKGKKFARYQLGDLLLHLEKKHGEDWGKVYDEAWERIDKKVEGLSKHIKLEEERRSEDAQSKAALTDWLRAKASFVIEGLKEADKDEFCRCELKLQKWYGDLRGKPFAIEAENSILDISGFSKQYNCAFIWQKDGVKKLNLYLIINYFKGGKLRFKKIKPEAFEANRFYTVINKKSGEIVPMEVNFNFDDPNLIILPLAFGKRQGREFIWNDLLSLETGSLKLANGRVIEKTLYNRRTRQDEPALFVALTFERREVLDSSNIKPMNLIGVDRGENIPAVIALTDPEGCPLSRFKDSLGNPTHILRIGESYKEKQRTIQAKKEVEQRRAGGYSRKYASKAKNLADDMVRNTARDLLYYAVTQDAMLIFENLSRGFGRQGKRTFMAERQYTRMEDWLTAKLAYEGLPSKTYLSKTLAQYTSKTCSNCGFTITSADYDRVLEKLKKTATGWMTTINGKELKVEGQITYYNRYKRQNVVKDLSVELDRLSEESVNNDISSWTKGRSGEALSLLKKRFSHRPVQEKFVCLNCGFETHADEQAALNIARSWLFLRSQEYKKYQTNKTTGNTDKRAFVETWQSFYRKKLKEVWKPAV

SEQ ID NO: 36031 - protein, 979 aa, synthetic construct
  REGION 1..979: note = engineered CasX variant
QEIKRINKIRRRLVKDSNTKKAGKTGPMKTLLVRVMTPDLRERLENLRKKPENIPQPISNTSRANLNKLLTDYTEMKKAILHVYWEEFQKDPVGLMSRVAQPASKKIDQNKLKPEMDEKGNLTTAGFACSQCGQPLFVYKLEQVSEKGKAYTNYFGRCNVAEHEKLIKLAQLKPEKDSDEAVTYSLGKFGQRALDFYSIHVTKESTHPVKPLAQIAGNRYASGPVGKALSDACMGTIASFLSKYQDIIIEHQKVVKGNQKRLESLRELAGKENLEYPSVTLPPQPHTKEGVDAYNEVIARVRTWVNLNLWQKLKLSRDDAKPLLRLKGFPSFPLVERQQANEVDWWDMVCNVKKLINEKKEDGKVFWQNLAGYKRQEALRPYLSSEEDRKKGKKFARYQLGDLLLHLEKKHGEDWGKVYDEAWERIDKKVEGLSKHIKLEEERRSEDAQSKAALTDWLRAKASFVIEGLKEADKDEFCRCELKLQKWYGDLRGKPFAIEAENSILDISGFSKQYNCAFIWQKDGVKKLNLYLIINYFKGGKLRFKKIKPEAFEANRFYTVINKKSGEIVPMEVNFNFDDPNLIILPLAFGKRQGREFIWNDLLSLETGSLKLANGRVIEKTLYNRRTRQDEPALFVALTFERREVLDSSNIKPMNLIGVDRGENIPAVIALTDPEGCPLSRFKDSLGNPTHILRIGESYKEKQRTIQAKKEVEQRRAGGYSRKYASKAKNLADDMVRNTARDLLYYAVTQDAMLIFENLSRGFGRQGKRTFMAERQYTRMEDWLTAKLAYEGLPSKTYLSKTLAQYTSKTCSNCGFTITSADYDRVLEKLKKTATGWMTTINGKELKVEGQITYYNRYKRQNVVKDLSVELDRLSEESVNNDISSWTKGRSGEALSLLKKRFSHRPVQEKFVCLNCGFETHADEQAALNIARSWLFLRSQEYKKYQTNKTTGNTDKRAFVETWQSFYRKKLKEVWKPAV

SEQ ID NO: 36032 - protein, 978 aa, synthetic construct
  REGION 1..978: note = engineered CasX variant
QEIKRINKIRRRLVKDSNTKKAGKTGPMKTLLVRVMTPDLRERLENLRKKPENIPQPISNTSRANLNKLLTDYTEMKKAILHVYWEEFQKDPVGLMSRVAQPASKKIDQNKLKPEMDEKGNLTTAGFACSQCGQPLFVYKLEQVSEKGKAYTNYFGRCNVAEHEKLILLAQLKPEKDSDEAVTYSLGKFGQRALDFYSIHVTKESTHPVKPLAQIAGNRYASPVGKALSDACMGTIASFLSKYQDIIIEHQKVVKGNQKRLESLRELAGKENLEYPSVTLPPQPHTKEGVDAYNEVIARVRTWVNLNLWQKLKLSRDDAKPLLRLKGFPSFPLVERQQANEVDWWDMVCNVKKLINEKKEDGKVFWQNLAGYKRQEALRPYLSSEEDRKKGKKFARYQLGDLLLHLEKKHGEDWGKVYDEAWERIDKKVEGLSKHIKLEEERRSEDAQSKAALTDWLRAKASFVIEGLKEADKDEFCRCELKLQKWYGDLRGKPFAIEAENSILDISGFSKQYNCAFIWQKDGVKKLNLYLIINYFKGGKLRFKKIKPEAFEANRFYTVINKKSGEIVPMEVNFNFDDPNLIILPLAFGKRQGREFIWNDLLSLETGSLKLANGRVIEKTLYNRRTRQDEPALFVALTFERREVLDSSNIKPMNLIGVDRGENIPAVIALTDPEGCPLSRFKDSLGNPTHILRIGESYKEKQRTIQAKKEVEQRRAGGYSRKYASKAKNLADDMVRNTARDLLYYAVTQDAMLIFENLSRGFGRQGKRTFMAERQYTRMEDWLTAKLAYEGLPSKTYLSKTLAQYTSKTCSNCGFTITSADYDRVLEKLKKTATGWMTTINGKELKVEGQITYYNRYKRQNVVKDLSVELDRLSEESVNNDISSWTKGRSGEALSLLKKRFSHRPVQEKFVCLNCGFETHADEQAALNIARSWLFLRSQEYKKYQTNKTTGNTDKRAFVETWQSFYRKKLKEVWKPAV

SEQ ID NO: 36033 - protein, 979 aa, synthetic construct
  REGION 1..979: note = engineered CasX variant
QEIKRINKIRRRLVKDSNTKKAGKTGPMKTLLVRVMTPDLRERLENLRKKPENIPQPISNTSRANLNKLLTDYTEMKKAILHVYWEEFQKDPVGLMSRVAQPASKKIDQNKLKPEMDEKGNLTTAGFACSQCGQPLFVYKLEQVSEKGKAYTNYFGRCNVAEHEKLILLAQLKPEKDSDEAVTYSLGKFGQRALDFYSIHVTKESTHPVKPLAQIAGNRYASYPVGKALSDACMGTIASFLSKYQDIIIEHQKVVKGNQKRLESLRELAGKENLEYPSVTLPPQPHTKEGVDAYNEVIARVRTWVNLNLWQKLKLSRDDAKPLLRLKGFPSFPLVERQANAEVDWWDMVCNVKKLINEKKEDGKVFWQNLAGYKRQEALRPYLSSEEDRKKGKKFARYQLGDLLLHLEKKHGEDWGKVYDEAWERIDKKVEGLSKHIKLEEERRSEDAQSKAALTDWLRAKASFVIEGLKEADKDEFCRCELKLQKWYGDLRGKPFAIEAENSILDISGFSKQYNCAFIWQKDGVKKLNLYLIINYFKGGKLRFKKIKPEAFEANRFYTVINKKSGEIVPMEVNFNFDDPNLIILPLAFGKRQGREFIWNDLLSLETGSLKLANGRVIEKTLYNRRTRQDEPALFVALTFERREVLDSSNIKPMNLIGVDRGENIPAVIALTDPEGCPLSRFKDSLGNPTHILRIGESYKEKQRTIQAKKEVEQRRAGGYSRKYASKAKNLADDMVRNTARDLLYYAVTQDAMLIFENLSRGFGRQGKRTFMAERQYTRMEDWLTAKLAYEGLPSKTYLSKTLAQYTSKTCSNCGFTITSADYDRVLEKLKKTATGWMTTINGKELKVEGQITYYNRYKRQNVVKDLSVELDRLSEESVNNDISSWTKGRSGEALSLLKKRFSHRPVQEKFVCLNCGFETHADEQAALNIARSWLFLRSQEYKKYQTNKTTGNTDKRAFVETWQSFYRKKLKEVWKPAV

SEQ ID NO: 36034 - protein, 979 aa, synthetic construct
  REGION 1..979: note = engineered CasX variant
QEIKRINKIRRRLVKDSNTKKAGKTGPMKTLLVRVMTPDLRERLENLRKKPENIPQPISNTSRANLNKLLTDYTEMKKAILHVYWEEFQKDPVGLMSRVAQPASKKIDQNKLKPEMDEKGNLTTAGFACSQCGQPLFVYKLEQVSEKGKAYTNYFGRCNVAEHEKLILLAQLKPEKDSDEAVTYSLGKFGQRALDFYSIHVTKESTHPVKPLAQIAGNRYASHPVGKALSDACMGTIASFLSKYQDIIIEHQKVVKGNQKRLESLRELAGKENLEYPSVTLPPQPHTKEGVDAYNEVIARVRTWVNLNLWQKLKLSRDDAKPLLRLKGFPSFPLVERQANAEVDWWDMVCNVKKLINEKKEDGKVFWQNLAGYKRQEALRPYLSSEEDRKKGKKFARYQLGDLLLHLEKKHGEDWGKVYDEAWERIDKKVEGLSKHIKLEEERRSEDAQSKAALTDWLRAKASFVIEGLKEADKDEFCRCELKLQKWYGDLRGKPFAIEAENSILDISGFSKQYNCAFIWQKDGVKKLNLYLIINYFKGGKLRFKKIKPEAFEANRFYTVINKKSGEIVPMEVNFNFDDPNLIILPLAFGKRQGREFIWNDLLSLETGSLKLANGRVIEKTLYNRRTRQDEPALFVALTFERREVLDSSNIKPMNLIGVDRGENIPAVIALTDPEGCPLSRFKDSLGNPTHILRIGESYKEKQRTIQAKKEVEQRRAGGYSRKYASKAKNLADDMVRNTARDLLYYAVTQDAMLIFENLSRGFGRQGKRTFMAERQYTRMEDWLTAKLAYEGLPSKTYLSKTLAQYTSKTCSNCGFTITSADYDRVLEKLKKTATGWMTTINGKELKVEGQITYYNRYKRQNVVKDLSVELDRLSEESVNNDISSWTKGRSGEALSLLKKRFSHRPVQEKFVCLNCGFETHADEQAALNIARSWLFLRSQEYKKYQTNKTTGNTDKRAFVETWQSFYRKKLKEVWKPAV

SEQ ID NO: 36035 - protein, 979 aa, synthetic construct
  REGION 1..979: note = engineered CasX variant
QEIKRINKIRRRLVKDSNTKKAGKTGPMKTLLVRVMTPDLRERLENLRKKPENIPQPISNTSRANLNKLLTDYTEMKKAILHVYWEEFQKDPVGLMSRVAQPASKKIDQNKLKPEMDEKGNLTTAGFACSQCGQPLFVYKLEQVSEKGKAYTNYFGRCNVAEHEKLILLAQLKPEKDSDEAVTYSLGKFGQRALDFYSIHVTKESTHPVKPLAQIAGNRYASSPVGKALSDACMGTIASFLSKYQDIIIEHQKVVKGNQKRLESLRELAGKENLEYPSVTLPPQPHTKEGVDAYNEVIARVRTWVNLNLWQKLKLSRDDAKPLLRLKGFPSFPLVERQANAEVDWWDMVCNVKKLINEKKEDGKVFWQNLAGYKRQEALRPYLSSEEDRKKGKKFARYQLGDLLLHLEKKHGEDWGKVYDEAWERIDKKVEGLSKHIKLEEERRSEDAQSKAALTDWLRAKASFVIEGLKEADKDEFCRCELKLQKWYGDLRGKPFAIEAENSILDISGFSKQYNCAFIWQKDGVKKLNLYLIINYFKGGKLRFKKIKPEAFEANRFYTVINKKSGEIVPMEVNFNFDDPNLIILPLAFGKRQGREFIWNDLLSLETGSLKLANGRVIEKTLYNRRTRQDEPALFVALTFERREVLDSSNIKPMNLIGVDRGENIPAVIALTDPEGCPLSRFKDSLGNPTHILRIGESYKEKQRTIQAKKEVEQRRAGGYSRKYASKAKNLADDMVRNTARDLLYYAVTQDAMLIFENLSRGFGRQGKRTFMAERQYTRMEDWLTAKLAYEGLPSKTYLSKTLAQYTSKTCSNCGFTITSADYDRVLEKLKKTATGWMTTINGKELKVEGQITYYNRYKRQNVVKDLSVELDRLSEESVNNDISSWTKGRSGEALSLLKKRFSHRPVQEKFVCLNCGFETHADEQAALNIARSWLFLRSQEYKKYQTNKTTGNTDKRAFVETWQSFYRKKLKEVWKPAV

SEQ ID NO: 36036 - protein, 979 aa, synthetic construct
  REGION 1..979: note = engineered CasX variant
QEIKRINKIRRRLVKDSNTKKAGKTGPMKTLLVRVMTPDLRERLENLRKKPENIPQPISNTSRANLNKLLTDYTEMKKAILHVYWEEFQKDPVGLMSRVAQPASKKIDQNKLKPEMDEKGNLTTAGFACSQCGQPLFVYKLEQVSEKGKAYTNYFGRCNVAEHEKLILLAQLKPEKDSDEAVTYSLGKFGQRALDFYSIHVTKESTHPVKPLAQIAGNRYASTPVGKALSDACMGTIASFLSKYQDIIIEHQKVVKGNQKRLESLRELAGKENLEYPSVTLPPQPHTKEGVDAYNEVIARVRTWVNLNLWQKLKLSRDDAKPLLRLKGFPSFPLVERQANAEVDWWDMVCNVKKLINEKKEDGKVFWQNLAGYKRQEALRPYLSSEEDRKKGKKFARYQLGDLLLHLEKKHGEDWGKVYDEAWERIDKKVEGLSKHIKLEEERRSEDAQSKAALTDWLRAKASFVIEGLKEADKDEFCRCELKLQKWYGDLRGKPFAIEAENSILDISGFSKQYNCAFIWQKDGVKKLNLYLIINYFKGGKLRFKKIKPEAFEANRFYTVINKKSGEIVPMEVNFNFDDPNLIILPLAFGKRQGREFIWNDLLSLETGSLKLANGRVIEKTLYNRRTRQDEPALFVALTFERREVLDSSNIKPMNLIGVDRGENIPAVIALTDPEGCPLSRFKDSLGNPTHILRIGESYKEKQRTIQAKKEVEQRRAGGYSRKYASKAKNLADDMVRNTARDLLYYAVTQDAMLIFENLSRGFGRQGKRTFMAERQYTRMEDWLTAKLAYEGLPSKTYLSKTLAQYTSKTCSNCGFTITSADYDRVLEKLKKTATGWMTTINGKELKVEGQITYYNRYKRQNVVKDLSVELDRLSEESVNNDISSWTKGRSGEALSLLKKRFSHRPVQEKFVCLNCGFETHADEQAALNIARSWLFLRSQEYKKYQTNKTTGNTDKRAFVETWQSFYRKKLKEVWKPAV

SEQ ID NO: 36037 - protein, 979 aa, synthetic construct
  REGION 1..979: note = engineered CasX variant
QEIKRINKIRRRLVKDSNTKKAGKTGPMKTLLVRVMTPDLRERLENLRKKPENIPQPISNTSRANLNKLLTDYTEMKKAILHVYWEEFQKDPVGLMSRVAQPASKKIDQNKLKPEMDEKGNLTTAGFACSQCGQPLFVYKLEQVSEKGKAYTNYFGRCNVAEHEKLILLAQLKPEKDSDEAVTYSLGKFGQRALDFYSIHVTKESTHPVKPLAQIAGNRYASAPVGKALSDACMGTIASFLSKYQDIIIEHQKVVKGNQKRLESLRELAGKENLEYPSVTLPPQPHTKEGVDAYNEVIARVRTWVNLNLWQKLKLSRDDAKPLLRLKGFPSFPLVERQANAEVDWWDMVCNVKKLINEKKEDGKVFWQNLAGYKRQEALRPYLSSEEDRKKGKKFARYQLGDLLLHLEKKHGEDWGKVYDEAWERIDKKVEGLSKHIKLEEERRSEDAQSKAALTDWLRAKASFVIEGLKEADKDEFCRCELKLQKWYGDLRGKPFAIEAENSILDISGFSKQYNCAFIWQKDGVKKLNLYLIINYFKGGKLRFKKIKPEAFEANRFYTVINKKSGEIVPMEVNFNFDDPNLIILPLAFGKRQGREFIWNDLLSLETGSLKLANGRVIEKTLYNRRTRQDEPALFVALTFERREVLDSSNIKPMNLIGVDRGENIPAVIALTDPEGCPLSRFKDSLGNPTHILRIGESYKEKQRTIQAKKEVEQRRAGGYSRKYASKAKNLADDMVRNTARDLLYYAVTQDAMLIFENLSRGFGRQGKRTFMAERQYTRMEDWLTAKLAYEGLPSKTYLSKTLAQYTSKTCSNCGFTITSADYDRVLEKLKKTATGWMTTINGKELKVEGQITYYNRYKRQNVVKDLSVELDRLSEESVNNDISSWTKGRSGEALSLLKKRFSHRPVQEKFVCLNCGFETHADEQAALNIARSWLFLRSQEYKKYQTNKTTGNTDKRAFVETWQSFYRKKLKEVWKPAV

SEQ ID NO: 36038 - protein, 979 aa, synthetic construct
  REGION 1..979: note = engineered CasX variant
QEIKRINKIRRRLVKDSNTKKAGKTGPMKTLLVRVMTPDLRERLENLRKKPENIPQPISNTSRANLNKLLTDYTEMKKAILHVYWEEFQKDPVGLMSRVAQPASKKIDQNKLKPEMDEKGNLTTAGFACSQCGQPLFVYKLEQVSEKGKAYTNYFGRCNVAEHEKLILLAQLKPEKDSDEAVTYSLGKFGQRALDFYSIHVTKESTHPVKPLAQIAGNRYASVPVGKALSDACMGTIASFLSKYQDIIIEHQKVVKGNQKRLESLRELAGKENLEYPSVTLPPQPHTKEGVDAYNEVIARVRTWVNLNLWQKLKLSRDDAKPLLRLKGFPSFPLVERQANAEVDWWDMVCNVKKLINEKKEDGKVFWQNLAGYKRQEALRPYLSSEEDRKKGKKFARYQLGDLLLHLEKKHGEDWGKVYDEAWERIDKKVEGLSKHIKLEEERRSEDAQSKAALTDWLRAKASFVIEGLKEADKDEFCRCELKLQKWYGDLRGKPFAIEAENSILDISGFSKQYNCAFIWQKDGVKKLNLYLIINYFKGGKLRFKKIKPEAFEANRFYTVINKKSGEIVPMEVNFNFDDPNLIILPLAFGKRQGREFIWNDLLSLETGSLKLANGRVIEKTLYNRRTRQDEPALFVALTFERREVLDSSNIKPMNLIGVDRGENIPAVIALTDPEGCPLSRFKDSLGNPTHILRIGESYKEKQRTIQAKKEVEQRRAGGYSRKYASKAKNLADDMVRNTARDLLYYAVTQDAMLIFENLSRGFGRQGKRTFMAERQYTRMEDWLTAKLAYEGLPSKTYLSKTLAQYTSKTCSNCGFTITSADYDRVLEKLKKTATGWMTTINGKELKVEGQITYYNRYKRQNVVKDLSVELDRLSEESVNNDISSWTKGRSGEALSLLKKRFSHRPVQEKFVCLNCGFETHADEQAALNIARSWLFLRSQEYKKYQTNKTTGNTDKRAFVETWQSFYRKKLKEVWKPAV

SEQ ID NO: 36039 - protein, 979 aa, synthetic construct
  REGION 1..979: note = engineered CasX variant
QEIKRINKIRRRLVKDSNTKKAGKTGPMKTLLVRVMTPDLRERLENLRKKPENIPQPISNTSRANLNKLLTDYTEMKKAILHVYWEEFQKDPVGLMSRVAQPASKKIDQNKLKPEMDEKGNLTTAGFACSQCGQPLFVYKLEQVSEKGKAYTNYFGRCNVAEHEKLIKLAQLKPEKDSDEAVTYSLGKFGQRALDFYSIHVTKESTHPVKPLAQIAGNRYASGPVGKALSDACMGTIASFLSKYQDIIIEHQKVVKGNQKRLESLRELAGKENLEYPSVTLPPQPHTKEGVDAYNEVIARVRTWVNLNLWQKLKLSRDDAKPLLRLKGFPSFPLVERQANAEVDWWDMVCNVKKLINEKKEDGKVFWQNLAGYKRQEALRPYLSSEEDRKKGKKFARYQLGDLLLHLEKKHGEDWGKVYDEAWERIDKKVEGLSKHIKLEEERRSEDAQSKAALTDWLRAKASFVIEGLKEADKDEFCRCELKLQKWYGDLRGKPFAIEAENSILDISGFSKQYNCAFIWQKDGVKKLNLYLIINYFKGGKLRFKKIKPEAFEANRFYTVINKKSGEIVPMEVNFNFDDPNLIILPLAFGKRQGREFIWNDLLSLETGSLKLANGRVIEKTLYNRRTRQDEPALFVALTFERREVLDSSNIKPMNLIGVDRGENIPAVIALTDPEGCPLSRFKDSLGNPTHILRIGESYKEKQRTIQAKKEVEQRRAGGYSRKYASKAKNLADDMVRNTARDLLYYAVTQDAMLIFENLSRGFGRQGKRTFMAERQYTRMEDWLTAKLAYEGLPSKTYLSKTLAQYTSKTCSNCGFTITSADYDRVLEKLKKTATGWMTTINGKELKVEGQITYYNRYKRQNVVKDLSVELDRLSEESVNNDISSWTKGRSGEALSLLKKRFSHRPVQEKFVCLNCGFETHADEQAALNIARSWLFLRSQEYKKYQTNKTTGNTDKRAFVETWQSFYRKKLKEVWKPAV

SEQ ID NO: 36040 - protein, 978 aa, synthetic construct
  REGION 1..978: note = engineered CasX variant
QEIKRINKIRRRLVKDSNTKKAGKTGPMKTLLVRVMTPDLRERLENLRKKPENIPQPISNTSRANLNKLLTDYTEMKKAILHVYWEEFQKDPVGLMSRVAQPASKKIDQNKLKPEMDEKGNLTTAGFACSQCGQPLFVYKLEQVSEKGKAYTNYFGRCNVAEHEKLILLAQLKPEKDSDEAVTYSLGKFGQRALDFYSIHVTKESTHPVKPLAQIAGNRYASPVGKALSDACMGTIASFLSKYQDIIIEHQKVVKGNQKRLESLRELAGKENLEYPSVTLPPQPHTKEGVDAYNEVIARVRTWVNLNLWQKLKLSRDDAKPLLRLKGFPSFPLVERQANAEVDWWDMVCNVKKLINEKKEDGKVFWQNLAGYKRQEALRPYLSSEEDRKKGKKFARYQLGDLLLHLEKKHGEDWGKVYDEAWERIDKKVEGLSKHIKLEEERRSEDAQSKAALTDWLRAKASFVIEGLKEADKDEFCRCELKLQKWYGDLRGKPFAIEAENSILDISGFSKQYNCAFIWQKDGVKKLNLYLIINYFKGGKLRFKKIKPEAFEANRFYTVINKKSGEIVPMEVNFNFDDPNLIILPLAFGKRQGREFIWNDLLSLETGSLKLANGRVIEKTLYNRRTRQDEPALFVALTFERREVLDSSNIKPMNLIGVDRGENIPAVIALTDPEGCPLSRFKDSLGNPTHILRIGESYKEKQRTIQAKKEVEQRRAGGYSRKYASKAKNLADDMVRNTARDLLYYAVTQDAMLIFENLSRGFGRQGKRTFMAERQYTRMEDWLTAKLAYEGLPSKTYLSKTLAQYTSKTCSNCGFTITSADYDRVLEKLKKTATGWMTTINGKELKVEGQITYYNRYKRQNVVKDLSVELDRLSEESVNNDISSWTKGRSGEALSLLKKRFSHRPVQEKFVCLNCGFETHADEQAALNIARSWLFLRSQEYKKYQTNKTTGNTDKRAFVETWQSFYRKKLKEVWKPAV

SEQ ID NO: 36041 - protein, 978 aa, synthetic construct
  REGION 1..978: note = engineered CasX variant
QEIKRINKIRRRLVKDSNTKKAGKTGPMKTLLVRVMTPDLRERLENLRKKPENIPQPISNTSRANLNKLLTDYTEMKKAILHVYWEEFQKDPVGLMSRVAQPASKKIDQNKLKPEMDEKGNLTTAGFACSQCGQPLFVYKLEQVSEKGKAYTNYFGRCNVAEHEKLILLAQLKPEKDSDEAVTYSLGKFGQRALDFYSIHVTKESTHPVKPLAQIAGNRYASYPVGKALSDACMGTIASFLSKYQDIIIEHQKVVKGNQKRLESLRELAGKENLEYPSVTLPPQPHTKEGVDAYNEVIARVRTWVNLNLWQKLKLSRDDAKPLLRLKGFPSFPLVERQANEVDWWDMVCNVKKLINEKKEDGKVFWQNLAGYKRQEALRPYLSSEEDRKKGKKFARTQLGDLLLHLEKKHGEDWGKVYDEAWERIDKKVEGLSKHIKLEEERRSEDAQSKAALTDWLRAKASFVIEGLKEADKDEFCRCELKLQKWYGDLRGKPFAIEAENSILDISGFSKQYNCAFIWQKDGVKKLNLYLIINYFKGGKLRFKKIKPEAFEANRFYTVINKKSGEIVPMEVNFNFDDPNLIILPLAFGKRQGREFIWNDLLSLETGSLKLANGRVIEKTLYNRRTRQDEPALFVALTFERREVLDSSNIKPMNLIGVDRGENIPAVIALTDPEGCPLSRFKDSLGNPTHILRIGESYKEKQRTIQAKKEVEQRRAGGYSRKYASKAKNLADDMVRNTARDLLYYAVTQDAMLIFENLSRGFGRQGKRTFMAERQYTRMEDWLTAKLAYEGLPSKTYLSKTLAQYTSKTCSNCGFTITSADYDRVLEKLKKTATGWMTTINGKELKVEGQITYYNRYKRQNVVKDLSVELDRLSEESVNNDISSWTKGRSGEALSLLKKRFSHRPVQEKFVCLNCGFETHADEQAALNIARSWLFLRSQEYKKYQTNKTTGNTDKRAFVETWQSFYRKKLKEVWKPAV

SEQ ID NO: 36042 - protein, 978 aa, synthetic construct
  REGION 1..978: note = engineered CasX variant
QEIKRINKIRRRLVKDSNTKKAGKTGPMKTLLVRVMTPDLRERLENLRKKPENIPQPISNTSRANLNKLLTDYTEMKKAILHVYWEEFQKDPVGLMSRVAQPASKKIDQNKLKPEMDEKGNLTTAGFACSQCGQPLFVYKLEQVSEKGKAYTNYFGRCNVAEHEKLILLAQLKPEKDSDEAVTYSLGKFGQRALDFYSIHVTKESTHPVKPLAQIAGNRYASHPVGKALSDACMGTIASFLSKYQDIIIEHQKVVKGNQKRLESLRELAGKENLEYPSVTLPPQPHTKEGVDAYNEVIARVRTWVNLNLWQKLKLSRDDAKPLLRLKGFPSFPLVERQANEVDWWDMVCNVKKLINEKKEDGKVFWQNLAGYKRQEALRPYLSSEEDRKKGKKFARTQLGDLLLHLEKKHGEDWGKVYDEAWERIDKKVEGLSKHIKLEEERRSEDAQSKAALTDWLRAKASFVIEGLKEADKDEFCRCELKLQKWYGDLRGKPFAIEAENSILDISGFSKQYNCAFIWQKDGVKKLNLYLIINYFKGGKLRFKKIKPEAFEANRFYTVINKKSGEIVPMEVNFNFDDPNLIILPLAFGKRQGREFIWNDLLSLETGSLKLANGRVIEKTLYNRRTRQDEPALFVALTFERREVLDSSNIKPMNLIGVDRGENIPAVIALTDPEGCPLSRFKDSLGNPTHILRIGESYKEKQRTIQAKKEVEQRRAGGYSRKYASKAKNLADDMVRNTARDLLYYAVTQDAMLIFENLSRGFGRQGKRTFMAERQYTRMEDWLTAKLAYEGLPSKTYLSKTLAQYTSKTCSNCGFTITSADYDRVLEKLKKTATGWMTTINGKELKVEGQITYYNRYKRQNVVKDLSVELDRLSEESVNNDISSWTKGRSGEALSLLKKRFSHRPVQEKFVCLNCGFETHADEQAALNIARSWLFLRSQEYKKYQTNKTTGNTDKRAFVETWQSFYRKKLKEVWKPAV

SEQ ID NO: 36043 - protein, 978 aa, synthetic construct
  REGION 1..978: note = engineered CasX variant
QEIKRINKIRRRLVKDSNTKKAGKTGPMKTLLVRVMTPDLRERLENLRKKPENIPQPISNTSRANLNKLLTDYTEMKKAILHVYWEEFQKDPVGLMSRVAQPASKKIDQNKLKPEMDEKGNLTTAGFACSQCGQPLFVYKLEQVSEKGKAYTNYFGRCNVAEHEKLILLAQLKPEKDSDEAVTYSLGKFGQRALDFYSIHVTKESTHPVKPLAQIAGNRYASSPVGKALSDACMGTIASFLSKYQDIIIEHQKVVKGNQKRLESLRELAGKENLEYPSVTLPPQPHTKEGVDAYNEVIARVRTWVNLNLWQKLKLSRDDAKPLLRLKGFPSFPLVERQANEVDWWDMVCNVKKLINEKKEDGKVFWQNLAGYKRQEALRPYLSSEEDRKKGKKFARTQLGDLLLHLEKKHGEDWGKVYDEAWERIDKKVEGLSKHIKLEEERRSEDAQSKAALTDWLRAKASFVIEGLKEADKDEFCRCELKLQKWYGDLRGKPFAIEAENSILDISGFSKQYNCAFIWQKDGVKKLNLYLIINYFKGGKLRFKKIKPEAFEANRFYTVINKKSGEIVPMEVNFNFDDPNLIILPLAFGKRQGREFIWNDLLSLETGSLKLANGRVIEKTLYNRRTRQDEPALFVALTFERREVLDSSNIKPMNLIGVDRGENIPAVIALTDPEGCPLSRFKDSLGNPTHILRIGESYKEKQRTIQAKKEVEQRRAGGYSRKYASKAKNLADDMVRNTARDLLYYAVTQDAMLIFENLSRGFGRQGKRTFMAERQYTRMEDWLTAKLAYEGLPSKTYLSKTLAQYTSKTCSNCGFTITSADYDRVLEKLKKTATGWMTTINGKELKVEGQITYYNRYKRQNVVKDLSVELDRLSEESVNNDISSWTKGRSGEALSLLKKRFSHRPVQEKFVCLNCGFETHADEQAALNIARSWLFLRSQEYKKYQTNKTTGNTDKRAFVETWQSFYRKKLKEVWKPAV

SEQ ID NO: 36044 - protein, 978 aa, synthetic construct
  REGION 1..978: note = engineered CasX variant
QEIKRINKIRRRLVKDSNTKKAGKTGPMKTLLVRVMTPDLRERLENLRKKPENIPQPISNTSRANLNKLLTDYTEMKKAILHVYWEEFQKDPVGLMSRVAQPASKKIDQNKLKPEMDEKGNLTTAGFACSQCGQPLFVYKLEQVSEKGKAYTNYFGRCNVAEHEKLILLAQLKPEKDSDEAVTYSLGKFGQRALDFYSIHVTKESTHPVKPLAQIAGNRYASTPVGKALSDACMGTIASFLSKYQDIIIEHQKVVKGNQKRLESLRELAGKENLEYPSVTLPPQPHTKEGVDAYNEVIARVRTWVNLNLWQKLKLSRDDAKPLLRLKGFPSFPLVERQANEVDWWDMVCNVKKLINEKKEDGKVFWQNLAGYKRQEALRPYLSSEEDRKKGKKFARTQLGDLLLHLEKKHGEDWGKVYDEAWERIDKKVEGLSKHIKLEEERRSEDAQSKAALTDWLRAKASFVIEGLKEADKDEFCRCELKLQKWYGDLRGKPFAIEAENSILDISGFSKQYNCAFIWQKDGVKKLNLYLIINYFKGGKLRFKKIKPEAFEANRFYTVINKKSGEIVPMEVNFNFDDPNLIILPLAFGKRQGREFIWNDLLSLETGSLKLANGRVIEKTLYNRRTRQDEPALFVALTFERREVLDSSNIKPMNLIGVDRGENIPAVIALTDPEGCPLSRFKDSLGNPTHILRIGESYKEKQRTIQAKKEVEQRRAGGYSRKYASKAKNLADDMVRNTARDLLYYAVTQDAMLIFENLSRGFGRQGKRTFMAERQYTRMEDWLTAKLAYEGLPSKTYLSKTLAQYTSKTCSNCGFTITSADYDRVLEKLKKTATGWMTTINGKELKVEGQITYYNRYKRQNVVKDLSVELDRLSEESVNNDISSWTKGRSGEALSLLKKRFSHRPVQEKFVCLNCGFETHADEQAALNIARSWLFLRSQEYKKYQTNKTTGNTDKRAFVETWQSFYRKKLKEVWKPAV

SEQ ID NO: 36045 - protein, 978 aa, synthetic construct
  REGION 1..978: note = engineered CasX variant
QEIKRINKIRRRLVKDSNTKKAGKTGPMKTLLVRVMTPDLRERLENLRKKPENIPQPISNTSRANLNKLLTDYTEMKKAILHVYWEEFQKDPVGLMSRVAQPASKKIDQNKLKPEMDEKGNLTTAGFACSQCGQPLFVYKLEQVSEKGKAYTNYFGRCNVAEHEKLILLAQLKPEKDSDEAVTYSLGKFGQRALDFYSIHVTKESTHPVKPLAQIAGNRYASAPVGKALSDACMGTIASFLSKYQDIIIEHQKVVKGNQKRLESLRELAGKENLEYPSVTLPPQPHTKEGVDAYNEVIARVRTWVNLNLWQKLKLSRDDAKPLLRLKGFPSFPLVERQANEVDWWDMVCNVKKLINEKKEDGKVFWQNLAGYKRQEALRPYLSSEEDRKKGKKFARTQLGDLLLHLEKKHGEDWGKVYDEAWERIDKKVEGLSKHIKLEEERRSEDAQSKAALTDWLRAKASFVIEGLKEADKDEFCRCELKLQKWYGDLRGKPFAIEAENSILDISGFSKQYNCAFIWQKDGVKKLNLYLIINYFKGGKLRFKKIKPEAFEANRFYTVINKKSGEIVPMEVNFNFDDPNLIILPLAFGKRQGREFIWNDLLSLETGSLKLANGRVIEKTLYNRRTRQDEPALFVALTFERREVLDSSNIKPMNLIGVDRGENIPAVIALTDPEGCPLSRFKDSLGNPTHILRIGESYKEKQRTIQAKKEVEQRRAGGYSRKYASKAKNLADDMVRNTARDLLYYAVTQDAMLIFENLSRGFGRQGKRTFMAERQYTRMEDWLTAKLAYEGLPSKTYLSKTLAQYTSKTCSNCGFTITSADYDRVLEKLKKTATGWMTTINGKELKVEGQITYYNRYKRQNVVKDLSVELDRLSEESVNNDISSWTKGRSGEALSLLKKRFSHRPVQEKFVCLNCGFETHADEQAALNIARSWLFLRSQEYKKYQTNKTTGNTDKRAFVETWQSFYRKKLKEVWKPAV

SEQ ID NO: 36046 - protein, 978 aa, synthetic construct
  REGION 1..978: note = engineered CasX variant
QEIKRINKIRRRLVKDSNTKKAGKTGPMKTLLVRVMTPDLRERLENLRKKPENIPQPISNTSRANLNKLLTDYTEMKKAILHVYWEEFQKDPVGLMSRVAQPASKKIDQNKLKPEMDEKGNLTTAGFACSQCGQPLFVYKLEQVSEKGKAYTNYFGRCNVAEHEKLILLAQLKPEKDSDEAVTYSLGKFGQRALDFYSIHVTKESTHPVKPLAQIAGNRYASVPVGKALSDACMGTIASFLSKYQDIIIEHQKVVKGNQKRLESLRELAGKENLEYPSVTLPPQPHTKEGVDAYNEVIARVRTWVNLNLWQKLKLSRDDAKPLLRLKGFPSFPLVERQANEVDWWDMVCNVKKLINEKKEDGKVFWQNLAGYKRQEALRPYLSSEEDRKKGKKFARTQLGDLLLHLEKKHGEDWGKVYDEAWERIDKKVEGLSKHIKLEEERRSEDAQSKAALTDWLRAKASFVIEGLKEADKDEFCRCELKLQKWYGDLRGKPFAIEAENSILDISGFSKQYNCAFIWQKDGVKKLNLYLIINYFKGGKLRFKKIKPEAFEANRFYTVINKKSGEIVPMEVNFNFDDPNLIILPLAFGKRQGREFIWNDLLSLETGSLKLANGRVIEKTLYNRRTRQDEPALFVALTFERREVLDSSNIKPMNLIGVDRGENIPAVIALTDPEGCPLSRFKDSLGNPTHILRIGESYKEKQRTIQAKKEVEQRRAGGYSRKYASKAKNLADDMVRNTARDLLYYAVTQDAMLIFENLSRGFGRQGKRTFMAERQYTRMEDWLTAKLAYEGLPSKTYLSKTLAQYTSKTCSNCGFTITSADYDRVLEKLKKTATGWMTTINGKELKVEGQITYYNRYKRQNVVKDLSVELDRLSEESVNNDISSWTKGRSGEALSLLKKRFSHRPVQEKFVCLNCGFETHADEQAALNIARSWLFLRSQEYKKYQTNKTTGNTDKRAFVETWQSFYRKKLKEVWKPAV

SEQ ID NO: 36047 - protein, 978 aa, synthetic construct
  REGION 1..978: note = engineered CasX variant
QEIKRINKIRRRLVKDSNTKKAGKTGPMKTLLVRVMTPDLRERLENLRKKPENIPQPISNTSRANLNKLLTDYTEMKKAILHVYWEEFQKDPVGLMSRVAQPASKKIDQNKLKPEMDEKGNLTTAGFACSQCGQPLFVYKLEQVSEKGKAYTNYFGRCNVAEHEKLIKLAQLKPEKDSDEAVTYSLGKFGQRALDFYSIHVTKESTHPVKPLAQIAGNRYASGPVGKALSDACMGTIASFLSKYQDIIIEHQKVVKGNQKRLESLRELAGKENLEYPSVTLPPQPHTKEGVDAYNEVIARVRTWVNLNLWQKLKLSRDDAKPLLRLKGFPSFPLVERQANEVDWWDMVCNVKKLINEKKEDGKVFWQNLAGYKRQEALRPYLSSEEDRKKGKKFARTQLGDLLLHLEKKHGEDWGKVYDEAWERIDKKVEGLSKHIKLEEERRSEDAQSKAALTDWLRAKASFVIEGLKEADKDEFCRCELKLQKWYGDLRGKPFAIEAENSILDISGFSKQYNCAFIWQKDGVKKLNLYLIINYFKGGKLRFKKIKPEAFEANRFYTVINKKSGEIVPMEVNFNFDDPNLIILPLAFGKRQGREFIWNDLLSLETGSLKLANGRVIEKTLYNRRTRQDEPALFVALTFERREVLDSSNIKPMNLIGVDRGENIPAVIALTDPEGCPLSRFKDSLGNPTHILRIGESYKEKQRTIQAKKEVEQRRAGGYSRKYASKAKNLADDMVRNTARDLLYYAVTQDAMLIFENLSRGFGRQGKRTFMAERQYTRMEDWLTAKLAYEGLPSKTYLSKTLAQYTSKTCSNCGFTITSADYDRVLEKLKKTATGWMTTINGKELKVEGQITYYNRYKRQNVVKDLSVELDRLSEESVNNDISSWTKGRSGEALSLLKKRFSHRPVQEKFVCLNCGFETHADEQAALNIARSWLFLRSQEYKKYQTNKTTGNTDKRAFVETWQSFYRKKLKEVWKPAV

SEQ ID NO: 36048 - protein, 977 aa, synthetic construct
  REGION 1..977: note = engineered CasX variant
QEIKRINKIRRRLVKDSNTKKAGKTGPMKTLLVRVMTPDLRERLENLRKKPENIPQPISNTSRANLNKLLTDYTEMKKAILHVYWEEFQKDPVGLMSRVAQPASKKIDQNKLKPEMDEKGNLTTAGFACSQCGQPLFVYKLEQVSEKGKAYTNYFGRCNVAEHEKLILLAQLKPEKDSDEAVTYSLGKFGQRALDFYSIHVTKESTHPVKPLAQIAGNRYASPVGKALSDACMGTIASFLSKYQDIIIEHQKVVKGNQKRLESLRELAGKENLEYPSVTLPPQPHTKEGVDAYNEVIARVRTWVNLNLWQKLKLSRDDAKPLLRLKGFPSFPLVERQANEVDWWDMVCNVKKLINEKKEDGKVFWQNLAGYKRQEALRPYLSSEEDRKKGKKFARTQLGDLLLHLEKKHGEDWGKVYDEAWERIDKKVEGLSKHIKLEEERRSEDAQSKAALTDWLRAKASFVIEGLKEADKDEFCRCELKLQKWYGDLRGKPFAIEAENSILDISGFSKQYNCAFIWQKDGVKKLNLYLIINYFKGGKLRFKKIKPEAFEANRFYTVINKKSGEIVPMEVNFNFDDPNLIILPLAFGKRQGREFIWNDLLSLETGSLKLANGRVIEKTLYNRRTRQDEPALFVALTFERREVLDSSNIKPMNLIGVDRGENIPAVIALTDPEGCPLSRFKDSLGNPTHILRIGESYKEKQRTIQAKKEVEQRRAGGYSRKYASKAKNLADDMVRNTARDLLYYAVTQDAMLIFENLSRGFGRQGKRTFMAERQYTRMEDWLTAKLAYEGLPSKTYLSKTLAQYTSKTCSNCGFTITSADYDRVLEKLKKTATGWMTTINGKELKVEGQITYYNRYKRQNVVKDLSVELDRLSEESVNNDISSWTKGRSGEALSLLKKRFSHRPVQEKFVCLNCGFETHADEQAALNIARSWLFLRSQEYKKYQTNKTTGNTDKRAFVETWQSFYRKKLKEVWKPAV

SEQ ID NO: 36049 - protein, 979 aa, synthetic construct
  REGION 1..979: note = engineered CasX variant
QEIKRINKIRRRLVKDSNTKKAGKTGPMKTLLVRVMTPDLRERLENLRKKPENIPQPISNTSRANLNKLLTDYTEMKKAILHVYWEEFQKDPVGLMSRVAQPASKKIDQNKLKPEMDEKGNLTTAGFACSQCGQPLFVYKLEQVSEKGKAYTNYFGRCNVAEHEKLILLAQLKPEKDSDEAVTYSLGKFGQRALDFYSIHVTKESTHPVKPLAQIAGNRYASYPVGKALSDACMGTIASFLSKYQDIIIEHQKVVKGNQKRLESLRELAGKENLEYPSVTLPPQPHTKEGVDAYNEVIARVRTWVNLNLWQKLKLSRDDAKPLLRLKGFPSFPLVERQANEVDWWDMVCNVKKLINEKKEDGKVFWQNLAGYKRQEALRPYLSSEEDRKKGKKFARYQLGDLLLHLEKKHEGEDWGKVYDEAWERIDKKVEGLSKHIKLEEERRSEDAQSKAALTDWLRAKASFVIEGLKEADKDEFCRCELKLQKWYGDLRGKPFAIEAENSILDISGFSKQYNCAFIWQKDGVKKLNLYLIINYFKGGKLRFKKIKPEAFEANRFYTVINKKSGEIVPMEVNFNFDDPNLIILPLAFGKRQGREFIWNDLLSLETGSLKLANGRVIEKTLYNRRTRQDEPALFVALTFERREVLDSSNIKPMNLIGVDRGENIPAVIALTDPEGCPLSRFKDSLGNPTHILRIGESYKEKQRTIQAKKEVEQRRAGGYSRKYASKAKNLADDMVRNTARDLLYYAVTQDAMLIFENLSRGFGRQGKRTFMAERQYTRMEDWLTAKLAYEGLPSKTYLSKTLAQYTSKTCSNCGFTITSADYDRVLEKLKKTATGWMTTINGKELKVEGQITYYNRYKRQNVVKDLSVELDRLSEESVNNDISSWTKGRSGEALSLLKKRFSHRPVQEKFVCLNCGFETHADEQAALNIARSWLFLRSQEYKKYQTNKTTGNTDKRAFVETWQSFYRKKLKEVWKPAV

SEQ ID NO: 36050 - protein, 979 aa, synthetic construct
  REGION 1..979: note = engineered CasX variant
QEIKRINKIRRRLVKDSNTKKAGKTGPMKTLLVRVMTPDLRERLENLRKKPENIPQPISNTSRANLNKLLTDYTEMKKAILHVYWEEFQKDPVGLMSRVAQPASKKIDQNKLKPEMDEKGNLTTAGFACSQCGQPLFVYKLEQVSEKGKAYTNYFGRCNVAEHEKLILLAQLKPEKDSDEAVTYSLGKFGQRALDFYSIHVTKESTHPVKPLAQIAGNRYASHPVGKALSDACMGTIASFLSKYQDIIIEHQKVVKGNQKRLESLRELAGKENLEYPSVTLPPQPHTKEGVDAYNEVIARVRTWVNLNLWQKLKLSRDDAKPLLRLKGFPSFPLVERQANEVDWWDMVCNVKKLINEKKEDGKVFWQNLAGYKRQEALRPYLSSEEDRKKGKKFARYQLGDLLLHLEKKHEGEDWGKVYDEAWERIDKKVEGLSKHIKLEEERRSEDAQSKAALTDWLRAKASFVIEGLKEADKDEFCRCELKLQKWYGDLRGKPFAIEAENSILDISGFSKQYNCAFIWQKDGVKKLNLYLIINYFKGGKLRFKKIKPEAFEANRFYTVINKKSGEIVPMEVNFNFDDPNLIILPLAFGKRQGREFIWNDLLSLETGSLKLANGRVIEKTLYNRRTRQDEPALFVALTFERREVLDSSNIKPMNLIGVDRGENIPAVIALTDPEGCPLSRFKDSLGNPTHILRIGESYKEKQRTIQAKKEVEQRRAGGYSRKYASKAKNLADDMVRNTARDLLYYAVTQDAMLIFENLSRGFGRQGKRTFMAERQYTRMEDWLTAKLAYEGLPSKTYLSKTLAQYTSKTCSNCGFTITSADYDRVLEKLKKTATGWMTTINGKELKVEGQITYYNRYKRQNVVKDLSVELDRLSEESVNNDISSWTKGRSGEALSLLKKRFSHRPVQEKFVCLNCGFETHADEQAALNIARSWLFLRSQEYKKYQTNKTTGNTDKRAFVETWQSFYRKKLKEVWKPAV

SEQ ID NO: 36051 - protein, 979 aa, synthetic construct
  REGION 1..979: note = engineered CasX variant
QEIKRINKIRRRLVKDSNTKKAGKTGPMKTLLVRVMTPDLRERLENLRKKPENIPQPISNTSRANLNKLLTDYTEMKKAILHVYWEEFQKDPVGLMSRVAQPASKKIDQNKLKPEMDEKGNLTTAGFACSQCGQPLFVYKLEQVSEKGKAYTNYFGRCNVAEHEKLILLAQLKPEKDSDEAVTYSLGKFGQRALDFYSIHVTKESTHPVKPLAQIAGNRYASSPVGKALSDACMGTIASFLSKYQDIIIEHQKVVKGNQKRLESLRELAGKENLEYPSVTLPPQPHTKEGVDAYNEVIARVRTWVNLNLWQKLKLSRDDAKPLLRLKGFPSFPLVERQANEVDWWDMVCNVKKLINEKKEDGKVFWQNLAGYKRQEALRPYLSSEEDRKKGKKFARYQLGDLLLHLEKKHEGEDWGKVYDEAWERIDKKVEGLSKHIKLEEERRSEDAQSKAALTDWLRAKASFVIEGLKEADKDEFCRCELKLQKWYGDLRGKPFAIEAENSILDISGFSKQYNCAFIWQKDGVKKLNLYLIINYFKGGKLRFKKIKPEAFEANRFYTVINKKSGEIVPMEVNFNFDDPNLIILPLAFGKRQGREFIWNDLLSLETGSLKLANGRVIEKTLYNRRTRQDEPALFVALTFERREVLDSSNIKPMNLIGVDRGENIPAVIALTDPEGCPLSRFKDSLGNPTHILRIGESYKEKQRTIQAKKEVEQRRAGGYSRKYASKAKNLADDMVRNTARDLLYYAVTQDAMLIFENLSRGFGRQGKRTFMAERQYTRMEDWLTAKLAYEGLPSKTYLSKTLAQYTSKTCSNCGFTITSADYDRVLEKLKKTATGWMTTINGKELKVEGQITYYNRYKRQNVVKDLSVELDRLSEESVNNDISSWTKGRSGEALSLLKKRFSHRPVQEKFVCLNCGFETHADEQAALNIARSWLFLRSQEYKKYQTNKTTGNTDKRAFVETWQSFYRKKLKEVWKPAV

SEQ ID NO: 36052 - protein, 979 aa, synthetic construct
  REGION 1..979: note = engineered CasX variant
QEIKRINKIRRRLVKDSNTKKAGKTGPMKTLLVRVMTPDLRERLENLRKKPENIPQPISNTSRANLNKLLTDYTEMKKAILHVYWEEFQKDPVGLMSRVAQPASKKIDQNKLKPEMDEKGNLTTAGFACSQCGQPLFVYKLEQVSEKGKAYTNYFGRCNVAEHEKLILLAQLKPEKDSDEAVTYSLGKFGQRALDFYSIHVTKESTHPVKPLAQIAGNRYASTPVGKALSDACMGTIASFLSKYQDIIIEHQKVVKGNQKRLESLRELAGKENLEYPSVTLPPQPHTKEGVDAYNEVIARVRTWVNLNLWQKLKLSRDDAKPLLRLKGFPSFPLVERQANEVDWWDMVCNVKKLINEKKEDGKVFWQNLAGYKRQEALRPYLSSEEDRKKGKKFARYQLGDLLLHLEKKHEGEDWGKVYDEAWERIDKKVEGLSKHIKLEEERRSEDAQSKAALTDWLRAKASFVIEGLKEADKDEFCRCELKLQKWYGDLRGKPFAIEAENSILDISGFSKQYNCAFIWQKDGVKKLNLYLIINYFKGGKLRFKKIKPEAFEANRFYTVINKKSGEIVPMEVNFNFDDPNLIILPLAFGKRQGREFIWNDLLSLETGSLKLANGRVIEKTLYNRRTRQDEPALFVALTFERREVLDSSNIKPMNLIGVDRGENIPAVIALTDPEGCPLSRFKDSLGNPTHILRIGESYKEKQRTIQAKKEVEQRRAGGYSRKYASKAKNLADDMVRNTARDLLYYAVTQDAMLIFENLSRGFGRQGKRTFMAERQYTRMEDWLTAKLAYEGLPSKTYLSKTLAQYTSKTCSNCGFTITSADYDRVLEKLKKTATGWMTTINGKELKVEGQITYYNRYKRQNVVKDLSVELDRLSEESVNNDISSWTKGRSGEALSLLKKRFSHRPVQEKFVCLNCGFETHADEQAALNIARSWLFLRSQEYKKYQTNKTTGNTDKRAFVETWQSFYRKKLKEVWKPAV

SEQ ID NO: 36053 - protein, 979 aa, synthetic construct
  REGION 1..979: note = engineered CasX variant
QEIKRINKIRRRLVKDSNTKKAGKTGPMKTLLVRVMTPDLRERLENLRKKPENIPQPISNTSRANLNKLLTDYTEMKKAILHVYWEEFQKDPVGLMSRVAQPASKKIDQNKLKPEMDEKGNLTTAGFACSQCGQPLFVYKLEQVSEKGKAYTNYFGRCNVAEHEKLILLAQLKPEKDSDEAVTYSLGKFGQRALDFYSIHVTKESTHPVKPLAQIAGNRYASAPVGKALSDACMGTIASFLSKYQDIIIEHQKVVKGNQKRLESLRELAGKENLEYPSVTLPPQPHTKEGVDAYNEVIARVRTWVNLNLWQKLKLSRDDAKPLLRLKGFPSFPLVERQANEVDWWDMVCNVKKLINEKKEDGKVFWQNLAGYKRQEALRPYLSSEEDRKKGKKFARYQLGDLLLHLEKKHEGEDWGKVYDEAWERIDKKVEGLSKHIKLEEERRSEDAQSKAALTDWLRAKASFVIEGLKEADKDEFCRCELKLQKWYGDLRGKPFAIEAENSILDISGFSKQYNCAFIWQKDGVKKLNLYLIINYFKGGKLRFKKIKPEAFEANRFYTVINKKSGEIVPMEVNFNFDDPNLIILPLAFGKRQGREFIWNDLLSLETGSLKLANGRVIEKTLYNRRTRQDEPALFVALTFERREVLDSSNIKPMNLIGVDRGENIPAVIALTDPEGCPLSRFKDSLGNPTHILRIGESYKEKQRTIQAKKEVEQRRAGGYSRKYASKAKNLADDMVRNTARDLLYYAVTQDAMLIFENLSRGFGRQGKRTFMAERQYTRMEDWLTAKLAYEGLPSKTYLSKTLAQYTSKTCSNCGFTITSADYDRVLEKLKKTATGWMTTINGKELKVEGQITYYNRYKRQNVVKDLSVELDRLSEESVNNDISSWTKGRSGEALSLLKKRFSHRPVQEKFVCLNCGFETHADEQAALNIARSWLFLRSQEYKKYQTNKTTGNTDKRAFVETWQSFYRKKLKEVWKPAV

SEQ ID NO: 36054 - protein, 979 aa, synthetic construct
  REGION 1..979: note = engineered CasX variant
QEIKRINKIRRRLVKDSNTKKAGKTGPMKTLLVRVMTPDLRERLENLRKKPENIPQPISNTSRANLNKLLTDYTEMKKAILHVYWEEFQKDPVGLMSRVAQPASKKIDQNKLKPEMDEKGNLTTAGFACSQCGQPLFVYKLEQVSEKGKAYTNYFGRCNVAEHEKLILLAQLKPEKDSDEAVTYSLGKFGQRALDFYSIHVTKESTHPVKPLAQIAGNRYASVPVGKALSDACMGTIASFLSKYQDIIIEHQKVVKGNQKRLESLRELAGKENLEYPSVTLPPQPHTKEGVDAYNEVIARVRTWVNLNLWQKLKLSRDDAKPLLRLKGFPSFPLVERQANEVDWWDMVCNVKKLINEKKEDGKVFWQNLAGYKRQEALRPYLSSEEDRKKGKKFARYQLGDLLLHLEKKHEGEDWGKVYDEAWERIDKKVEGLSKHIKLEEERRSEDAQSKAALTDWLRAKASFVIEGLKEADKDEFCRCELKLQKWYGDLRGKPFAIEAENSILDISGFSKQYNCAFIWQKDGVKKLNLYLIINYFKGGKLRFKKIKPEAFEANRFYTVINKKSGEIVPMEVNFNFDDPNLIILPLAFGKRQGREFIWNDLLSLETGSLKLANGRVIEKTLYNRRTRQDEPALFVALTFERREVLDSSNIKPMNLIGVDRGENIPAVIALTDPEGCPLSRFKDSLGNPTHILRIGESYKEKQRTIQAKKEVEQRRAGGYSRKYASKAKNLADDMVRNTARDLLYYAVTQDAMLIFENLSRGFGRQGKRTFMAERQYTRMEDWLTAKLAYEGLPSKTYLSKTLAQYTSKTCSNCGFTITSADYDRVLEKLKKTATGWMTTINGKELKVEGQITYYNRYKRQNVVKDLSVELDRLSEESVNNDISSWTKGRSGEALSLLKKRFSHRPVQEKFVCLNCGFETHADEQAALNIARSWLFLRSQEYKKYQTNKTTGNTDKRAFVETWQSFYRKKLKEVWKPAV

SEQ ID NO: 36055 - protein, 979 aa, synthetic construct
  REGION 1..979: note = engineered CasX variant
QEIKRINKIRRRLVKDSNTKKAGKTGPMKTLLVRVMTPDLRERLENLRKKPENIPQPISNTSRANLNKLLTDYTEMKKAILHVYWEEFQKDPVGLMSRVAQPASKKIDQNKLKPEMDEKGNLTTAGFACSQCGQPLFVYKLEQVSEKGKAYTNYFGRCNVAEHEKLIKLAQLKPEKDSDEAVTYSLGKFGQRALDFYSIHVTKESTHPVKPLAQIAGNRYASGPVGKALSDACMGTIASFLSKYQDIIIEHQKVVKGNQKRLESLRELAGKENLEYPSVTLPPQPHTKEGVDAYNEVIARVRTWVNLNLWQKLKLSRDDAKPLLRLKGFPSFPLVERQANEVDWWDMVCNVKKLINEKKEDGKVFWQNLAGYKRQEALRPYLSSEEDRKKGKKFARYQLGDLLLHLEKKHEGEDWGKVYDEAWERIDKKVEGLSKHIKLEEERRSEDAQSKAALTDWLRAKASFVIEGLKEADKDEFCRCELKLQKWYGDLRGKPFAIEAENSILDISGFSKQYNCAFIWQKDGVKKLNLYLIINYFKGGKLRFKKIKPEAFEANRFYTVINKKSGEIVPMEVNFNFDDPNLIILPLAFGKRQGREFIWNDLLSLETGSLKLANGRVIEKTLYNRRTRQDEPALFVALTFERREVLDSSNIKPMNLIGVDRGENIPAVIALTDPEGCPLSRFKDSLGNPTHILRIGESYKEKQRTIQAKKEVEQRRAGGYSRKYASKAKNLADDMVRNTARDLLYYAVTQDAMLIFENLSRGFGRQGKRTFMAERQYTRMEDWLTAKLAYEGLPSKTYLSKTLAQYTSKTCSNCGFTITSADYDRVLEKLKKTATGWMTTINGKELKVEGQITYYNRYKRQNVVKDLSVELDRLSEESVNNDISSWTKGRSGEALSLLKKRFSHRPVQEKFVCLNCGFETHADEQAALNIARSWLFLRSQEYKKYQTNKTTGNTDKRAFVETWQSFYRKKLKEVWKPAV

SEQ ID NO: 36056 - protein, 978 aa, synthetic construct
  REGION 1..978: note = engineered CasX variant
QEIKRINKIRRRLVKDSNTKKAGKTGPMKTLLVRVMTPDLRERLENLRKKPENIPQPISNTSRANLNKLLTDYTEMKKAILHVYWEEFQKDPVGLMSRVAQPASKKIDQNKLKPEMDEKGNLTTAGFACSQCGQPLFVYKLEQVSEKGKAYTNYFGRCNVAEHEKLILLAQLKPEKDSDEAVTYSLGKFGQRALDFYSIHVTKESTHPVKPLAQIAGNRYASPVGKALSDACMGTIASFLSKYQDIIIEHQKVVKGNQKRLESLRELAGKENLEYPSVTLPPQPHTKEGVDAYNEVIARVRTWVNLNLWQKLKLSRDDAKPLLRLKGFPSFPLVERQANEVDWWDMVCNVKKLINEKKEDGKVFWQNLAGYKRQEALRPYLSSEEDRKKGKKFARYQLGDLLLHLEKKHEGEDWGKVYDEAWERIDKKVEGLSKHIKLEEERRSEDAQSKAALTDWLRAKASFVIEGLKEADKDEFCRCELKLQKWYGDLRGKPFAIEAENSILDISGFSKQYNCAFIWQKDGVKKLNLYLIINYFKGGKLRFKKIKPEAFEANRFYTVINKKSGEIVPMEVNFNFDDPNLIILPLAFGKRQGREFIWNDLLSLETGSLKLANGRVIEKTLYNRRTRQDEPALFVALTFERREVLDSSNIKPMNLIGVDRGENIPAVIALTDPEGCPLSRFKDSLGNPTHILRIGESYKEKQRTIQAKKEVEQRRAGGYSRKYASKAKNLADDMVRNTARDLLYYAVTQDAMLIFENLSRGFGRQGKRTFMAERQYTRMEDWLTAKLAYEGLPSKTYLSKTLAQYTSKTCSNCGFTITSADYDRVLEKLKKTATGWMTTINGKELKVEGQITYYNRYKRQNVVKDLSVELDRLSEESVNNDISSWTKGRSGEALSLLKKRFSHRPVQEKFVCLNCGFETHADEQAALNIARSWLFLRSQEYKKYQTNKTTGNTDKRAFVETWQSFYRKKLKEVWKPAV

SEQ ID NO: 36057 - protein, 978 aa, synthetic construct
  REGION 1..978: note = engineered CasX variant
QEIKRINKIRRRLVKDSNTKKAGKTGPMKTLLVRVMTPDLRERLENLRKKPENIPQPISNTSRANLNKLLTDYTEMKKAILHVYWEEFQKDPVGLMSRVAQPASKKIDQNKLKPEMDEKGNLTTAGFACSQCGQPLFVYKLEQVSEKGKAYTNYFGRCNVAEHEKLILLAQLKPEKDSDEAVTYSLGKFGQRALDFYSIHVTKESTHPVKPLAQIAGNRYASYPVGKALSDACMGTIASFLSKYQDIIIEHQKVVKGNQKRLESLRELAGKENLEYPSVTLPPQPHTKEGVDAYNEVIARVRTWVNLNLWQKLKLSRDDAKPLLRLKGFPSFPLVERQANEVDWWDMVCNVKKLINEKKEDGKVFWQNLAGYKRQEALRPYLSSEEDRKKGKKFARYQLGDLLLHLEKKHGEDWGKVYDEAWERIDKKVEGLSKHIKLEEERRSEDAQSKAALTDWLRAKASFVIEGLKEADKDEFCRCDLKLQKWYGDLRGKPFAIEAENSILDISGFSKQYNCAFIWQKDGVKKLNLYLIINYFKGGKLRFKKIKPEAFEANRFYTVINKKSGEIVPMEVNFNFDDPNLIILPLAFGKRQGREFIWNDLLSLETGSLKLANGRVIEKTLYNRRTRQDEPALFVALTFERREVLDSSNIKPMNLIGVDRGENIPAVIALTDPEGCPLSRFKDSLGNPTHILRIGESYKEKQRTIQAKKEVEQRRAGGYSRKYASKAKNLADDMVRNTARDLLYYAVTQDAMLIFENLSRGFGRQGKRTFMAERQYTRMEDWLTAKLAYEGLPSKTYLSKTLAQYTSKTCSNCGFTITSADYDRVLEKLKKTATGWMTTINGKELKVEGQITYYNRYKRQNVVKDLSVELDRLSEESVNNDISSWTKGRSGEALSLLKKRFSHRPVQEKFVCLNCGFETHADEQAALNIARSWLFLRSQEYKKYQTNKTTGNTDKRAFVETWQSFYRKKLKEVWKPAV

SEQ ID NO: 36058 - protein, 978 aa, synthetic construct
  REGION 1..978: note = engineered CasX variant
QEIKRINKIRRRLVKDSNTKKAGKTGPMKTLLVRVMTPDLRERLENLRKKPENIPQPISNTSRANLNKLLTDYTEMKKAILHVYWEEFQKDPVGLMSRVAQPASKKIDQNKLKPEMDEKGNLTTAGFACSQCGQPLFVYKLEQVSEKGKAYTNYFGRCNVAEHEKLILLAQLKPEKDSDEAVTYSLGKFGQRALDFYSIHVTKESTHPVKPLAQIAGNRYASHPVGKALSDACMGTIASFLSKYQDIIIEHQKVVKGNQKRLESLRELAGKENLEYPSVTLPPQPHTKEGVDAYNEVIARVRTWVNLNLWQKLKLSRDDAKPLLRLKGFPSFPLVERQANEVDWWDMVCNVKKLINEKKEDGKVFWQNLAGYKRQEALRPYLSSEEDRKKGKKFARYQLGDLLLHLEKKHGEDWGKVYDEAWERIDKKVEGLSKHIKLEEERRSEDAQSKAALTDWLRAKASFVIEGLKEADKDEFCRCDLKLQKWYGDLRGKPFAIEAENSILDISGFSKQYNCAFIWQKDGVKKLNLYLIINYFKGGKLRFKKIKPEAFEANRFYTVINKKSGEIVPMEVNFNFDDPNLIILPLAFGKRQGREFIWNDLLSLETGSLKLANGRVIEKTLYNRRTRQDEPALFVALTFERREVLDSSNIKPMNLIGVDRGENIPAVIALTDPEGCPLSRFKDSLGNPTHILRIGESYKEKQRTIQAKKEVEQRRAGGYSRKYASKAKNLADDMVRNTARDLLYYAVTQDAMLIFENLSRGFGRQGKRTFMAERQYTRMEDWLTAKLAYEGLPSKTYLSKTLAQYTSKTCSNCGFTITSADYDRVLEKLKKTATGWMTTINGKELKVEGQITYYNRYKRQNVVKDLSVELDRLSEESVNNDISSWTKGRSGEALSLLKKRFSHRPVQEKFVCLNCGFETHADEQAALNIARSWLFLRSQEYKKYQTNKTTGNTDKRAFVETWQSFYRKKLKEVWKPAV

SEQ ID NO: 36059 - protein, 978 aa, synthetic construct
  REGION 1..978: note = engineered CasX variant
QEIKRINKIRRRLVKDSNTKKAGKTGPMKTLLVRVMTPDLRERLENLRKKPENIPQPISNTSRANLNKLLTDYTEMKKAILHVYWEEFQKDPVGLMSRVAQPASKKIDQNKLKPEMDEKGNLTTAGFACSQCGQPLFVYKLEQVSEKGKAYTNYFGRCNVAEHEKLILLAQLKPEKDSDEAVTYSLGKFGQRALDFYSIHVTKESTHPVKPLAQIAGNRYASSPVGKALSDACMGTIASFLSKYQDIIIEHQKVVKGNQKRLESLRELAGKENLEYPSVTLPPQPHTKEGVDAYNEVIARVRTWVNLNLWQKLKLSRDDAKPLLRLKGFPSFPLVERQANEVDWWDMVCNVKKLINEKKEDGKVFWQNLAGYKRQEALRPYLSSEEDRKKGKKFARYQLGDLLLHLEKKHGEDWGKVYDEAWERIDKKVEGLSKHIKLEEERRSEDAQSKAALTDWLRAKASFVIEGLKEADKDEFCRCDLKLQKWYGDLRGKPFAIEAENSILDISGFSKQYNCAFIWQKDGVKKLNLYLIINYFKGGKLRFKKIKPEAFEANRFYTVINKKSGEIVPMEVNFNFDDPNLIILPLAFGKRQGREFIWNDLLSLETGSLKLANGRVIEKTLYNRRTRQDEPALFVALTFERREVLDSSNIKPMNLIGVDRGENIPAVIALTDPEGCPLSRFKDSLGNPTHILRIGESYKEKQRTIQAKKEVEQRRAGGYSRKYASKAKNLADDMVRNTARDLLYYAVTQDAMLIFENLSRGFGRQGKRTFMAERQYTRMEDWLTAKLAYEGLPSKTYLSKTLAQYTSKTCSNCGFTITSADYDRVLEKLKKTATGWMTTINGKELKVEGQITYYNRYKRQNVVKDLSVELDRLSEESVNNDISSWTKGRSGEALSLLKKRFSHRPVQEKFVCLNCGFETHADEQAALNIARSWLFLRSQEYKKYQTNKTTGNTDKRAFVETWQSFYRKKLKEVWKPAV

SEQ ID NO: 36060 - protein, 978 aa, synthetic construct
  REGION 1..978: note = engineered CasX variant
QEIKRINKIRRRLVKDSNTKKAGKTGPMKTLLVRVMTPDLRERLENLRKKPENIPQPISNTSRANLNKLLTDYTEMKKAILHVYWEEFQKDPVGLMSRVAQPASKKIDQNKLKPEMDEKGNLTTAGFACSQCGQPLFVYKLEQVSEKGKAYTNYFGRCNVAEHEKLILLAQLKPEKDSDEAVTYSLGKFGQRALDFYSIHVTKESTHPVKPLAQIAGNRYASTPVGKALSDACMGTIASFLSKYQDIIIEHQKVVKGNQKRLESLRELAGKENLEYPSVTLPPQPHTKEGVDAYNEVIARVRTWVNLNLWQKLKLSRDDAKPLLRLKGFPSFPLVERQANEVDWWDMVCNVKKLINEKKEDGKVFWQNLAGYKRQEALRPYLSSEEDRKKGKKFARYQLGDLLLHLEKKHGEDWGKVYDEAWERIDKKVEGLSKHIKLEEERRSEDAQSKAALTDWLRAKASFVIEGLKEADKDEFCRCDLKLQKWYGDLRGKPFAIEAENSILDISGFSKQYNCAFIWQKDGVKKLNLYLIINYFKGGKLRFKKIKPEAFEANRFYTVINKKSGEIVPMEVNFNFDDPNLIILPLAFGKRQGREFIWNDLLSLETGSLKLANGRVIEKTLYNRRTRQDEPALFVALTFERREVLDSSNIKPMNLIGVDRGENIPAVIALTDPEGCPLSRFKDSLGNPTHILRIGESYKEKQRTIQAKKEVEQRRAGGYSRKYASKAKNLADDMVRNTARDLLYYAVTQDAMLIFENLSRGFGRQGKRTFMAERQYTRMEDWLTAKLAYEGLPSKTYLSKTLAQYTSKTCSNCGFTITSADYDRVLEKLKKTATGWMTTINGKELKVEGQITYYNRYKRQNVVKDLSVELDRLSEESVNNDISSWTKGRSGEALSLLKKRFSHRPVQEKFVCLNCGFETHADEQAALNIARSWLFLRSQEYKKYQTNKTTGNTDKRAFVETWQSFYRKKLKEVWKPAV

SEQ ID NO: 36061 - protein, 978 aa, synthetic construct
  REGION 1..978: note = engineered CasX variant
QEIKRINKIRRRLVKDSNTKKAGKTGPMKTLLVRVMTPDLRERLENLRKKPENIPQPISNTSRANLNKLLTDYTEMKKAILHVYWEEFQKDPVGLMSRVAQPASKKIDQNKLKPEMDEKGNLTTAGFACSQCGQPLFVYKLEQVSEKGKAYTNYFGRCNVAEHEKLILLAQLKPEKDSDEAVTYSLGKFGQRALDFYSIHVTKESTHPVKPLAQIAGNRYASAPVGKALSDACMGTIASFLSKYQDIIIEHQKVVKGNQKRLESLRELAGKENLEYPSVTLPPQPHTKEGVDAYNEVIARVRTWVNLNLWQKLKLSRDDAKPLLRLKGFPSFPLVERQANEVDWWDMVCNVKKLINEKKEDGKVFWQNLAGYKRQEALRPYLSSEEDRKKGKKFARYQLGDLLLHLEKKHGEDWGKVYDEAWERIDKKVEGLSKHIKLEEERRSEDAQSKAALTDWLRAKASFVIEGLKEADKDEFCRCDLKLQKWYGDLRGKPFAIEAENSILDISGFSKQYNCAFIWQKDGVKKLNLYLIINYFKGGKLRFKKIKPEAFEANRFYTVINKKSGEIVPMEVNFNFDDPNLIILPLAFGKRQGREFIWNDLLSLETGSLKLANGRVIEKTLYNRRTRQDEPALFVALTFERREVLDSSNIKPMNLIGVDRGENIPAVIALTDPEGCPLSRFKDSLGNPTHILRIGESYKEKQRTIQAKKEVEQRRAGGYSRKYASKAKNLADDMVRNTARDLLYYAVTQDAMLIFENLSRGFGRQGKRTFMAERQYTRMEDWLTAKLAYEGLPSKTYLSKTLAQYTSKTCSNCGFTITSADYDRVLEKLKKTATGWMTTINGKELKVEGQITYYNRYKRQNVVKDLSVELDRLSEESVNNDISSWTKGRSGEALSLLKKRFSHRPVQEKFVCLNCGFETHADEQAALNIARSWLFLRSQEYKKYQTNKTTGNTDKRAFVETWQSFYRKKLKEVWKPAV

SEQ ID NO: 36062 - protein, 978 aa, synthetic construct
  REGION 1..978: note = engineered CasX variant
QEIKRINKIRRRLVKDSNTKKAGKTGPMKTLLVRVMTPDLRERLENLRKKPENIPQPISNTSRANLNKLLTDYTEMKKAILHVYWEEFQKDPVGLMSRVAQPASKKIDQNKLKPEMDEKGNLTTAGFACSQCGQPLFVYKLEQVSEKGKAYTNYFGRCNVAEHEKLILLAQLKPEKDSDEAVTYSLGKFGQRALDFYSIHVTKESTHPVKPLAQIAGNRYASVPVGKALSDACMGTIASFLSKYQDIIIEHQKVVKGNQKRLESLRELAGKENLEYPSVTLPPQPHTKEGVDAYNEVIARVRTWVNLNLWQKLKLSRDDAKPLLRLKGFPSFPLVERQANEVDWWDMVCNVKKLINEKKEDGKVFWQNLAGYKRQEALRPYLSSEEDRKKGKKFARYQLGDLLLHLEKKHGEDWGKVYDEAWERIDKKVEGLSKHIKLEEERRSEDAQSKAALTDWLRAKASFVIEGLKEADKDEFCRCDLKLQKWYGDLRGKPFAIEAENSILDISGFSKQYNCAFIWQKDGVKKLNLYLIINYFKGGKLRFKKIKPEAFEANRFYTVINKKSGEIVPMEVNFNFDDPNLIILPLAFGKRQGREFIWNDLLSLETGSLKLANGRVIEKTLYNRRTRQDEPALFVALTFERREVLDSSNIKPMNLIGVDRGENIPAVIALTDPEGCPLSRFKDSLGNPTHILRIGESYKEKQRTIQAKKEVEQRRAGGYSRKYASKAKNLADDMVRNTARDLLYYAVTQDAMLIFENLSRGFGRQGKRTFMAERQYTRMEDWLTAKLAYEGLPSKTYLSKTLAQYTSKTCSNCGFTITSADYDRVLEKLKKTATGWMTTINGKELKVEGQITYYNRYKRQNVVKDLSVELDRLSEESVNNDISSWTKGRSGEALSLLKKRFSHRPVQEKFVCLNCGFETHADEQAALNIARSWLFLRSQEYKKYQTNKTTGNTDKRAFVETWQSFYRKKLKEVWKPAV

SEQ ID NO: 36063 - protein, 978 aa, synthetic construct
  REGION 1..978: note = engineered CasX variant
QEIKRINKIRRRLVKDSNTKKAGKTGPMKTLLVRVMTPDLRERLENLRKKPENIPQPISNTSRANLNKLLTDYTEMKKAILHVYWEEFQKDPVGLMSRVAQPASKKIDQNKLKPEMDEKGNLTTAGFACSQCGQPLFVYKLEQVSEKGKAYTNYFGRCNVAEHEKLIKLAQLKPEKDSDEAVTYSLGKFGQRALDFYSIHVTKESTHPVKPLAQIAGNRYASGPVGKALSDACMGTIASFLSKYQDIIIEHQKVVKGNQKRLESLRELAGKENLEYPSVTLPPQPHTKEGVDAYNEVIARVRTWVNLNLWQKLKLSRDDAKPLLRLKGFPSFPLVERQANEVDWWDMVCNVKKLINEKKEDGKVFWQNLAGYKRQEALRPYLSSEEDRKKGKKFARYQLGDLLLHLEKKHGEDWGKVYDEAWERIDKKVEGLSKHIKLEEERRSEDAQSKAALTDWLRAKASFVIEGLKEADKDEFCRCDLKLQKWYGDLRGKPFAIEAENSILDISGFSKQYNCAFIWQKDGVKKLNLYLIINYFKGGKLRFKKIKPEAFEANRFYTVINKKSGEIVPMEVNFNFDDPNLIILPLAFGKRQGREFIWNDLLSLETGSLKLANGRVIEKTLYNRRTRQDEPALFVALTFERREVLDSSNIKPMNLIGVDRGENIPAVIALTDPEGCPLSRFKDSLGNPTHILRIGESYKEKQRTIQAKKEVEQRRAGGYSRKYASKAKNLADDMVRNTARDLLYYAVTQDAMLIFENLSRGFGRQGKRTFMAERQYTRMEDWLTAKLAYEGLPSKTYLSKTLAQYTSKTCSNCGFTITSADYDRVLEKLKKTATGWMTTINGKELKVEGQITYYNRYKRQNVVKDLSVELDRLSEESVNNDISSWTKGRSGEALSLLKKRFSHRPVQEKFVCLNCGFETHADEQAALNIARSWLFLRSQEYKKYQTNKTTGNTDKRAFVETWQSFYRKKLKEVWKPAV

SEQ ID NO: 36064 - protein, 977 aa, synthetic construct
  REGION 1..977: note = engineered CasX variant
QEIKRINKIRRRLVKDSNTKKAGKTGPMKTLLVRVMTPDLRERLENLRKKPENIPQPISNTSRANLNKLLTDYTEMKKAILHVYWEEFQKDPVGLMSRVAQPASKKIDQNKLKPEMDEKGNLTTAGFACSQCGQPLFVYKLEQVSEKGKAYTNYFGRCNVAEHEKLILLAQLKPEKDSDEAVTYSLGKFGQRALDFYSIHVTKESTHPVKPLAQIAGNRYASPVGKALSDACMGTIASFLSKYQDIIIEHQKVVKGNQKRLESLRELAGKENLEYPSVTLPPQPHTKEGVDAYNEVIARVRTWVNLNLWQKLKLSRDDAKPLLRLKGFPSFPLVERQANEVDWWDMVCNVKKLINEKKEDGKVFWQNLAGYKRQEALRPYLSSEEDRKKGKKFARYQLGDLLLHLEKKHGEDWGKVYDEAWERIDKKVEGLSKHIKLEEERRSEDAQSKAALTDWLRAKASFVIEGLKEADKDEFCRCDLKLQKWYGDLRGKPFAIEAENSILDISGFSKQYNCAFIWQKDGVKKLNLYLIINYFKGGKLRFKKIKPEAFEANRFYTVINKKSGEIVPMEVNFNFDDPNLIILPLAFGKRQGREFIWNDLLSLETGSLKLANGRVIEKTLYNRRTRQDEPALFVALTFERREVLDSSNIKPMNLIGVDRGENIPAVIALTDPEGCPLSRFKDSLGNPTHILRIGESYKEKQRTIQAKKEVEQRRAGGYSRKYASKAKNLADDMVRNTARDLLYYAVTQDAMLIFENLSRGFGRQGKRTFMAERQYTRMEDWLTAKLAYEGLPSKTYLSKTLAQYTSKTCSNCGFTITSADYDRVLEKLKKTATGWMTTINGKELKVEGQITYYNRYKRQNVVKDLSVELDRLSEESVNNDISSWTKGRSGEALSLLKKRFSHRPVQEKFVCLNCGFETHADEQAALNIARSWLFLRSQEYKKYQTNKTTGNTDKRAFVETWQSFYRKKLKEVWKPAV

SEQ ID NO: 36065 - protein, 978 aa, synthetic construct
  REGION 1..978: note = engineered CasX variant
QEIKRINKIRRRLVKDSNTKKAGKTGPMKTLLVRVMTPDLRERLENLRKKPENIPQPISNTSRANLNKLLTDYTEMKKAILHVYWEEFQKDPVGLMSRVAQPASKKIDQNKLKPEMDEKGNLTTAGFACSQCGQPLFVYKLEQVSEKGKAYTNYFGRCNVAEHEKLILLAQLKPEKDSDEAVTYSLGKFGQRALDFYSIHVTKESTHPVKPLAQIAGNRYASYPVGKALSDACMGTIASFLSKYQDIIIEHQKVVKGNQKRLESLRELAGKENLEYPSVTLPPQPHTKEGVDAYNEVIARVRTWVNLNLWQKLKLSRDDAKPLLRLKGFPSFPLVERQANEVDWWDMVCNVKKLINEKKEDGKVFWQNLAGYKRQEALRPYLSSEEDRKKGKKFARYQLGDLLLHLEKKHGEDWGKVYDEAWERIDKKVEGLSKHIKLEEERRSEDAQSKAALTDWLRAKASFVIEGLKEADKDEFCRCELKLQKWYGDLRGKPFAIEAENSILDISGFSKQYNCAFIWQKDGVKKLNLYLIINYFKGGKLRFKKIKPEAFEANRFYTVINKKSGEIVPMEVNFNFDDPNLIILPLAFGKRFGREFIWNDLLSLETGSLKLANGRVIEKTLYNRRTRQDEPALFVALTFERREVLDSSNIKPMNLIGVDRGENIPAVIALTDPEGCPLSRFKDSLGNPTHILRIGESYKEKQRTIQAKKEVEQRRAGGYSRKYASKAKNLADDMVRNTARDLLYYAVTQDAMLIFENLSRGFGRQGKRTFMAERQYTRMEDWLTAKLAYEGLPSKTYLSKTLAQYTSKTCSNCGFTITSADYDRVLEKLKKTATGWMTTINGKELKVEGQITYYNRYKRQNVVKDLSVELDRLSEESVNNDISSWTKGRSGEALSLLKKRFSHRPVQEKFVCLNCGFETHADEQAALNIARSWLFLRSQEYKKYQTNKTTGNTDKRAFVETWQSFYRKKLKEVWKPAV

SEQ ID NO: 36066 - protein, 978 aa, synthetic construct
  REGION 1..978: note = engineered CasX variant
QEIKRINKIRRRLVKDSNTKKAGKTGPMKTLLVRVMTPDLRERLENLRKKPENIPQPISNTSRANLNKLLTDYTEMKKAILHVYWEEFQKDPVGLMSRVAQPASKKIDQNKLKPEMDEKGNLTTAGFACSQCGQPLFVYKLEQVSEKGKAYTNYFGRCNVAEHEKLILLAQLKPEKDSDEAVTYSLGKFGQRALDFYSIHVTKESTHPVKPLAQIAGNRYASHPVGKALSDACMGTIASFLSKYQDIIIEHQKVVKGNQKRLESLRELAGKENLEYPSVTLPPQPHTKEGVDAYNEVIARVRTWVNLNLWQKLKLSRDDAKPLLRLKGFPSFPLVERQANEVDWWDMVCNVKKLINEKKEDGKVFWQNLAGYKRQEALRPYLSSEEDRKKGKKFARYQLGDLLLHLEKKHGEDWGKVYDEAWERIDKKVEGLSKHIKLEEERRSEDAQSKAALTDWLRAKASFVIEGLKEADKDEFCRCELKLQKWYGDLRGKPFAIEAENSILDISGFSKQYNCAFIWQKDGVKKLNLYLIINYFKGGKLRFKKIKPEAFEANRFYTVINKKSGEIVPMEVNFNFDDPNLIILPLAFGKRFGREFIWNDLLSLETGSLKLANGRVIEKTLYNRRTRQDEPALFVALTFERREVLDSSNIKPMNLIGVDRGENIPAVIALTDPEGCPLSRFKDSLGNPTHILRIGESYKEKQRTIQAKKEVEQRRAGGYSRKYASKAKNLADDMVRNTARDLLYYAVTQDAMLIFENLSRGFGRQGKRTFMAERQYTRMEDWLTAKLAYEGLPSKTYLSKTLAQYTSKTCSNCGFTITSADYDRVLEKLKKTATGWMTTINGKELKVEGQITYYNRYKRQNVVKDLSVELDRLSEESVNNDISSWTKGRSGEALSLLKKRFSHRPVQEKFVCLNCGFETHADEQAALNIARSWLFLRSQEYKKYQTNKTTGNTDKRAFVETWQSFYRKKLKEVWKPAV

SEQ ID NO: 36067 - protein, 978 aa, synthetic construct
  REGION 1..978: note = engineered CasX variant
QEIKRINKIRRRLVKDSNTKKAGKTGPMKTLLVRVMTPDLRERLENLRKKPENIPQPISNTSRANLNKLLTDYTEMKKAILHVYWEEFQKDPVGLMSRVAQPASKKIDQNKLKPEMDEKGNLTTAGFACSQCGQPLFVYKLEQVSEKGKAYTNYFGRCNVAEHEKLILLAQLKPEKDSDEAVTYSLGKFGQRALDFYSIHVTKESTHPVKPLAQIAGNRYASSPVGKALSDACMGTIASFLSKYQDIIIEHQKVVKGNQKRLESLRELAGKENLEYPSVTLPPQPHTKEGVDAYNEVIARVRTWVNLNLWQKLKLSRDDAKPLLRLKGFPSFPLVERQANEVDWWDMVCNVKKLINEKKEDGKVFWQNLAGYKRQEALRPYLSSEEDRKKGKKFARYQLGDLLLHLEKKHGEDWGKVYDEAWERIDKKVEGLSKHIKLEEERRSEDAQSKAALTDWLRAKASFVIEGLKEADKDEFCRCELKLQKWYGDLRGKPFAIEAENSILDISGFSKQYNCAFIWQKDGVKKLNLYLIINYFKGGKLRFKKIKPEAFEANRFYTVINKKSGEIVPMEVNFNFDDPNLIILPLAFGKRFGREFIWNDLLSLETGSLKLANGRVIEKTLYNRRTRQDEPALFVALTFERREVLDSSNIKPMNLIGVDRGENIPAVIALTDPEGCPLSRFKDSLGNPTHILRIGESYKEKQRTIQAKKEVEQRRAGGYSRKYASKAKNLADDMVRNTARDLLYYAVTQDAMLIFENLSRGFGRQGKRTFMAERQYTRMEDWLTAKLAYEGLPSKTYLSKTLAQYTSKTCSNCGFTITSADYDRVLEKLKKTATGWMTTINGKELKVEGQITYYNRYKRQNVVKDLSVELDRLSEESVNNDISSWTKGRSGEALSLLKKRFSHRPVQEKFVCLNCGFETHADEQAALNIARSWLFLRSQEYKKYQTNKTTGNTDKRAFVETWQSFYRKKLKEVWKPAV

SEQ ID NO: 36068 - protein, 978 aa, synthetic construct
  REGION 1..978: note = engineered CasX variant
QEIKRINKIRRRLVKDSNTKKAGKTGPMKTLLVRVMTPDLRERLENLRKKPENIPQPISNTSRANLNKLLTDYTEMKKAILHVYWEEFQKDPVGLMSRVAQPASKKIDQNKLKPEMDEKGNLTTAGFACSQCGQPLFVYKLEQVSEKGKAYTNYFGRCNVAEHEKLILLAQLKPEKDSDEAVTYSLGKFGQRALDFYSIHVTKESTHPVKPLAQIAGNRYASTPVGKALSDACMGTIASFLSKYQDIIIEHQKVVKGNQKRLESLRELAGKENLEYPSVTLPPQPHTKEGVDAYNEVIARVRTWVNLNLWQKLKLSRDDAKPLLRLKGFPSFPLVERQANEVDWWDMVCNVKKLINEKKEDGKVFWQNLAGYKRQEALRPYLSSEEDRKKGKKFARYQLGDLLLHLEKKHGEDWGKVYDEAWERIDKKVEGLSKHIKLEEERRSEDAQSKAALTDWLRAKASFVIEGLKEADKDEFCRCELKLQKWYGDLRGKPFAIEAENSILDISGFSKQYNCAFIWQKDGVKKLNLYLIINYFKGGKLRFKKIKPEAFEANRFYTVINKKSGEIVPMEVNFNFDDPNLIILPLAFGKRFGREFIWNDLLSLETGSLKLANGRVIEKTLYNRRTRQDEPALFVALTFERREVLDSSNIKPMNLIGVDRGENIPAVIALTDPEGCPLSRFKDSLGNPTHILRIGESYKEKQRTIQAKKEVEQRRAGGYSRKYASKAKNLADDMVRNTARDLLYYAVTQDAMLIFENLSRGFGRQGKRTFMAERQYTRMEDWLTAKLAYEGLPSKTYLSKTLAQYTSKTCSNCGFTITSADYDRVLEKLKKTATGWMTTINGKELKVEGQITYYNRYKRQNVVKDLSVELDRLSEESVNNDISSWTKGRSGEALSLLKKRFSHRPVQEKFVCLNCGFETHADEQAALNIARSWLFLRSQEYKKYQTNKTTGNTDKRAFVETWQSFYRKKLKEVWKPAV

SEQ ID NO: 36069 - protein, 978 aa, synthetic construct
  REGION 1..978: note = engineered CasX variant
QEIKRINKIRRRLVKDSNTKKAGKTGPMKTLLVRVMTPDLRERLENLRKKPENIPQPISNTSRANLNKLLTDYTEMKKAILHVYWEEFQKDPVGLMSRVAQPASKKIDQNKLKPEMDEKGNLTTAGFACSQCGQPLFVYKLEQVSEKGKAYTNYFGRCNVAEHEKLILLAQLKPEKDSDEAVTYSLGKFGQRALDFYSIHVTKESTHPVKPLAQIAGNRYASAPVGKALSDACMGTIASFLSKYQDIIIEHQKVVKGNQKRLESLRELAGKENLEYPSVTLPPQPHTKEGVDAYNEVIARVRTWVNLNLWQKLKLSRDDAKPLLRLKGFPSFPLVERQANEVDWWDMVCNVKKLINEKKEDGKVFWQNLAGYKRQEALRPYLSSEEDRKKGKKFARYQLGDLLLHLEKKHGEDWGKVYDEAWERIDKKVEGLSKHIKLEEERRSEDAQSKAALTDWLRAKASFVIEGLKEADKDEFCRCELKLQKWYGDLRGKPFAIEAENSILDISGFSKQYNCAFIWQKDGVKKLNLYLIINYFKGGKLRFKKIKPEAFEANRFYTVINKKSGEIVPMEVNFNFDDPNLIILPLAFGKRFGREFIWNDLLSLETGSLKLANGRVIEKTLYNRRTRQDEPALFVALTFERREVLDSSNIKPMNLIGVDRGENIPAVIALTDPEGCPLSRFKDSLGNPTHILRIGESYKEKQRTIQAKKEVEQRRAGGYSRKYASKAKNLADDMVRNTARDLLYYAVTQDAMLIFENLSRGFGRQGKRTFMAERQYTRMEDWLTAKLAYEGLPSKTYLSKTLAQYTSKTCSNCGFTITSADYDRVLEKLKKTATGWMTTINGKELKVEGQITYYNRYKRQNVVKDLSVELDRLSEESVNNDISSWTKGRSGEALSLLKKRFSHRPVQEKFVCLNCGFETHADEQAALNIARSWLFLRSQEYKKYQTNKTTGNTDKRAFVETWQSFYRKKLKEVWKPAV

SEQ ID NO: 36070 - protein, 978 aa, synthetic construct
  REGION 1..978: note = engineered CasX variant
QEIKRINKIRRRLVKDSNTKKAGKTGPMKTLLVRVMTPDLRERLENLRKKPENIPQPISNTSRANLNKLLTDYTEMKKAILHVYWEEFQKDPVGLMSRVAQPASKKIDQNKLKPEMDEKGNLTTAGFACSQCGQPLFVYKLEQVSEKGKAYTNYFGRCNVAEHEKLILLAQLKPEKDSDEAVTYSLGKFGQRALDFYSIHVTKESTHPVKPLAQIAGNRYASVPVGKALSDACMGTIASFLSKYQDIIIEHQKVVKGNQKRLESLRELAGKENLEYPSVTLPPQPHTKEGVDAYNEVIARVRTWVNLNLWQKLKLSRDDAKPLLRLKGFPSFPLVERQANEVDWWDMVCNVKKLINEKKEDGKVFWQNLAGYKRQEALRPYLSSEEDRKKGKKFARYQLGDLLLHLEKKHGEDWGKVYDEAWERIDKKVEGLSKHIKLEEERRSEDAQSKAALTDWLRAKASFVIEGLKEADKDEFCRCELKLQKWYGDLRGKPFAIEAENSILDISGFSKQYNCAFIWQKDGVKKLNLYLIINYFKGGKLRFKKIKPEAFEANRFYTVINKKSGEIVPMEVNFNFDDPNLIILPLAFGKRFGREFIWNDLLSLETGSLKLANGRVIEKTLYNRRTRQDEPALFVALTFERREVLDSSNIKPMNLIGVDRGENIPAVIALTDPEGCPLSRFKDSLGNPTHILRIGESYKEKQRTIQAKKEVEQRRAGGYSRKYASKAKNLADDMVRNTARDLLYYAVTQDAMLIFENLSRGFGRQGKRTFMAERQYTRMEDWLTAKLAYEGLPSKTYLSKTLAQYTSKTCSNCGFTITSADYDRVLEKLKKTATGWMTTINGKELKVEGQITYYNRYKRQNVVKDLSVELDRLSEESVNNDISSWTKGRSGEALSLLKKRFSHRPVQEKFVCLNCGFETHADEQAALNIARSWLFLRSQEYKKYQTNKTTGNTDKRAFVETWQSFYRKKLKEVWKPAV

SEQ ID NO: 36071 - protein, 978 aa, synthetic construct
  REGION 1..978: note = engineered CasX variant
QEIKRINKIRRRLVKDSNTKKAGKTGPMKTLLVRVMTPDLRERLENLRKKPENIPQPISNTSRANLNKLLTDYTEMKKAILHVYWEEFQKDPVGLMSRVAQPASKKIDQNKLKPEMDEKGNLTTAGFACSQCGQPLFVYKLEQVSEKGKAYTNYFGRCNVAEHEKLIKLAQLKPEKDSDEAVTYSLGKFGQRALDFYSIHVTKESTHPVKPLAQIAGNRYASGPVGKALSDACMGTIASFLSKYQDIIIEHQKVVKGNQKRLESLRELAGKENLEYPSVTLPPQPHTKEGVDAYNEVIARVRTWVNLNLWQKLKLSRDDAKPLLRLKGFPSFPLVERQANEVDWWDMVCNVKKLINEKKEDGKVFWQNLAGYKRQEALRPYLSSEEDRKKGKKFARYQLGDLLLHLEKKHGEDWGKVYDEAWERIDKKVEGLSKHIKLEEERRSEDAQSKAALTDWLRAKASFVIEGLKEADKDEFCRCELKLQKWYGDLRGKPFAIEAENSILDISGFSKQYNCAFIWQKDGVKKLNLYLIINYFKGGKLRFKKIKPEAFEANRFYTVINKKSGEIVPMEVNFNFDDPNLIILPLAFGKRFGREFIWNDLLSLETGSLKLANGRVIEKTLYNRRTRQDEPALFVALTFERREVLDSSNIKPMNLIGVDRGENIPAVIALTDPEGCPLSRFKDSLGNPTHILRIGESYKEKQRTIQAKKEVEQRRAGGYSRKYASKAKNLADDMVRNTARDLLYYAVTQDAMLIFENLSRGFGRQGKRTFMAERQYTRMEDWLTAKLAYEGLPSKTYLSKTLAQYTSKTCSNCGFTITSADYDRVLEKLKKTATGWMTTINGKELKVEGQITYYNRYKRQNVVKDLSVELDRLSEESVNNDISSWTKGRSGEALSLLKKRFSHRPVQEKFVCLNCGFETHADEQAALNIARSWLFLRSQEYKKYQTNKTTGNTDKRAFVETWQSFYRKKLKEVWKPAV

SEQ ID NO: 36072 - protein, 977 aa, synthetic construct
  REGION 1..977: note = engineered CasX variant
QEIKRINKIRRRLVKDSNTKKAGKTGPMKTLLVRVMTPDLRERLENLRKKPENIPQPISNTSRANLNKLLTDYTEMKKAILHVYWEEFQKDPVGLMSRVAQPASKKIDQNKLKPEMDEKGNLTTAGFACSQCGQPLFVYKLEQVSEKGKAYTNYFGRCNVAEHEKLILLAQLKPEKDSDEAVTYSLGKFGQRALDFYSIHVTKESTHPVKPLAQIAGNRYASPVGKALSDACMGTIASFLSKYQDIIIEHQKVVKGNQKRLESLRELAGKENLEYPSVTLPPQPHTKEGVDAYNEVIARVRTWVNLNLWQKLKLSRDDAKPLLRLKGFPSFPLVERQANEVDWWDMVCNVKKLINEKKEDGKVFWQNLAGYKRQEALRPYLSSEEDRKKGKKFARYQLGDLLLHLEKKHGEDWGKVYDEAWERIDKKVEGLSKHIKLEEERRSEDAQSKAALTDWLRAKASFVIEGLKEADKDEFCRCELKLQKWYGDLRGKPFAIEAENSILDISGFSKQYNCAFIWQKDGVKKLNLYLIINYFKGGKLRFKKIKPEAFEANRFYTVINKKSGEIVPMEVNFNFDDPNLIILPLAFGKRFGREFIWNDLLSLETGSLKLANGRVIEKTLYNRRTRQDEPALFVALTFERREVLDSSNIKPMNLIGVDRGENIPAVIALTDPEGCPLSRFKDSLGNPTHILRIGESYKEKQRTIQAKKEVEQRRAGGYSRKYASKAKNLADDMVRNTARDLLYYAVTQDAMLIFENLSRGFGRQGKRTFMAERQYTRMEDWLTAKLAYEGLPSKTYLSKTLAQYTSKTCSNCGFTITSADYDRVLEKLKKTATGWMTTINGKELKVEGQITYYNRYKRQNVVKDLSVELDRLSEESVNNDISSWTKGRSGEALSLLKKRFSHRPVQEKFVCLNCGFETHADEQAALNIARSWLFLRSQEYKKYQTNKTTGNTDKRAFVETWQSFYRKKLKEVWKPAV

SEQ ID NO: 36073 - protein, 978 aa, synthetic construct
  REGION 1..978: note = engineered CasX variant
QEIKRINKIRRRLVKDSNTKKAGKTGPMKTLLVRVMTPDLRERLENLRKKPENIPQPISNTSRANLNKLLTDYTEMKKAILHVYWEEFQKDPVGLMSRVAQPASKKIDQNKLKPEMDEKGNLTTAGFACSQCGQPLFVYKLEQVSEKGKAYTNYFGRCNVAEHEKLILLAQLKPEKDSDEAVTYSLGKFGQRALDFYSIHVTKESTHPVKPLAQIAGNRYASYPVGKALSDACMGTIASFLSKYQDIIIEHQKVVKGNQKRLESLRELAGKENLEYPSVTLPPQPHTKEGVDAYNEVIARVRTWVNLNLWQKLKLSRDDAKPLLRLKGFPSFPLVERQANEVDWWDMVCNVKKLINEKKEDGKVFWQNLAGYKRQEALRPYLSSEEDRKKGKKFARYQLGDLLLHLEKKHGEDWGKVYDEAWERIDKKVEGLSKHIKLEEERRSEDAQSKAALTDWLRAKASFVIEGLKEADKDEFCRCELKLQKWYGDLRGKPFAIEAENSILDISGFSKQYNCAFIWQKDGVKKLNLYLIINYFKGGKLRFKKIKPEAFEANRFYTVINKKSGEIVPMEVNFNFDDPNLIILPLAFGKRVGREFIWNDLLSLETGSLKLANGRVIEKTLYNRRTRQDEPALFVALTFERREVLDSSNIKPMNLIGVDRGENIPAVIALTDPEGCPLSRFKDSLGNPTHILRIGESYKEKQRTIQAKKEVEQRRAGGYSRKYASKAKNLADDMVRNTARDLLYYAVTQDAMLIFENLSRGFGRQGKRTFMAERQYTRMEDWLTAKLAYEGLPSKTYLSKTLAQYTSKTCSNCGFTITSADYDRVLEKLKKTATGWMTTINGKELKVEGQITYYNRYKRQNVVKDLSVELDRLSEESVNNDISSWTKGRSGEALSLLKKRFSHRPVQEKFVCLNCGFETHADEQAALNIARSWLFLRSQEYKKYQTNKTTGNTDKRAFVETWQSFYRKKLKEVWKPAV

SEQ ID NO: 36074 - protein, 978 aa, synthetic construct
  REGION 1..978: note = engineered CasX variant
QEIKRINKIRRRLVKDSNTKKAGKTGPMKTLLVRVMTPDLRERLENLRKKPENIPQPISNTSRANLNKLLTDYTEMKKAILHVYWEEFQKDPVGLMSRVAQPASKKIDQNKLKPEMDEKGNLTTAGFACSQCGQPLFVYKLEQVSEKGKAYTNYFGRCNVAEHEKLILLAQLKPEKDSDEAVTYSLGKFGQRALDFYSIHVTKESTHPVKPLAQIAGNRYASHPVGKALSDACMGTIASFLSKYQDIIIEHQKVVKGNQKRLESLRELAGKENLEYPSVTLPPQPHTKEGVDAYNEVIARVRTWVNLNLWQKLKLSRDDAKPLLRLKGFPSFPLVERQANEVDWWDMVCNVKKLINEKKEDGKVFWQNLAGYKRQEALRPYLSSEEDRKKGKKFARYQLGDLLLHLEKKHGEDWGKVYDEAWERIDKKVEGLSKHIKLEEERRSEDAQSKAALTDWLRAKASFVIEGLKEADKDEFCRCELKLQKWYGDLRGKPFAIEAENSILDISGFSKQYNCAFIWQKDGVKKLNLYLIINYFKGGKLRFKKIKPEAFEANRFYTVINKKSGEIVPMEVNFNFDDPNLIILPLAFGKRVGREFIWNDLLSLETGSLKLANGRVIEKTLYNRRTRQDEPALFVALTFERREVLDSSNIKPMNLIGVDRGENIPAVIALTDPEGCPLSRFKDSLGNPTHILRIGESYKEKQRTIQAKKEVEQRRAGGYSRKYASKAKNLADDMVRNTARDLLYYAVTQDAMLIFENLSRGFGRQGKRTFMAERQYTRMEDWLTAKLAYEGLPSKTYLSKTLAQYTSKTCSNCGFTITSADYDRVLEKLKKTATGWMTTINGKELKVEGQITYYNRYKRQNVVKDLSVELDRLSEESVNNDISSWTKGRSGEALSLLKKRFSHRPVQEKFVCLNCGFETHADEQAALNIARSWLFLRSQEYKKYQTNKTTGNTDKRAFVETWQSFYRKKLKEVWKPAV

SEQ ID NO: 36075 - protein, 978 aa, synthetic construct
  REGION 1..978: note = engineered CasX variant
QEIKRINKIRRRLVKDSNTKKAGKTGPMKTLLVRVMTPDLRERLENLRKKPENIPQPISNTSRANLNKLLTDYTEMKKAILHVYWEEFQKDPVGLMSRVAQPASKKIDQNKLKPEMDEKGNLTTAGFACSQCGQPLFVYKLEQVSEKGKAYTNYFGRCNVAEHEKLILLAQLKPEKDSDEAVTYSLGKFGQRALDFYSIHVTKESTHPVKPLAQIAGNRYASSPVGKALSDACMGTIASFLSKYQDIIIEHQKVVKGNQKRLESLRELAGKENLEYPSVTLPPQPHTKEGVDAYNEVIARVRTWVNLNLWQKLKLSRDDAKPLLRLKGFPSFPLVERQANEVDWWDMVCNVKKLINEKKEDGKVFWQNLAGYKRQEALRPYLSSEEDRKKGKKFARYQLGDLLLHLEKKHGEDWGKVYDEAWERIDKKVEGLSKHIKLEEERRSEDAQSKAALTDWLRAKASFVIEGLKEADKDEFCRCELKLQKWYGDLRGKPFAIEAENSILDISGFSKQYNCAFIWQKDGVKKLNLYLIINYFKGGKLRFKKIKPEAFEANRFYTVINKKSGEIVPMEVNFNFDDPNLIILPLAFGKRVGREFIWNDLLSLETGSLKLANGRVIEKTLYNRRTRQDEPALFVALTFERREVLDSSNIKPMNLIGVDRGENIPAVIALTDPEGCPLSRFKDSLGNPTHILRIGESYKEKQRTIQAKKEVEQRRAGGYSRKYASKAKNLADDMVRNTARDLLYYAVTQDAMLIFENLSRGFGRQGKRTFMAERQYTRMEDWLTAKLAYEGLPSKTYLSKTLAQYTSKTCSNCGFTITSADYDRVLEKLKKTATGWMTTINGKELKVEGQITYYNRYKRQNVVKDLSVELDRLSEESVNNDISSWTKGRSGEALSLLKKRFSHRPVQEKFVCLNCGFETHADEQAALNIARSWLFLRSQEYKKYQTNKTTGNTDKRAFVETWQSFYRKKLKEVWKPAV

SEQ ID NO: 36076 - protein, 978 aa, synthetic construct
  REGION 1..978: note = engineered CasX variant
QEIKRINKIRRRLVKDSNTKKAGKTGPMKTLLVRVMTPDLRERLENLRKKPENIPQPISNTSRANLNKLLTDYTEMKKAILHVYWEEFQKDPVGLMSRVAQPASKKIDQNKLKPEMDEKGNLTTAGFACSQCGQPLFVYKLEQVSEKGKAYTNYFGRCNVAEHEKLILLAQLKPEKDSDEAVTYSLGKFGQRALDFYSIHVTKESTHPVKPLAQIAGNRYASTPVGKALSDACMGTIASFLSKYQDIIIEHQKVVKGNQKRLESLRELAGKENLEYPSVTLPPQPHTKEGVDAYNEVIARVRTWVNLNLWQKLKLSRDDAKPLLRLKGFPSFPLVERQANEVDWWDMVCNVKKLINEKKEDGKVFWQNLAGYKRQEALRPYLSSEEDRKKGKKFARYQLGDLLLHLEKKHGEDWGKVYDEAWERIDKKVEGLSKHIKLEEERRSEDAQSKAALTDWLRAKASFVIEGLKEADKDEFCRCELKLQKWYGDLRGKPFAIEAENSILDISGFSKQYNCAFIWQKDGVKKLNLYLIINYFKGGKLRFKKIKPEAFEANRFYTVINKKSGEIVPMEVNFNFDDPNLIILPLAFGKRVGREFIWNDLLSLETGSLKLANGRVIEKTLYNRRTRQDEPALFVALTFERREVLDSSNIKPMNLIGVDRGENIPAVIALTDPEGCPLSRFKDSLGNPTHILRIGESYKEKQRTIQAKKEVEQRRAGGYSRKYASKAKNLADDMVRNTARDLLYYAVTQDAMLIFENLSRGFGRQGKRTFMAERQYTRMEDWLTAKLAYEGLPSKTYLSKTLAQYTSKTCSNCGFTITSADYDRVLEKLKKTATGWMTTINGKELKVEGQITYYNRYKRQNVVKDLSVELDRLSEESVNNDISSWTKGRSGEALSLLKKRFSHRPVQEKFVCLNCGFETHADEQAALNIARSWLFLRSQEYKKYQTNKTTGNTDKRAFVETWQSFYRKKLKEVWKPAV

SEQ ID NO: 36077 - protein, 978 aa, synthetic construct
  REGION 1..978: note = engineered CasX variant
QEIKRINKIRRRLVKDSNTKKAGKTGPMKTLLVRVMTPDLRERLENLRKKPENIPQPISNTSRANLNKLLTDYTEMKKAILHVYWEEFQKDPVGLMSRVAQPASKKIDQNKLKPEMDEKGNLTTAGFACSQCGQPLFVYKLEQVSEKGKAYTNYFGRCNVAEHEKLILLAQLKPEKDSDEAVTYSLGKFGQRALDFYSIHVTKESTHPVKPLAQIAGNRYASAPVGKALSDACMGTIASFLSKYQDIIIEHQKVVKGNQKRLESLRELAGKENLEYPSVTLPPQPHTKEGVDAYNEVIARVRTWVNLNLWQKLKLSRDDAKPLLRLKGFPSFPLVERQANEVDWWDMVCNVKKLINEKKEDGKVFWQNLAGYKRQEALRPYLSSEEDRKKGKKFARYQLGDLLLHLEKKHGEDWGKVYDEAWERIDKKVEGLSKHIKLEEERRSEDAQSKAALTDWLRAKASFVIEGLKEADKDEFCRCELKLQKWYGDLRGKPFAIEAENSILDISGFSKQYNCAFIWQKDGVKKLNLYLIINYFKGGKLRFKKIKPEAFEANRFYTVINKKSGEIVPMEVNFNFDDPNLIILPLAFGKRVGREFIWNDLLSLETGSLKLANGRVIEKTLYNRRTRQDEPALFVALTFERREVLDSSNIKPMNLIGVDRGENIPAVIALTDPEGCPLSRFKDSLGNPTHILRIGESYKEKQRTIQAKKEVEQRRAGGYSRKYASKAKNLADDMVRNTARDLLYYAVTQDAMLIFENLSRGFGRQGKRTFMAERQYTRMEDWLTAKLAYEGLPSKTYLSKTLAQYTSKTCSNCGFTITSADYDRVLEKLKKTATGWMTTINGKELKVEGQITYYNRYKRQNVVKDLSVELDRLSEESVNNDISSWTKGRSGEALSLLKKRFSHRPVQEKFVCLNCGFETHADEQAALNIARSWLFLRSQEYKKYQTNKTTGNTDKRAFVETWQSFYRKKLKEVWKPAV

SEQ ID NO: 36078 - protein, 978 aa, synthetic construct
  REGION 1..978: note = engineered CasX variant
QEIKRINKIRRRLVKDSNTKKAGKTGPMKTLLVRVMTPDLRERLENLRKKPENIPQPISNTSRANLNKLLTDYTEMKKAILHVYWEEFQKDPVGLMSRVAQPASKKIDQNKLKPEMDEKGNLTTAGFACSQCGQPLFVYKLEQVSEKGKAYTNYFGRCNVAEHEKLILLAQLKPEKDSDEAVTYSLGKFGQRALDFYSIHVTKESTHPVKPLAQIAGNRYASVPVGKALSDACMGTIASFLSKYQDIIIEHQKVVKGNQKRLESLRELAGKENLEYPSVTLPPQPHTKEGVDAYNEVIARVRTWVNLNLWQKLKLSRDDAKPLLRLKGFPSFPLVERQANEVDWWDMVCNVKKLINEKKEDGKVFWQNLAGYKRQEALRPYLSSEEDRKKGKKFARYQLGDLLLHLEKKHGEDWGKVYDEAWERIDKKVEGLSKHIKLEEERRSEDAQSKAALTDWLRAKASFVIEGLKEADKDEFCRCELKLQKWYGDLRGKPFAIEAENSILDISGFSKQYNCAFIWQKDGVKKLNLYLIINYFKGGKLRFKKIKPEAFEANRFYTVINKKSGEIVPMEVNFNFDDPNLIILPLAFGKRVGREFIWNDLLSLETGSLKLANGRVIEKTLYNRRTRQDEPALFVALTFERREVLDSSNIKPMNLIGVDRGENIPAVIALTDPEGCPLSRFKDSLGNPTHILRIGESYKEKQRTIQAKKEVEQRRAGGYSRKYASKAKNLADDMVRNTARDLLYYAVTQDAMLIFENLSRGFGRQGKRTFMAERQYTRMEDWLTAKLAYEGLPSKTYLSKTLAQYTSKTCSNCGFTITSADYDRVLEKLKKTATGWMTTINGKELKVEGQITYYNRYKRQNVVKDLSVELDRLSEESVNNDISSWTKGRSGEALSLLKKRFSHRPVQEKFVCLNCGFETHADEQAALNIARSWLFLRSQEYKKYQTNKTTGNTDKRAFVETWQSFYRKKLKEVWKPAV

SEQ ID NO: 36079 - protein, 978 aa, synthetic construct
  REGION 1..978: note = engineered CasX variant
QEIKRINKIRRRLVKDSNTKKAGKTGPMKTLLVRVMTPDLRERLENLRKKPENIPQPISNTSRANLNKLLTDYTEMKKAILHVYWEEFQKDPVGLMSRVAQPASKKIDQNKLKPEMDEKGNLTTAGFACSQCGQPLFVYKLEQVSEKGKAYTNYFGRCNVAEHEKLIKLAQLKPEKDSDEAVTYSLGKFGQRALDFYSIHVTKESTHPVKPLAQIAGNRYASGPVGKALSDACMGTIASFLSKYQDIIIEHQKVVKGNQKRLESLRELAGKENLEYPSVTLPPQPHTKEGVDAYNEVIARVRTWVNLNLWQKLKLSRDDAKPLLRLKGFPSFPLVERQANEVDWWDMVCNVKKLINEKKEDGKVFWQNLAGYKRQEALRPYLSSEEDRKKGKKFARYQLGDLLLHLEKKHGEDWGKVYDEAWERIDKKVEGLSKHIKLEEERRSEDAQSKAALTDWLRAKASFVIEGLKEADKDEFCRCELKLQKWYGDLRGKPFAIEAENSILDISGFSKQYNCAFIWQKDGVKKLNLYLIINYFKGGKLRFKKIKPEAFEANRFYTVINKKSGEIVPMEVNFNFDDPNLIILPLAFGKRVGREFIWNDLLSLETGSLKLANGRVIEKTLYNRRTRQDEPALFVALTFERREVLDSSNIKPMNLIGVDRGENIPAVIALTDPEGCPLSRFKDSLGNPTHILRIGESYKEKQRTIQAKKEVEQRRAGGYSRKYASKAKNLADDMVRNTARDLLYYAVTQDAMLIFENLSRGFGRQGKRTFMAERQYTRMEDWLTAKLAYEGLPSKTYLSKTLAQYTSKTCSNCGFTITSADYDRVLEKLKKTATGWMTTINGKELKVEGQITYYNRYKRQNVVKDLSVELDRLSEESVNNDISSWTKGRSGEALSLLKKRFSHRPVQEKFVCLNCGFETHADEQAALNIARSWLFLRSQEYKKYQTNKTTGNTDKRAFVETWQSFYRKKLKEVWKPAV

SEQ ID NO: 36080 - protein, 977 aa, synthetic construct
  REGION 1..977: note = engineered CasX variant
QEIKRINKIRRRLVKDSNTKKAGKTGPMKTLLVRVMTPDLRERLENLRKKPENIPQPISNTSRANLNKLLTDYTEMKKAILHVYWEEFQKDPVGLMSRVAQPASKKIDQNKLKPEMDEKGNLTTAGFACSQCGQPLFVYKLEQVSEKGKAYTNYFGRCNVAEHEKLILLAQLKPEKDSDEAVTYSLGKFGQRALDFYSIHVTKESTHPVKPLAQIAGNRYASPVGKALSDACMGTIASFLSKYQDIIIEHQKVVKGNQKRLESLRELAGKENLEYPSVTLPPQPHTKEGVDAYNEVIARVRTWVNLNLWQKLKLSRDDAKPLLRLKGFPSFPLVERQANEVDWWDMVCNVKKLINEKKEDGKVFWQNLAGYKRQEALRPYLSSEEDRKKGKKFARYQLGDLLLHLEKKHGEDWGKVYDEAWERIDKKVEGLSKHIKLEEERRSEDAQSKAALTDWLRAKASFVIEGLKEADKDEFCRCELKLQKWYGDLRGKPFAIEAENSILDISGFSKQYNCAFIWQKDGVKKLNLYLIINYFKGGKLRFKKIKPEAFEANRFYTVINKKSGEIVPMEVNFNFDDPNLIILPLAFGKRVGREFIWNDLLSLETGSLKLANGRVIEKTLYNRRTRQDEPALFVALTFERREVLDSSNIKPMNLIGVDRGENIPAVIALTDPEGCPLSRFKDSLGNPTHILRIGESYKEKQRTIQAKKEVEQRRAGGYSRKYASKAKNLADDMVRNTARDLLYYAVTQDAMLIFENLSRGFGRQGKRTFMAERQYTRMEDWLTAKLAYEGLPSKTYLSKTLAQYTSKTCSNCGFTITSADYDRVLEKLKKTATGWMTTINGKELKVEGQITYYNRYKRQNVVKDLSVELDRLSEESVNNDISSWTKGRSGEALSLLKKRFSHRPVQEKFVCLNCGFETHADEQAALNIARSWLFLRSQEYKKYQTNKTTGNTDKRAFVETWQSFYRKKLKEVWKPAV

SEQ ID NO: 36081 - protein, 979 aa, synthetic construct
  REGION 1..979: note = engineered CasX variant
QEIKRINKIRRRLVKDSNTKKAGKTGPMKTLLVRVMTPDLRERLENLRKKPENIPQPISNTSRANLNKLLTDYTEMKKAILHVYWEEFQKDPVGLMSRVAQPASKKIDQNKLKPEMDEKGNLTTAGFACSQCGQPLFVYKLEQVSEKGKAYTNYFGRCNVAEHEKLILLAQLKPEKDSDEAVTYSLGKFGQRALDFYSIHVTKESTHPVKPLAQIAGNRYASYPVGKALSDACMGTIASFLSKYQDIIIEHQKVVKGNQKRLESLRELAGKENLEYPSVTLPPQPHTKEGVDAYNEVIARVRTWVNLNLWQKLKLSRDDAKPLLRLKGFPSFPLVERQANEVDWWDMVCNVKKLINEKKEDGKVFWQNLAGYKRQEALRPYLSSEEDRKKGKKFARYQLGDLLLHLEKKHGEDWGKVYDEAWERIDKKVEGLSKHIKLEEERRSEDAQSKAALTDWLRAKASFVIEGLKEADKDEFCRCELKLQKWYGDLRGKPFAIEAENSILDISGFSKQYNCAFIWQKDGVKKLNLYLIINYFKGGKLRFKKIKPEAFEANRFYTVINKKSGEIVPMEVNFNFDDPNLIILPLAFGKRQGREFIWNDLLSLETGSLKLANGRVIEKTLYNRRTRQDEPALFVALTFERREVLDSSNIKTPMNLIGVDRGENIPAVIALTDPEGCPLSRFKDSLGNPTHILRIGESYKEKQRTIQAKKEVEQRRAGGYSRKYASKAKNLADDMVRNTARDLLYYAVTQDAMLIFENLSRGFGRQGKRTFMAERQYTRMEDWLTAKLAYEGLPSKTYLSKTLAQYTSKTCSNCGFTITSADYDRVLEKLKKTATGWMTTINGKELKVEGQITYYNRYKRQNVVKDLSVELDRLSEESVNNDISSWTKGRSGEALSLLKKRFSHRPVQEKFVCLNCGFETHADEQAALNIARSWLFLRSQEYKKYQTNKTTGNTDKRAFVETWQSFYRKKLKEVWKPAV

SEQ ID NO: 36082 - protein, 979 aa, synthetic construct
  REGION 1..979: note = engineered CasX variant
QEIKRINKIRRRLVKDSNTKKAGKTGPMKTLLVRVMTPDLRERLENLRKKPENIPQPISNTSRANLNKLLTDYTEMKKAILHVYWEEFQKDPVGLMSRVAQPASKKIDQNKLKPEMDEKGNLTTAGFACSQCGQPLFVYKLEQVSEKGKAYTNYFGRCNVAEHEKLILLAQLKPEKDSDEAVTYSLGKFGQRALDFYSIHVTKESTHPVKPLAQIAGNRYASHPVGKALSDACMGTIASFLSKYQDIIIEHQKVVKGNQKRLESLRELAGKENLEYPSVTLPPQPHTKEGVDAYNEVIARVRTWVNLNLWQKLKLSRDDAKPLLRLKGFPSFPLVERQANEVDWWDMVCNVKKLINEKKEDGKVFWQNLAGYKRQEALRPYLSSEEDRKKGKKFARYQLGDLLLHLEKKHGEDWGKVYDEAWERIDKKVEGLSKHIKLEEERRSEDAQSKAALTDWLRAKASFVIEGLKEADKDEFCRCELKLQKWYGDLRGKPFAIEAENSILDISGFSKQYNCAFIWQKDGVKKLNLYLIINYFKGGKLRFKKIKPEAFEANRFYTVINKKSGEIVPMEVNFNFDDPNLIILPLAFGKRQGREFIWNDLLSLETGSLKLANGRVIEKTLYNRRTRQDEPALFVALTFERREVLDSSNIKTPMNLIGVDRGENIPAVIALTDPEGCPLSRFKDSLGNPTHILRIGESYKEKQRTIQAKKEVEQRRAGGYSRKYASKAKNLADDMVRNTARDLLYYAVTQDAMLIFENLSRGFGRQGKRTFMAERQYTRMEDWLTAKLAYEGLPSKTYLSKTLAQYTSKTCSNCGFTITSADYDRVLEKLKKTATGWMTTINGKELKVEGQITYYNRYKRQNVVKDLSVELDRLSEESVNNDISSWTKGRSGEALSLLKKRFSHRPVQEKFVCLNCGFETHADEQAALNIARSWLFLRSQEYKKYQTNKTTGNTDKRAFVETWQSFYRKKLKEVWKPAV

SEQ ID NO: 36083 - protein, 979 aa, synthetic construct
  REGION 1..979: note = engineered CasX variant
QEIKRINKIRRRLVKDSNTKKAGKTGPMKTLLVRVMTPDLRERLENLRKKPENIPQPISNTSRANLNKLLTDYTEMKKAILHVYWEEFQKDPVGLMSRVAQPASKKIDQNKLKPEMDEKGNLTTAGFACSQCGQPLFVYKLEQVSEKGKAYTNYFGRCNVAEHEKLILLAQLKPEKDSDEAVTYSLGKFGQRALDFYSIHVTKESTHPVKPLAQIAGNRYASSPVGKALSDACMGTIASFLSKYQDIIIEHQKVVKGNQKRLESLRELAGKENLEYPSVTLPPQPHTKEGVDAYNEVIARVRTWVNLNLWQKLKLSRDDAKPLLRLKGFPSFPLVERQANEVDWWDMVCNVKKLINEKKEDGKVFWQNLAGYKRQEALRPYLSSEEDRKKGKKFARYQLGDLLLHLEKKHGEDWGKVYDEAWERIDKKVEGLSKHIKLEEERRSEDAQSKAALTDWLRAKASFVIEGLKEADKDEFCRCELKLQKWYGDLRGKPFAIEAENSILDISGFSKQYNCAFIWQKDGVKKLNLYLIINYFKGGKLRFKKIKPEAFEANRFYTVINKKSGEIVPMEVNFNFDDPNLIILPLAFGKRQGREFIWNDLLSLETGSLKLANGRVIEKTLYNRRTRQDEPALFVALTFERREVLDSSNIKTPMNLIGVDRGENIPAVIALTDPEGCPLSRFKDSLGNPTHILRIGESYKEKQRTIQAKKEVEQRRAGGYSRKYASKAKNLADDMVRNTARDLLYYAVTQDAMLIFENLSRGFGRQGKRTFMAERQYTRMEDWLTAKLAYEGLPSKTYLSKTLAQYTSKTCSNCGFTITSADYDRVLEKLKKTATGWMTTINGKELKVEGQITYYNRYKRQNVVKDLSVELDRLSEESVNNDISSWTKGRSGEALSLLKKRFSHRPVQEKFVCLNCGFETHADEQAALNIARSWLFLRSQEYKKYQTNKTTGNTDKRAFVETWQSFYRKKLKEVWKPAV

SEQ ID NO: 36084 - protein, 979 aa, synthetic construct
  REGION 1..979: note = engineered CasX variant
QEIKRINKIRRRLVKDSNTKKAGKTGPMKTLLVRVMTPDLRERLENLRKKPENIPQPISNTSRANLNKLLTDYTEMKKAILHVYWEEFQKDPVGLMSRVAQPASKKIDQNKLKPEMDEKGNLTTAGFACSQCGQPLFVYKLEQVSEKGKAYTNYFGRCNVAEHEKLILLAQLKPEKDSDEAVTYSLGKFGQRALDFYSIHVTKESTHPVKPLAQIAGNRYASTPVGKALSDACMGTIASFLSKYQDIIIEHQKVVKGNQKRLESLRELAGKENLEYPSVTLPPQPHTKEGVDAYNEVIARVRTWVNLNLWQKLKLSRDDAKPLLRLKGFPSFPLVERQANEVDWWDMVCNVKKLINEKKEDGKVFWQNLAGYKRQEALRPYLSSEEDRKKGKKFARYQLGDLLLHLEKKHGEDWGKVYDEAWERIDKKVEGLSKHIKLEEERRSEDAQSKAALTDWLRAKASFVIEGLKEADKDEFCRCELKLQKWYGDLRGKPFAIEAENSILDISGFSKQYNCAFIWQKDGVKKLNLYLIINYFKGGKLRFKKIKPEAFEANRFYTVINKKSGEIVPMEVNFNFDDPNLIILPLAFGKRQGREFIWNDLLSLETGSLKLANGRVIEKTLYNRRTRQDEPALFVALTFERREVLDSSNIKTPMNLIGVDRGENIPAVIALTDPEGCPLSRFKDSLGNPTHILRIGESYKEKQRTIQAKKEVEQRRAGGYSRKYASKAKNLADDMVRNTARDLLYYAVTQDAMLIFENLSRGFGRQGKRTFMAERQYTRMEDWLTAKLAYEGLPSKTYLSKTLAQYTSKTCSNCGFTITSADYDRVLEKLKKTATGWMTTINGKELKVEGQITYYNRYKRQNVVKDLSVELDRLSEESVNNDISSWTKGRSGEALSLLKKRFSHRPVQEKFVCLNCGFETHADEQAALNIARSWLFLRSQEYKKYQTNKTTGNTDKRAFVETWQSFYRKKLKEVWKPAV

SEQ ID NO: 36085 - protein, 979 aa, synthetic construct
  REGION 1..979: note = engineered CasX variant
QEIKRINKIRRRLVKDSNTKKAGKTGPMKTLLVRVMTPDLRERLENLRKKPENIPQPISNTSRANLNKLLTDYTEMKKAILHVYWEEFQKDPVGLMSRVAQPASKKIDQNKLKPEMDEKGNLTTAGFACSQCGQPLFVYKLEQVSEKGKAYTNYFGRCNVAEHEKLILLAQLKPEKDSDEAVTYSLGKFGQRALDFYSIHVTKESTHPVKPLAQIAGNRYASAPVGKALSDACMGTIASFLSKYQDIIIEHQKVVKGNQKRLESLRELAGKENLEYPSVTLPPQPHTKEGVDAYNEVIARVRTWVNLNLWQKLKLSRDDAKPLLRLKGFPSFPLVERQANEVDWWDMVCNVKKLINEKKEDGKVFWQNLAGYKRQEALRPYLSSEEDRKKGKKFARYQLGDLLLHLEKKHGEDWGKVYDEAWERIDKKVEGLSKHIKLEEERRSEDAQSKAALTDWLRAKASFVIEGLKEADKDEFCRCELKLQKWYGDLRGKPFAIEAENSILDISGFSKQYNCAFIWQKDGVKKLNLYLIINYFKGGKLRFKKIKPEAFEANRFYTVINKKSGEIVPMEVNFNFDDPNLIILPLAFGKRQGREFIWNDLLSLETGSLKLANGRVIEKTLYNRRTRQDEPALFVALTFERREVLDSSNIKTPMNLIGVDRGENIPAVIALTDPEGCPLSRFKDSLGNPTHILRIGESYKEKQRTIQAKKEVEQRRAGGYSRKYASKAKNLADDMVRNTARDLLYYAVTQDAMLIFENLSRGFGRQGKRTFMAERQYTRMEDWLTAKLAYEGLPSKTYLSKTLAQYTSKTCSNCGFTITSADYDRVLEKLKKTATGWMTTINGKELKVEGQITYYNRYKRQNVVKDLSVELDRLSEESVNNDISSWTKGRSGEALSLLKKRFSHRPVQEKFVCLNCGFETHADEQAALNIARSWLFLRSQEYKKYQTNKTTGNTDKRAFVETWQSFYRKKLKEVWKPAV

SEQ ID NO: 36086 - protein, 979 aa, synthetic construct
  REGION 1..979: note = engineered CasX variant
QEIKRINKIRRRLVKDSNTKKAGKTGPMKTLLVRVMTPDLRERLENLRKKPENIPQPISNTSRANLNKLLTDYTEMKKAILHVYWEEFQKDPVGLMSRVAQPASKKIDQNKLKPEMDEKGNLTTAGFACSQCGQPLFVYKLEQVSEKGKAYTNYFGRCNVAEHEKLILLAQLKPEKDSDEAVTYSLGKFGQRALDFYSIHVTKESTHPVKPLAQIAGNRYASVPVGKALSDACMGTIASFLSKYQDIIIEHQKVVKGNQKRLESLRELAGKENLEYPSVTLPPQPHTKEGVDAYNEVIARVRTWVNLNLWQKLKLSRDDAKPLLRLKGFPSFPLVERQANEVDWWDMVCNVKKLINEKKEDGKVFWQNLAGYKRQEALRPYLSSEEDRKKGKKFARYQLGDLLLHLEKKHGEDWGKVYDEAWERIDKKVEGLSKHIKLEEERRSEDAQSKAALTDWLRAKASFVIEGLKEADKDEFCRCELKLQKWYGDLRGKPFAIEAENSILDISGFSKQYNCAFIWQKDGVKKLNLYLIINYFKGGKLRFKKIKPEAFEANRFYTVINKKSGEIVPMEVNFNFDDPNLIILPLAFGKRQGREFIWNDLLSLETGSLKLANGRVIEKTLYNRRTRQDEPALFVALTFERREVLDSSNIKTPMNLIGVDRGENIPAVIALTDPEGCPLSRFKDSLGNPTHILRIGESYKEKQRTIQAKKEVEQRRAGGYSRKYASKAKNLADDMVRNTARDLLYYAVTQDAMLIFENLSRGFGRQGKRTFMAERQYTRMEDWLTAKLAYEGLPSKTYLSKTLAQYTSKTCSNCGFTITSADYDRVLEKLKKTATGWMTTINGKELKVEGQITYYNRYKRQNVVKDLSVELDRLSEESVNNDISSWTKGRSGEALSLLKKRFSHRPVQEKFVCLNCGFETHADEQAALNIARSWLFLRSQEYKKYQTNKTTGNTDKRAFVETWQSFYRKKLKEVWKPAV

SEQ ID NO: 36087 - protein, 979 aa, synthetic construct
  REGION 1..979: note = engineered CasX variant
QEIKRINKIRRRLVKDSNTKKAGKTGPMKTLLVRVMTPDLRERLENLRKKPENIPQPISNTSRANLNKLLTDYTEMKKAILHVYWEEFQKDPVGLMSRVAQPASKKIDQNKLKPEMDEKGNLTTAGFACSQCGQPLFVYKLEQVSEKGKAYTNYFGRCNVAEHEKLIKLAQLKPEKDSDEAVTYSLGKFGQRALDFYSIHVTKESTHPVKPLAQIAGNRYASGPVGKALSDACMGTIASFLSKYQDIIIEHQKVVKGNQKRLESLRELAGKENLEYPSVTLPPQPHTKEGVDAYNEVIARVRTWVNLNLWQKLKLSRDDAKPLLRLKGFPSFPLVERQANEVDWWDMVCNVKKLINEKKEDGKVFWQNLAGYKRQEALRPYLSSEEDRKKGKKFARYQLGDLLLHLEKKHGEDWGKVYDEAWERIDKKVEGLSKHIKLEEERRSEDAQSKAALTDWLRAKASFVIEGLKEADKDEFCRCELKLQKWYGDLRGKPFAIEAENSILDISGFSKQYNCAFIWQKDGVKKLNLYLIINYFKGGKLRFKKIKPEAFEANRFYTVINKKSGEIVPMEVNFNFDDPNLIILPLAFGKRQGREFIWNDLLSLETGSLKLANGRVIEKTLYNRRTRQDEPALFVALTFERREVLDSSNIKTPMNLIGVDRGENIPAVIALTDPEGCPLSRFKDSLGNPTHILRIGESYKEKQRTIQAKKEVEQRRAGGYSRKYASKAKNLADDMVRNTARDLLYYAVTQDAMLIFENLSRGFGRQGKRTFMAERQYTRMEDWLTAKLAYEGLPSKTYLSKTLAQYTSKTCSNCGFTITSADYDRVLEKLKKTATGWMTTINGKELKVEGQITYYNRYKRQNVVKDLSVELDRLSEESVNNDISSWTKGRSGEALSLLKKRFSHRPVQEKFVCLNCGFETHADEQAALNIARSWLFLRSQEYKKYQTNKTTGNTDKRAFVETWQSFYRKKLKEVWKPAV

SEQ ID NO: 36088 - protein, 978 aa, synthetic construct
  REGION 1..978: note = engineered CasX variant
QEIKRINKIRRRLVKDSNTKKAGKTGPMKTLLVRVMTPDLRERLENLRKKPENIPQPISNTSRANLNKLLTDYTEMKKAILHVYWEEFQKDPVGLMSRVAQPASKKIDQNKLKPEMDEKGNLTTAGFACSQCGQPLFVYKLEQVSEKGKAYTNYFGRCNVAEHEKLILLAQLKPEKDSDEAVTYSLGKFGQRALDFYSIHVTKESTHPVKPLAQIAGNRYASPVGKALSDACMGTIASFLSKYQDIIIEHQKVVKGNQKRLESLRELAGKENLEYPSVTLPPQPHTKEGVDAYNEVIARVRTWVNLNLWQKLKLSRDDAKPLLRLKGFPSFPLVERQANEVDWWDMVCNVKKLINEKKEDGKVFWQNLAGYKRQEALRPYLSSEEDRKKGKKFARYQLGDLLLHLEKKHGEDWGKVYDEAWERIDKKVEGLSKHIKLEEERRSEDAQSKAALTDWLRAKASFVIEGLKEADKDEFCRCELKLQKWYGDLRGKPFAIEAENSILDISGFSKQYNCAFIWQKDGVKKLNLYLIINYFKGGKLRFKKIKPEAFEANRFYTVINKKSGEIVPMEVNFNFDDPNLIILPLAFGKRQGREFIWNDLLSLETGSLKLANGRVIEKTLYNRRTRQDEPALFVALTFERREVLDSSNIKTPMNLIGVDRGENIPAVIALTDPEGCPLSRFKDSLGNPTHILRIGESYKEKQRTIQAKKEVEQRRAGGYSRKYASKAKNLADDMVRNTARDLLYYAVTQDAMLIFENLSRGFGRQGKRTFMAERQYTRMEDWLTAKLAYEGLPSKTYLSKTLAQYTSKTCSNCGFTITSADYDRVLEKLKKTATGWMTTINGKELKVEGQITYYNRYKRQNVVKDLSVELDRLSEESVNNDISSWTKGRSGEALSLLKKRFSHRPVQEKFVCLNCGFETHADEQAALNIARSWLFLRSQEYKKYQTNKTTGNTDKRAFVETWQSFYRKKLKEVWKPAV

SEQ ID NO: 36089 - protein, 979 aa, synthetic construct
  REGION 1..979: note = engineered CasX variant
QEIKRINKIRRRLVKDSNTKKAGKTGPMKTLLVRVMTPDLRERLENLRKKPENIPQPISNTSRANLNKLLTDYTEMKKAILHVYWEEFQKDPVGLMSRVAQPASKKIDQNKLKPEMDEKGNLTTAGFACSQCGQPLFVYKLEQVSEKGKAYTNYFGRCNVAEHEKLILLAQLKPEKDSDEAVTYSLGKFGQRALDFYSIHVTKESTHPVKPLAQIAGNRYASYPVGKALSDACMGTIASFLSKYQDIIIEHQKVVKGNQKRLESLRELAGKENLEYPSVTLPPQPHTKEGVDAYNEVIARVRTWVNLNLWQKLKLSRDDAKPLLRLKGFPSFPLVERQANEVDWWDMVCNVKKLINEKKEDGKVFWQNLAGYKRQEALRPYLSSEEDRKKGKKFARYQLGDLLLHLEKKHGEDWGKVYDEAWERIDKKVEGLSKHIKLEEERRSEDAQSKAALTDWLRAKASFVIEGLKEADKDEFCRCELKLQKWYGDLRGKPFAIEAENSILDISGFSKQYNCAFIWQKDGVKKLNLYLIINYFKGGKLRFKKIKPEAFEANRFYTVINKKSGEIVPMEVNFNFDDPNLIILPLAFGKRQGREFIWNDLLSLETGSLKLANGRVIEKTLYNRRTRQDEPALFVALTFERREVLDSSNIKPMSNLIGVDRGENIPAVIALTDPEGCPLSRFKDSLGNPTHILRIGESYKEKQRTIQAKKEVEQRRAGGYSRKYASKAKNLADDMVRNTARDLLYYAVTQDAMLIFENLSRGFGRQGKRTFMAERQYTRMEDWLTAKLAYEGLPSKTYLSKTLAQYTSKTCSNCGFTITSADYDRVLEKLKKTATGWMTTINGKELKVEGQITYYNRYKRQNVVKDLSVELDRLSEESVNNDISSWTKGRSGEALSLLKKRFSHRPVQEKFVCLNCGFETHADEQAALNIARSWLFLRSQEYKKYQTNKTTGNTDKRAFVETWQSFYRKKLKEVWKPAV

SEQ ID NO: 36090 - protein, 979 aa, synthetic construct
  REGION 1..979: note = engineered CasX variant
QEIKRINKIRRRLVKDSNTKKAGKTGPMKTLLVRVMTPDLRERLENLRKKPENIPQPISNTSRANLNKLLTDYTEMKKAILHVYWEEFQKDPVGLMSRVAQPASKKIDQNKLKPEMDEKGNLTTAGFACSQCGQPLFVYKLEQVSEKGKAYTNYFGRCNVAEHEKLILLAQLKPEKDSDEAVTYSLGKFGQRALDFYSIHVTKESTHPVKPLAQIAGNRYASHPVGKALSDACMGTIASFLSKYQDIIIEHQKVVKGNQKRLESLRELAGKENLEYPSVTLPPQPHTKEGVDAYNEVIARVRTWVNLNLWQKLKLSRDDAKPLLRLKGFPSFPLVERQANEVDWWDMVCNVKKLINEKKEDGKVFWQNLAGYKRQEALRPYLSSEEDRKKGKKFARYQLGDLLLHLEKKHGEDWGKVYDEAWERIDKKVEGLSKHIKLEEERRSEDAQSKAALTDWLRAKASFVIEGLKEADKDEFCRCELKLQKWYGDLRGKPFAIEAENSILDISGFSKQYNCAFIWQKDGVKKLNLYLIINYFKGGKLRFKKIKPEAFEANRFYTVINKKSGEIVPMEVNFNFDDPNLIILPLAFGKRQGREFIWNDLLSLETGSLKLANGRVIEKTLYNRRTRQDEPALFVALTFERREVLDSSNIKPMSNLIGVDRGENIPAVIALTDPEGCPLSRFKDSLGNPTHILRIGESYKEKQRTIQAKKEVEQRRAGGYSRKYASKAKNLADDMVRNTARDLLYYAVTQDAMLIFENLSRGFGRQGKRTFMAERQYTRMEDWLTAKLAYEGLPSKTYLSKTLAQYTSKTCSNCGFTITSADYDRVLEKLKKTATGWMTTINGKELKVEGQITYYNRYKRQNVVKDLSVELDRLSEESVNNDISSWTKGRSGEALSLLKKRFSHRPVQEKFVCLNCGFETHADEQAALNIARSWLFLRSQEYKKYQTNKTTGNTDKRAFVETWQSFYRKKLKEVWKPAV

SEQ ID NO: 36091 - protein, 979 aa, synthetic construct
  REGION 1..979: note = engineered CasX variant
QEIKRINKIRRRLVKDSNTKKAGKTGPMKTLLVRVMTPDLRERLENLRKKPENIPQPISNTSRANLNKLLTDYTEMKKAILHVYWEEFQKDPVGLMSRVAQPASKKIDQNKLKPEMDEKGNLTTAGFACSQCGQPLFVYKLEQVSEKGKAYTNYFGRCNVAEHEKLILLAQLKPEKDSDEAVTYSLGKFGQRALDFYSIHVTKESTHPVKPLAQIAGNRYASSPVGKALSDACMGTIASFLSKYQDIIIEHQKVVKGNQKRLESLRELAGKENLEYPSVTLPPQPHTKEGVDAYNEVIARVRTWVNLNLWQKLKLSRDDAKPLLRLKGFPSFPLVERQANEVDWWDMVCNVKKLINEKKEDGKVFWQNLAGYKRQEALRPYLSSEEDRKKGKKFARYQLGDLLLHLEKKHGEDWGKVYDEAWERIDKKVEGLSKHIKLEEERRSEDAQSKAALTDWLRAKASFVIEGLKEADKDEFCRCELKLQKWYGDLRGKPFAIEAENSILDISGFSKQYNCAFIWQKDGVKKLNLYLIINYFKGGKLRFKKIKPEAFEANRFYTVINKKSGEIVPMEVNFNFDDPNLIILPLAFGKRQGREFIWNDLLSLETGSLKLANGRVIEKTLYNRRTRQDEPALFVALTFERREVLDSSNIKPMSNLIGVDRGENIPAVIALTDPEGCPLSRFKDSLGNPTHILRIGESYKEKQRTIQAKKEVEQRRAGGYSRKYASKAKNLADDMVRNTARDLLYYAVTQDAMLIFENLSRGFGRQGKRTFMAERQYTRMEDWLTAKLAYEGLPSKTYLSKTLAQYTSKTCSNCGFTITSADYDRVLEKLKKTATGWMTTINGKELKVEGQITYYNRYKRQNVVKDLSVELDRLSEESVNNDISSWTKGRSGEALSLLKKRFSHRPVQEKFVCLNCGFETHADEQAALNIARSWLFLRSQEYKKYQTNKTTGNTDKRAFVETWQSFYRKKLKEVWKPAV

SEQ ID NO: 36092 - protein, 979 aa, synthetic construct
  REGION 1..979: note = engineered CasX variant
QEIKRINKIRRRLVKDSNTKKAGKTGPMKTLLVRVMTPDLRERLENLRKKPENIPQPISNTSRANLNKLLTDYTEMKKAILHVYWEEFQKDPVGLMSRVAQPASKKIDQNKLKPEMDEKGNLTTAGFACSQCGQPLFVYKLEQVSEKGKAYTNYFGRCNVAEHEKLILLAQLKPEKDSDEAVTYSLGKFGQRALDFYSIHVTKESTHPVKPLAQIAGNRYASTPVGKALSDACMGTIASFLSKYQDIIIEHQKVVKGNQKRLESLRELAGKENLEYPSVTLPPQPHTKEGVDAYNEVIARVRTWVNLNLWQKLKLSRDDAKPLLRLKGFPSFPLVERQANEVDWWDMVCNVKKLINEKKEDGKVFWQNLAGYKRQEALRPYLSSEEDRKKGKKFARYQLGDLLLHLEKKHGEDWGKVYDEAWERIDKKVEGLSKHIKLEEERRSEDAQSKAALTDWLRAKASFVIEGLKEADKDEFCRCELKLQKWYGDLRGKPFAIEAENSILDISGFSKQYNCAFIWQKDGVKKLNLYLIINYFKGGKLRFKKIKPEAFEANRFYTVINKKSGEIVPMEVNFNFDDPNLIILPLAFGKRQGREFIWNDLLSLETGSLKLANGRVIEKTLYNRRTRQDEPALFVALTFERREVLDSSNIKPMSNLIGVDRGENIPAVIALTDPEGCPLSRFKDSLGNPTHILRIGESYKEKQRTIQAKKEVEQRRAGGYSRKYASKAKNLADDMVRNTARDLLYYAVTQDAMLIFENLSRGFGRQGKRTFMAERQYTRMEDWLTAKLAYEGLPSKTYLSKTLAQYTSKTCSNCGFTITSADYDRVLEKLKKTATGWMTTINGKELKVEGQITYYNRYKRQNVVKDLSVELDRLSEESVNNDISSWTKGRSGEALSLLKKRFSHRPVQEKFVCLNCGFETHADEQAALNIARSWLFLRSQEYKKYQTNKTTGNTDKRAFVETWQSFYRKKLKEVWKPAV

SEQ ID NO: 36093 - protein, 979 aa, synthetic construct
  REGION 1..979: note = engineered CasX variant
QEIKRINKIRRRLVKDSNTKKAGKTGPMKTLLVRVMTPDLRERLENLRKKPENIPQPISNTSRANLNKLLTDYTEMKKAILHVYWEEFQKDPVGLMSRVAQPASKKIDQNKLKPEMDEKGNLTTAGFACSQCGQPLFVYKLEQVSEKGKAYTNYFGRCNVAEHEKLILLAQLKPEKDSDEAVTYSLGKFGQRALDFYSIHVTKESTHPVKPLAQIAGNRYASAPVGKALSDACMGTIASFLSKYQDIIIEHQKVVKGNQKRLESLRELAGKENLEYPSVTLPPQPHTKEGVDAYNEVIARVRTWVNLNLWQKLKLSRDDAKPLLRLKGFPSFPLVERQANEVDWWDMVCNVKKLINEKKEDGKVFWQNLAGYKRQEALRPYLSSEEDRKKGKKFARYQLGDLLLHLEKKHGEDWGKVYDEAWERIDKKVEGLSKHIKLEEERRSEDAQSKAALTDWLRAKASFVIEGLKEADKDEFCRCELKLQKWYGDLRGKPFAIEAENSILDISGFSKQYNCAFIWQKDGVKKLNLYLIINYFKGGKLRFKKIKPEAFEANRFYTVINKKSGEIVPMEVNFNFDDPNLIILPLAFGKRQGREFIWNDLLSLETGSLKLANGRVIEKTLYNRRTRQDEPALFVALTFERREVLDSSNIKPMSNLIGVDRGENIPAVIALTDPEGCPLSRFKDSLGNPTHILRIGESYKEKQRTIQAKKEVEQRRAGGYSRKYASKAKNLADDMVRNTARDLLYYAVTQDAMLIFENLSRGFGRQGKRTFMAERQYTRMEDWLTAKLAYEGLPSKTYLSKTLAQYTSKTCSNCGFTITSADYDRVLEKLKKTATGWMTTINGKELKVEGQITYYNRYKRQNVVKDLSVELDRLSEESVNNDISSWTKGRSGEALSLLKKRFSHRPVQEKFVCLNCGFETHADEQAALNIARSWLFLRSQEYKKYQTNKTTGNTDKRAFVETWQSFYRKKLKEVWKPAV

SEQ ID NO: 36094 - protein, 979 aa, synthetic construct
  REGION 1..979: note = engineered CasX variant
QEIKRINKIRRRLVKDSNTKKAGKTGPMKTLLVRVMTPDLRERLENLRKKPENIPQPISNTSRANLNKLLTDYTEMKKAILHVYWEEFQKDPVGLMSRVAQPASKKIDQNKLKPEMDEKGNLTTAGFACSQCGQPLFVYKLEQVSEKGKAYTNYFGRCNVAEHEKLILLAQLKPEKDSDEAVTYSLGKFGQRALDFYSIHVTKESTHPVKPLAQIAGNRYASVPVGKALSDACMGTIASFLSKYQDIIIEHQKVVKGNQKRLESLRELAGKENLEYPSVTLPPQPHTKEGVDAYNEVIARVRTWVNLNLWQKLKLSRDDAKPLLRLKGFPSFPLVERQANEVDWWDMVCNVKKLINEKKEDGKVFWQNLAGYKRQEALRPYLSSEEDRKKGKKFARYQLGDLLLHLEKKHGEDWGKVYDEAWERIDKKVEGLSKHIKLEEERRSEDAQSKAALTDWLRAKASFVIEGLKEADKDEFCRCELKLQKWYGDLRGKPFAIEAENSILDISGFSKQYNCAFIWQKDGVKKLNLYLIINYFKGGKLRFKKIKPEAFEANRFYTVINKKSGEIVPMEVNFNFDDPNLIILPLAFGKRQGREFIWNDLLSLETGSLKLANGRVIEKTLYNRRTRQDEPALFVALTFERREVLDSSNIKPMSNLIGVDRGENIPAVIALTDPEGCPLSRFKDSLGNPTHILRIGESYKEKQRTIQAKKEVEQRRAGGYSRKYASKAKNLADDMVRNTARDLLYYAVTQDAMLIFENLSRGFGRQGKRTFMAERQYTRMEDWLTAKLAYEGLPSKTYLSKTLAQYTSKTCSNCGFTITSADYDRVLEKLKKTATGWMTTINGKELKVEGQITYYNRYKRQNVVKDLSVELDRLSEESVNNDISSWTKGRSGEALSLLKKRFSHRPVQEKFVCLNCGFETHADEQAALNIARSWLFLRSQEYKKYQTNKTTGNTDKRAFVETWQSFYRKKLKEVWKPAV

SEQ ID NO: 36095 - protein, 979 aa, synthetic construct
  REGION 1..979: note = engineered CasX variant
QEIKRINKIRRRLVKDSNTKKAGKTGPMKTLLVRVMTPDLRERLENLRKKPENIPQPISNTSRANLNKLLTDYTEMKKAILHVYWEEFQKDPVGLMSRVAQPASKKIDQNKLKPEMDEKGNLTTAGFACSQCGQPLFVYKLEQVSEKGKAYTNYFGRCNVAEHEKLIKLAQLKPEKDSDEAVTYSLGKFGQRALDFYSIHVTKESTHPVKPLAQIAGNRYASGPVGKALSDACMGTIASFLSKYQDIIIEHQKVVKGNQKRLESLRELAGKENLEYPSVTLPPQPHTKEGVDAYNEVIARVRTWVNLNLWQKLKLSRDDAKPLLRLKGFPSFPLVERQANEVDWWDMVCNVKKLINEKKEDGKVFWQNLAGYKRQEALRPYLSSEEDRKKGKKFARYQLGDLLLHLEKKHGEDWGKVYDEAWERIDKKVEGLSKHIKLEEERRSEDAQSKAALTDWLRAKASFVIEGLKEADKDEFCRCELKLQKWYGDLRGKPFAIEAENSILDISGFSKQYNCAFIWQKDGVKKLNLYLIINYFKGGKLRFKKIKPEAFEANRFYTVINKKSGEIVPMEVNFNFDDPNLIILPLAFGKRQGREFIWNDLLSLETGSLKLANGRVIEKTLYNRRTRQDEPALFVALTFERREVLDSSNIKPMSNLIGVDRGENIPAVIALTDPEGCPLSRFKDSLGNPTHILRIGESYKEKQRTIQAKKEVEQRRAGGYSRKYASKAKNLADDMVRNTARDLLYYAVTQDAMLIFENLSRGFGRQGKRTFMAERQYTRMEDWLTAKLAYEGLPSKTYLSKTLAQYTSKTCSNCGFTITSADYDRVLEKLKKTATGWMTTINGKELKVEGQITYYNRYKRQNVVKDLSVELDRLSEESVNNDISSWTKGRSGEALSLLKKRFSHRPVQEKFVCLNCGFETHADEQAALNIARSWLFLRSQEYKKYQTNKTTGNTDKRAFVETWQSFYRKKLKEVWKPAV

SEQ ID NO: 36096 - protein, 978 aa, synthetic construct
  REGION 1..978: note = engineered CasX variant
QEIKRINKIRRRLVKDSNTKKAGKTGPMKTLLVRVMTPDLRERLENLRKKPENIPQPISNTSRANLNKLLTDYTEMKKAILHVYWEEFQKDPVGLMSRVAQPASKKIDQNKLKPEMDEKGNLTTAGFACSQCGQPLFVYKLEQVSEKGKAYTNYFGRCNVAEHEKLILLAQLKPEKDSDEAVTYSLGKFGQRALDFYSIHVTKESTHPVKPLAQIAGNRYASPVGKALSDACMGTIASFLSKYQDIIIEHQKVVKGNQKRLESLRELAGKENLEYPSVTLPPQPHTKEGVDAYNEVIARVRTWVNLNLWQKLKLSRDDAKPLLRLKGFPSFPLVERQANEVDWWDMVCNVKKLINEKKEDGKVFWQNLAGYKRQEALRPYLSSEEDRKKGKKFARYQLGDLLLHLEKKHGEDWGKVYDEAWERIDKKVEGLSKHIKLEEERRSEDAQSKAALTDWLRAKASFVIEGLKEADKDEFCRCELKLQKWYGDLRGKPFAIEAENSILDISGFSKQYNCAFIWQKDGVKKLNLYLIINYFKGGKLRFKKIKPEAFEANRFYTVINKKSGEIVPMEVNFNFDDPNLIILPLAFGKRQGREFIWNDLLSLETGSLKLANGRVIEKTLYNRRTRQDEPALFVALTFERREVLDSSNIKPMSNLIGVDRGENIPAVIALTDPEGCPLSRFKDSLGNPTHILRIGESYKEKQRTIQAKKEVEQRRAGGYSRKYASKAKNLADDMVRNTARDLLYYAVTQDAMLIFENLSRGFGRQGKRTFMAERQYTRMEDWLTAKLAYEGLPSKTYLSKTLAQYTSKTCSNCGFTITSADYDRVLEKLKKTATGWMTTINGKELKVEGQITYYNRYKRQNVVKDLSVELDRLSEESVNNDISSWTKGRSGEALSLLKKRFSHRPVQEKFVCLNCGFETHADEQAALNIARSWLFLRSQEYKKYQTNKTTGNTDKRAFVETWQSFYRKKLKEVWKPAV

SEQ ID NO: 36097 - protein, 978 aa, synthetic construct
  REGION 1..978: note = engineered CasX variant
QEIKRINKIRRRLVKDSNTKKAGKTGPMKTLLVRVMTPDLRERLENLRKKPENIPQPISNTSRANLNKLLTDYTEMKKAILHVYWEEFQKDPVGLMSRVAQPASKKIDQNKLKPEMDEKGNLTTAGFACSQCGQPLFVYKLEQVSEKGKAYTNYFGRCNVAEHEKLILLAQLKPEKDSDEAVTYSLGKFGQRALDFYSIHVTKESTHPVKPLAQIAGNRYASYPVGKALSDACMGTIASFLSKYQDIIIEHQKVVKGNQKRLESLRELAGKENLEYPSVTLPPQPHTKEGVDAYNEVIARVRTWVNLNLWQKLKLSRDDAKPLLRLKGFPSFPLVERQANEVDWWDMVCNVKKLINEKKEDGKVFWQNLAGYKRQEALRPYLSSEEDRKKGKKFARYQLGDLLLHLEKKHGEDWGKVYDEAWERIDKKVEGLSKHIKLEEERRSEDAQSKAALTDWLRAKASFVIEGLKEADKDEFCRCELKLQKWYGDLRGKPFAIEAENSILDISGFSKQYNCAFIWQKDGVKKLNLYLIINYFKGGKLRFKKIKPEAFEANRFYTVINKKSGEIVPMEVNFNFDDPNLIILPLAFGKRQGREFIWNDLLSLETGSLKLANGRVIEKTLYNRRTRQDEPALFVALTFERREVLDSSNIKPMNLIGVDRGENIPAVIALTDPEGCPLSRFKDSLGNPTHILRIRESYKEKQRTIQAKKEVEQRRAGGYSRKYASKAKNLADDMVRNTARDLLYYAVTQDAMLIFENLSRGFGRQGKRTFMAERQYTRMEDWLTAKLAYEGLPSKTYLSKTLAQYTSKTCSNCGFTITSADYDRVLEKLKKTATGWMTTINGKELKVEGQITYYNRYKRQNVVKDLSVELDRLSEESVNNDISSWTKGRSGEALSLLKKRFSHRPVQEKFVCLNCGFETHADEQAALNIARSWLFLRSQEYKKYQTNKTTGNTDKRAFVETWQSFYRKKLKEVWKPAV

SEQ ID NO: 36098 - protein, 978 aa, synthetic construct
  REGION 1..978: note = engineered CasX variant
QEIKRINKIRRRLVKDSNTKKAGKTGPMKTLLVRVMTPDLRERLENLRKKPENIPQPISNTSRANLNKLLTDYTEMKKAILHVYWEEFQKDPVGLMSRVAQPASKKIDQNKLKPEMDEKGNLTTAGFACSQCGQPLFVYKLEQVSEKGKAYTNYFGRCNVAEHEKLILLAQLKPEKDSDEAVTYSLGKFGQRALDFYSIHVTKESTHPVKPLAQIAGNRYASHPVGKALSDACMGTIASFLSKYQDIIIEHQKVVKGNQKRLESLRELAGKENLEYPSVTLPPQPHTKEGVDAYNEVIARVRTWVNLNLWQKLKLSRDDAKPLLRLKGFPSFPLVERQANEVDWWDMVCNVKKLINEKKEDGKVFWQNLAGYKRQEALRPYLSSEEDRKKGKKFARYQLGDLLLHLEKKHGEDWGKVYDEAWERIDKKVEGLSKHIKLEEERRSEDAQSKAALTDWLRAKASFVIEGLKEADKDEFCRCELKLQKWYGDLRGKPFAIEAENSILDISGFSKQYNCAFIWQKDGVKKLNLYLIINYFKGGKLRFKKIKPEAFEANRFYTVINKKSGEIVPMEVNFNFDDPNLIILPLAFGKRQGREFIWNDLLSLETGSLKLANGRVIEKTLYNRRTRQDEPALFVALTFERREVLDSSNIKPMNLIGVDRGENIPAVIALTDPEGCPLSRFKDSLGNPTHILRIRESYKEKQRTIQAKKEVEQRRAGGYSRKYASKAKNLADDMVRNTARDLLYYAVTQDAMLIFENLSRGFGRQGKRTFMAERQYTRMEDWLTAKLAYEGLPSKTYLSKTLAQYTSKTCSNCGFTITSADYDRVLEKLKKTATGWMTTINGKELKVEGQITYYNRYKRQNVVKDLSVELDRLSEESVNNDISSWTKGRSGEALSLLKKRFSHRPVQEKFVCLNCGFETHADEQAALNIARSWLFLRSQEYKKYQTNKTTGNTDKRAFVETWQSFYRKKLKEVWKPAV

SEQ ID NO: 36099 - protein, 978 aa, synthetic construct
  REGION 1..978: note = engineered CasX variant
QEIKRINKIRRRLVKDSNTKKAGKTGPMKTLLVRVMTPDLRERLENLRKKPENIPQPISNTSRANLNKLLTDYTEMKKAILHVYWEEFQKDPVGLMSRVAQPASKKIDQNKLKPEMDEKGNLTTAGFACSQCGQPLFVYKLEQVSEKGKAYTNYFGRCNVAEHEKLILLAQLKPEKDSDEAVTYSLGKFGQRALDFYSIHVTKESTHPVKPLAQIAGNRYASSPVGKALSDACMGTIASFLSKYQDIIIEHQKVVKGNQKRLESLRELAGKENLEYPSVTLPPQPHTKEGVDAYNEVIARVRTWVNLNLWQKLKLSRDDAKPLLRLKGFPSFPLVERQANEVDWWDMVCNVKKLINEKKEDGKVFWQNLAGYKRQEALRPYLSSEEDRKKGKKFARYQLGDLLLHLEKKHGEDWGKVYDEAWERIDKKVEGLSKHIKLEEERRSEDAQSKAALTDWLRAKASFVIEGLKEADKDEFCRCELKLQKWYGDLRGKPFAIEAENSILDISGFSKQYNCAFIWQKDGVKKLNLYLIINYFKGGKLRFKKIKPEAFEANRFYTVINKKSGEIVPMEVNFNFDDPNLIILPLAFGKRQGREFIWNDLLSLETGSLKLANGRVIEKTLYNRRTRQDEPALFVALTFERREVLDSSNIKPMNLIGVDRGENIPAVIALTDPEGCPLSRFKDSLGNPTHILRIRESYKEKQRTIQAKKEVEQRRAGGYSRKYASKAKNLADDMVRNTARDLLYYAVTQDAMLIFENLSRGFGRQGKRTFMAERQYTRMEDWLTAKLAYEGLPSKTYLSKTLAQYTSKTCSNCGFTITSADYDRVLEKLKKTATGWMTTINGKELKVEGQITYYNRYKRQNVVKDLSVELDRLSEESVNNDISSWTKGRSGEALSLLKKRFSHRPVQEKFVCLNCGFETHADEQAALNIARSWLFLRSQEYKKYQTNKTTGNTDKRAFVETWQSFYRKKLKEVWKPAV

SEQ ID NO: 36100 - protein, 978 aa, synthetic construct
  REGION 1..978: note = engineered CasX variant
QEIKRINKIRRRLVKDSNTKKAGKTGPMKTLLVRVMTPDLRERLENLRKKPENIPQPISNTSRANLNKLLTDYTEMKKAILHVYWEEFQKDPVGLMSRVAQPASKKIDQNKLKPEMDEKGNLTTAGFACSQCGQPLFVYKLEQVSEKGKAYTNYFGRCNVAEHEKLILLAQLKPEKDSDEAVTYSLGKFGQRALDFYSIHVTKESTHPVKPLAQIAGNRYASTPVGKALSDACMGTIASFLSKYQDIIIEHQKVVKGNQKRLESLRELAGKENLEYPSVTLPPQPHTKEGVDAYNEVIARVRTWVNLNLWQKLKLSRDDAKPLLRLKGFPSFPLVERQANEVDWWDMVCNVKKLINEKKEDGKVFWQNLAGYKRQEALRPYLSSEEDRKKGKKFARYQLGDLLLHLEKKHGEDWGKVYDEAWERIDKKVEGLSKHIKLEEERRSEDAQSKAALTDWLRAKASFVIEGLKEADKDEFCRCELKLQKWYGDLRGKPFAIEAENSILDISGFSKQYNCAFIWQKDGVKKLNLYLIINYFKGGKLRFKKIKPEAFEANRFYTVINKKSGEIVPMEVNFNFDDPNLIILPLAFGKRQGREFIWNDLLSLETGSLKLANGRVIEKTLYNRRTRQDEPALFVALTFERREVLDSSNIKPMNLIGVDRGENIPAVIALTDPEGCPLSRFKDSLGNPTHILRIRESYKEKQRTIQAKKEVEQRRAGGYSRKYASKAKNLADDMVRNTARDLLYYAVTQDAMLIFENLSRGFGRQGKRTFMAERQYTRMEDWLTAKLAYEGLPSKTYLSKTLAQYTSKTCSNCGFTITSADYDRVLEKLKKTATGWMTTINGKELKVEGQITYYNRYKRQNVVKDLSVELDRLSEESVNNDISSWTKGRSGEALSLLKKRFSHRPVQEKFVCLNCGFETHADEQAALNIARSWLFLRSQEYKKYQTNKTTGNTDKRAFVETWQSFYRKKLKEVWKPAV

SEQ ID NO: 36101 - protein, 978 aa, synthetic construct
  REGION 1..978: note = engineered CasX variant
QEIKRINKIRRRLVKDSNTKKAGKTGPMKTLLVRVMTPDLRERLENLRKKPENIPQPISNTSRANLNKLLTDYTEMKKAILHVYWEEFQKDPVGLMSRVAQPASKKIDQNKLKPEMDEKGNLTTAGFACSQCGQPLFVYKLEQVSEKGKAYTNYFGRCNVAEHEKLILLAQLKPEKDSDEAVTYSLGKFGQRALDFYSIHVTKESTHPVKPLAQIAGNRYASAPVGKALSDACMGTIASFLSKYQDIIIEHQKVVKGNQKRLESLRELAGKENLEYPSVTLPPQPHTKEGVDAYNEVIARVRTWVNLNLWQKLKLSRDDAKPLLRLKGFPSFPLVERQANEVDWWDMVCNVKKLINEKKEDGKVFWQNLAGYKRQEALRPYLSSEEDRKKGKKFARYQLGDLLLHLEKKHGEDWGKVYDEAWERIDKKVEGLSKHIKLEEERRSEDAQSKAALTDWLRAKASFVIEGLKEADKDEFCRCELKLQKWYGDLRGKPFAIEAENSILDISGFSKQYNCAFIWQKDGVKKLNLYLIINYFKGGKLRFKKIKPEAFEANRFYTVINKKSGEIVPMEVNFNFDDPNLIILPLAFGKRQGREFIWNDLLSLETGSLKLANGRVIEKTLYNRRTRQDEPALFVALTFERREVLDSSNIKPMNLIGVDRGENIPAVIALTDPEGCPLSRFKDSLGNPTHILRIRESYKEKQRTIQAKKEVEQRRAGGYSRKYASKAKNLADDMVRNTARDLLYYAVTQDAMLIFENLSRGFGRQGKRTFMAERQYTRMEDWLTAKLAYEGLPSKTYLSKTLAQYTSKTCSNCGFTITSADYDRVLEKLKKTATGWMTTINGKELKVEGQITYYNRYKRQNVVKDLSVELDRLSEESVNNDISSWTKGRSGEALSLLKKRFSHRPVQEKFVCLNCGFETHADEQAALNIARSWLFLRSQEYKKYQTNKTTGNTDKRAFVETWQSFYRKKLKEVWKPAV

SEQ ID NO: 36102 - protein, 978 aa, synthetic construct
  REGION 1..978: note = engineered CasX variant
QEIKRINKIRRRLVKDSNTKKAGKTGPMKTLLVRVMTPDLRERLENLRKKPENIPQPISNTSRANLNKLLTDYTEMKKAILHVYWEEFQKDPVGLMSRVAQPASKKIDQNKLKPEMDEKGNLTTAGFACSQCGQPLFVYKLEQVSEKGKAYTNYFGRCNVAEHEKLILLAQLKPEKDSDEAVTYSLGKFGQRALDFYSIHVTKESTHPVKPLAQIAGNRYASVPVGKALSDACMGTIASFLSKYQDIIIEHQKVVKGNQKRLESLRELAGKENLEYPSVTLPPQPHTKEGVDAYNEVIARVRTWVNLNLWQKLKLSRDDAKPLLRLKGFPSFPLVERQANEVDWWDMVCNVKKLINEKKEDGKVFWQNLAGYKRQEALRPYLSSEEDRKKGKKFARYQLGDLLLHLEKKHGEDWGKVYDEAWERIDKKVEGLSKHIKLEEERRSEDAQSKAALTDWLRAKASFVIEGLKEADKDEFCRCELKLQKWYGDLRGKPFAIEAENSILDISGFSKQYNCAFIWQKDGVKKLNLYLIINYFKGGKLRFKKIKPEAFEANRFYTVINKKSGEIVPMEVNFNFDDPNLIILPLAFGKRQGREFIWNDLLSLETGSLKLANGRVIEKTLYNRRTRQDEPALFVALTFERREVLDSSNIKPMNLIGVDRGENIPAVIALTDPEGCPLSRFKDSLGNPTHILRIRESYKEKQRTIQAKKEVEQRRAGGYSRKYASKAKNLADDMVRNTARDLLYYAVTQDAMLIFENLSRGFGRQGKRTFMAERQYTRMEDWLTAKLAYEGLPSKTYLSKTLAQYTSKTCSNCGFTITSADYDRVLEKLKKTATGWMTTINGKELKVEGQITYYNRYKRQNVVKDLSVELDRLSEESVNNDISSWTKGRSGEALSLLKKRFSHRPVQEKFVCLNCGFETHADEQAALNIARSWLFLRSQEYKKYQTNKTTGNTDKRAFVETWQSFYRKKLKEVWKPAV

SEQ ID NO: 36103 - protein, 978 aa, synthetic construct
  REGION 1..978: note = engineered CasX variant
QEIKRINKIRRRLVKDSNTKKAGKTGPMKTLLVRVMTPDLRERLENLRKKPENIPQPISNTSRANLNKLLTDYTEMKKAILHVYWEEFQKDPVGLMSRVAQPASKKIDQNKLKPEMDEKGNLTTAGFACSQCGQPLFVYKLEQVSEKGKAYTNYFGRCNVAEHEKLIKLAQLKPEKDSDEAVTYSLGKFGQRALDFYSIHVTKESTHPVKPLAQIAGNRYASGPVGKALSDACMGTIASFLSKYQDIIIEHQKVVKGNQKRLESLRELAGKENLEYPSVTLPPQPHTKEGVDAYNEVIARVRTWVNLNLWQKLKLSRDDAKPLLRLKGFPSFPLVERQANEVDWWDMVCNVKKLINEKKEDGKVFWQNLAGYKRQEALRPYLSSEEDRKKGKKFARYQLGDLLLHLEKKHGEDWGKVYDEAWERIDKKVEGLSKHIKLEEERRSEDAQSKAALTDWLRAKASFVIEGLKEADKDEFCRCELKLQKWYGDLRGKPFAIEAENSILDISGFSKQYNCAFIWQKDGVKKLNLYLIINYFKGGKLRFKKIKPEAFEANRFYTVINKKSGEIVPMEVNFNFDDPNLIILPLAFGKRQGREFIWNDLLSLETGSLKLANGRVIEKTLYNRRTRQDEPALFVALTFERREVLDSSNIKPMNLIGVDRGENIPAVIALTDPEGCPLSRFKDSLGNPTHILRIRESYKEKQRTIQAKKEVEQRRAGGYSRKYASKAKNLADDMVRNTARDLLYYAVTQDAMLIFENLSRGFGRQGKRTFMAERQYTRMEDWLTAKLAYEGLPSKTYLSKTLAQYTSKTCSNCGFTITSADYDRVLEKLKKTATGWMTTINGKELKVEGQITYYNRYKRQNVVKDLSVELDRLSEESVNNDISSWTKGRSGEALSLLKKRFSHRPVQEKFVCLNCGFETHADEQAALNIARSWLFLRSQEYKKYQTNKTTGNTDKRAFVETWQSFYRKKLKEVWKPAV

SEQ ID NO: 36104 - protein, 977 aa, synthetic construct
  REGION 1..977: note = engineered CasX variant
QEIKRINKIRRRLVKDSNTKKAGKTGPMKTLLVRVMTPDLRERLENLRKKPENIPQPISNTSRANLNKLLTDYTEMKKAILHVYWEEFQKDPVGLMSRVAQPASKKIDQNKLKPEMDEKGNLTTAGFACSQCGQPLFVYKLEQVSEKGKAYTNYFGRCNVAEHEKLILLAQLKPEKDSDEAVTYSLGKFGQRALDFYSIHVTKESTHPVKPLAQIAGNRYASPVGKALSDACMGTIASFLSKYQDIIIEHQKVVKGNQKRLESLRELAGKENLEYPSVTLPPQPHTKEGVDAYNEVIARVRTWVNLNLWQKLKLSRDDAKPLLRLKGFPSFPLVERQANEVDWWDMVCNVKKLINEKKEDGKVFWQNLAGYKRQEALRPYLSSEEDRKKGKKFARYQLGDLLLHLEKKHGEDWGKVYDEAWERIDKKVEGLSKHIKLEEERRSEDAQSKAALTDWLRAKASFVIEGLKEADKDEFCRCELKLQKWYGDLRGKPFAIEAENSILDISGFSKQYNCAFIWQKDGVKKLNLYLIINYFKGGKLRFKKIKPEAFEANRFYTVINKKSGEIVPMEVNFNFDDPNLIILPLAFGKRQGREFIWNDLLSLETGSLKLANGRVIEKTLYNRRTRQDEPALFVALTFERREVLDSSNIKPMNLIGVDRGENIPAVIALTDPEGCPLSRFKDSLGNPTHILRIRESYKEKQRTIQAKKEVEQRRAGGYSRKYASKAKNLADDMVRNTARDLLYYAVTQDAMLIFENLSRGFGRQGKRTFMAERQYTRMEDWLTAKLAYEGLPSKTYLSKTLAQYTSKTCSNCGFTITSADYDRVLEKLKKTATGWMTTINGKELKVEGQITYYNRYKRQNVVKDLSVELDRLSEESVNNDISSWTKGRSGEALSLLKKRFSHRPVQEKFVCLNCGFETHADEQAALNIARSWLFLRSQEYKKYQTNKTTGNTDKRAFVETWQSFYRKKLKEVWKPAV

SEQ ID NO: 36105 - protein, 978 aa, synthetic construct
  REGION 1..978: note = engineered CasX variant
QEIKRINKIRRRLVKDSNTKKAGKTGPMKTLLVRVMTPDLRERLENLRKKPENIPQPISNTSRANLNKLLTDYTEMKKAILHVYWEEFQKDPVGLMSRVAQPASKKIDQNKLKPEMDEKGNLTTAGFACSQCGQPLFVYKLEQVSEKGKAYTNYFGRCNVAEHEKLILLAQLKPEKDSDEAVTYSLGKFGQRALDFYSIHVTKESTHPVKPLAQIAGNRYASYPVGKALSDACMGTIASFLSKYQDIIIEHQKVVKGNQKRLESLRELAGKENLEYPSVTLPPQPHTKEGVDAYNEVIARVRTWVNLNLWQKLKLSRDDAKPLLRLKGFPSFPLVERQANEVDWWDMVCNVKKLINEKKEDGKVFWQNLAGYKRQEALRPYLSSEEDRKKGKKFARYQLGDLLLHLEKKHGEDWGKVYDEAWERIDKKVEGLSKHIKLEEERRSEDAQSKAALTDWLRAKASFVIEGLKEADKDEFCRCELKLQKWYGDLRGKPFAIEAENSILDISGFSKQYNCAFIWQKDGVKKLNLYLIINYFKGGKLRFKKIKPEAFEANRFYTVINKKSGEIVPMEVNFNFDDPNLIILPLAFGKRQGREFIWNDLLSLETGSLKLANGRVIEKTLYNRRTRQDEPALFVALTFERREVLDSSNIKPMNLIGVDRGENIPAVIALTDPEGCPLSRFKDSLGNPTHILRIGESYKEKQRTIQAKKEVEQRRAGGYSRKYASKAKNLADDMVRNTARDLLYYAVTQDAMLIFENLSRGFGRQGKRTFSAERQYTRMEDWLTAKLAYEGLPSKTYLSKTLAQYTSKTCSNCGFTITSADYDRVLEKLKKTATGWMTTINGKELKVEGQITYYNRYKRQNVVKDLSVELDRLSEESVNNDISSWTKGRSGEALSLLKKRFSHRPVQEKFVCLNCGFETHADEQAALNIARSWLFLRSQEYKKYQTNKTTGNTDKRAFVETWQSFYRKKLKEVWKPAV

SEQ ID NO: 36106 - protein, 978 aa, synthetic construct
  REGION 1..978: note = engineered CasX variant
QEIKRINKIRRRLVKDSNTKKAGKTGPMKTLLVRVMTPDLRERLENLRKKPENIPQPISNTSRANLNKLLTDYTEMKKAILHVYWEEFQKDPVGLMSRVAQPASKKIDQNKLKPEMDEKGNLTTAGFACSQCGQPLFVYKLEQVSEKGKAYTNYFGRCNVAEHEKLILLAQLKPEKDSDEAVTYSLGKFGQRALDFYSIHVTKESTHPVKPLAQIAGNRYASHPVGKALSDACMGTIASFLSKYQDIIIEHQKVVKGNQKRLESLRELAGKENLEYPSVTLPPQPHTKEGVDAYNEVIARVRTWVNLNLWQKLKLSRDDAKPLLRLKGFPSFPLVERQANEVDWWDMVCNVKKLINEKKEDGKVFWQNLAGYKRQEALRPYLSSEEDRKKGKKFARYQLGDLLLHLEKKHGEDWGKVYDEAWERIDKKVEGLSKHIKLEEERRSEDAQSKAALTDWLRAKASFVIEGLKEADKDEFCRCELKLQKWYGDLRGKPFAIEAENSILDISGFSKQYNCAFIWQKDGVKKLNLYLIINYFKGGKLRFKKIKPEAFEANRFYTVINKKSGEIVPMEVNFNFDDPNLIILPLAFGKRQGREFIWNDLLSLETGSLKLANGRVIEKTLYNRRTRQDEPALFVALTFERREVLDSSNIKPMNLIGVDRGENIPAVIALTDPEGCPLSRFKDSLGNPTHILRIGESYKEKQRTIQAKKEVEQRRAGGYSRKYASKAKNLADDMVRNTARDLLYYAVTQDAMLIFENLSRGFGRQGKRTFSAERQYTRMEDWLTAKLAYEGLPSKTYLSKTLAQYTSKTCSNCGFTITSADYDRVLEKLKKTATGWMTTINGKELKVEGQITYYNRYKRQNVVKDLSVELDRLSEESVNNDISSWTKGRSGEALSLLKKRFSHRPVQEKFVCLNCGFETHADEQAALNIARSWLFLRSQEYKKYQTNKTTGNTDKRAFVETWQSFYRKKLKEVWKPAV

SEQ ID NO: 36107 - protein, 978 aa, synthetic construct
  REGION 1..978: note = engineered CasX variant
QEIKRINKIRRRLVKDSNTKKAGKTGPMKTLLVRVMTPDLRERLENLRKKPENIPQPISNTSRANLNKLLTDYTEMKKAILHVYWEEFQKDPVGLMSRVAQPASKKIDQNKLKPEMDEKGNLTTAGFACSQCGQPLFVYKLEQVSEKGKAYTNYFGRCNVAEHEKLILLAQLKPEKDSDEAVTYSLGKFGQRALDFYSIHVTKESTHPVKPLAQIAGNRYASSPVGKALSDACMGTIASFLSKYQDIIIEHQKVVKGNQKRLESLRELAGKENLEYPSVTLPPQPHTKEGVDAYNEVIARVRTWVNLNLWQKLKLSRDDAKPLLRLKGFPSFPLVERQANEVDWWDMVCNVKKLINEKKEDGKVFWQNLAGYKRQEALRPYLSSEEDRKKGKKFARYQLGDLLLHLEKKHGEDWGKVYDEAWERIDKKVEGLSKHIKLEEERRSEDAQSKAALTDWLRAKASFVIEGLKEADKDEFCRCELKLQKWYGDLRGKPFAIEAENSILDISGFSKQYNCAFIWQKDGVKKLNLYLIINYFKGGKLRFKKIKPEAFEANRFYTVINKKSGEIVPMEVNFNFDDPNLIILPLAFGKRQGREFIWNDLLSLETGSLKLANGRVIEKTLYNRRTRQDEPALFVALTFERREVLDSSNIKPMNLIGVDRGENIPAVIALTDPEGCPLSRFKDSLGNPTHILRIGESYKEKQRTIQAKKEVEQRRAGGYSRKYASKAKNLADDMVRNTARDLLYYAVTQDAMLIFENLSRGFGRQGKRTFSAERQYTRMEDWLTAKLAYEGLPSKTYLSKTLAQYTSKTCSNCGFTITSADYDRVLEKLKKTATGWMTTINGKELKVEGQITYYNRYKRQNVVKDLSVELDRLSEESVNNDISSWTKGRSGEALSLLKKRFSHRPVQEKFVCLNCGFETHADEQAALNIARSWLFLRSQEYKKYQTNKTTGNTDKRAFVETWQSFYRKKLKEVWKPAV

SEQ ID NO: 36108 - protein, 978 aa, synthetic construct
  REGION 1..978: note = engineered CasX variant
QEIKRINKIRRRLVKDSNTKKAGKTGPMKTLLVRVMTPDLRERLENLRKKPENIPQPISNTSRANLNKLLTDYTEMKKAILHVYWEEFQKDPVGLMSRVAQPASKKIDQNKLKPEMDEKGNLTTAGFACSQCGQPLFVYKLEQVSEKGKAYTNYFGRCNVAEHEKLILLAQLKPEKDSDEAVTYSLGKFGQRALDFYSIHVTKESTHPVKPLAQIAGNRYASTPVGKALSDACMGTIASFLSKYQDIIIEHQKVVKGNQKRLESLRELAGKENLEYPSVTLPPQPHTKEGVDAYNEVIARVRTWVNLNLWQKLKLSRDDAKPLLRLKGFPSFPLVERQANEVDWWDMVCNVKKLINEKKEDGKVFWQNLAGYKRQEALRPYLSSEEDRKKGKKFARYQLGDLLLHLEKKHGEDWGKVYDEAWERIDKKVEGLSKHIKLEEERRSEDAQSKAALTDWLRAKASFVIEGLKEADKDEFCRCELKLQKWYGDLRGKPFAIEAENSILDISGFSKQYNCAFIWQKDGVKKLNLYLIINYFKGGKLRFKKIKPEAFEANRFYTVINKKSGEIVPMEVNFNFDDPNLIILPLAFGKRQGREFIWNDLLSLETGSLKLANGRVIEKTLYNRRTRQDEPALFVALTFERREVLDSSNIKPMNLIGVDRGENIPAVIALTDPEGCPLSRFKDSLGNPTHILRIGESYKEKQRTIQAKKEVEQRRAGGYSRKYASKAKNLADDMVRNTARDLLYYAVTQDAMLIFENLSRGFGRQGKRTFSAERQYTRMEDWLTAKLAYEGLPSKTYLSKTLAQYTSKTCSNCGFTITSADYDRVLEKLKKTATGWMTTINGKELKVEGQITYYNRYKRQNVVKDLSVELDRLSEESVNNDISSWTKGRSGEALSLLKKRFSHRPVQEKFVCLNCGFETHADEQAALNIARSWLFLRSQEYKKYQTNKTTGNTDKRAFVETWQSFYRKKLKEVWKPAV

SEQ ID NO: 36109 - protein, 978 aa, synthetic construct
  REGION 1..978: note = engineered CasX variant
QEIKRINKIRRRLVKDSNTKKAGKTGPMKTLLVRVMTPDLRERLENLRKKPENIPQPISNTSRANLNKLLTDYTEMKKAILHVYWEEFQKDPVGLMSRVAQPASKKIDQNKLKPEMDEKGNLTTAGFACSQCGQPLFVYKLEQVSEKGKAYTNYFGRCNVAEHEKLILLAQLKPEKDSDEAVTYSLGKFGQRALDFYSIHVTKESTHPVKPLAQIAGNRYASAPVGKALSDACMGTIASFLSKYQDIIIEHQKVVKGNQKRLESLRELAGKENLEYPSVTLPPQPHTKEGVDAYNEVIARVRTWVNLNLWQKLKLSRDDAKPLLRLKGFPSFPLVERQANEVDWWDMVCNVKKLINEKKEDGKVFWQNLAGYKRQEALRPYLSSEEDRKKGKKFARYQLGDLLLHLEKKHGEDWGKVYDEAWERIDKKVEGLSKHIKLEEERRSEDAQSKAALTDWLRAKASFVIEGLKEADKDEFCRCELKLQKWYGDLRGKPFAIEAENSILDISGFSKQYNCAFIWQKDGVKKLNLYLIINYFKGGKLRFKKIKPEAFEANRFYTVINKKSGEIVPMEVNFNFDDPNLIILPLAFGKRQGREFIWNDLLSLETGSLKLANGRVIEKTLYNRRTRQDEPALFVALTFERREVLDSSNIKPMNLIGVDRGENIPAVIALTDPEGCPLSRFKDSLGNPTHILRIGESYKEKQRTIQAKKEVEQRRAGGYSRKYASKAKNLADDMVRNTARDLLYYAVTQDAMLIFENLSRGFGRQGKRTFSAERQYTRMEDWLTAKLAYEGLPSKTYLSKTLAQYTSKTCSNCGFTITSADYDRVLEKLKKTATGWMTTINGKELKVEGQITYYNRYKRQNVVKDLSVELDRLSEESVNNDISSWTKGRSGEALSLLKKRFSHRPVQEKFVCLNCGFETHADEQAALNIARSWLFLRSQEYKKYQTNKTTGNTDKRAFVETWQSFYRKKLKEVWKPAV

SEQ ID NO: 36110 - protein, 978 aa, synthetic construct
  REGION 1..978: note = engineered CasX variant
QEIKRINKIRRRLVKDSNTKKAGKTGPMKTLLVRVMTPDLRERLENLRKKPENIPQPISNTSRANLNKLLTDYTEMKKAILHVYWEEFQKDPVGLMSRVAQPASKKIDQNKLKPEMDEKGNLTTAGFACSQCGQPLFVYKLEQVSEKGKAYTNYFGRCNVAEHEKLILLAQLKPEKDSDEAVTYSLGKFGQRALDFYSIHVTKESTHPVKPLAQIAGNRYASVPVGKALSDACMGTIASFLSKYQDIIIEHQKVVKGNQKRLESLRELAGKENLEYPSVTLPPQPHTKEGVDAYNEVIARVRTWVNLNLWQKLKLSRDDAKPLLRLKGFPSFPLVERQANEVDWWDMVCNVKKLINEKKEDGKVFWQNLAGYKRQEALRPYLSSEEDRKKGKKFARYQLGDLLLHLEKKHGEDWGKVYDEAWERIDKKVEGLSKHIKLEEERRSEDAQSKAALTDWLRAKASFVIEGLKEADKDEFCRCELKLQKWYGDLRGKPFAIEAENSILDISGFSKQYNCAFIWQKDGVKKLNLYLIINYFKGGKLRFKKIKPEAFEANRFYTVINKKSGEIVPMEVNFNFDDPNLIILPLAFGKRQGREFIWNDLLSLETGSLKLANGRVIEKTLYNRRTRQDEPALFVALTFERREVLDSSNIKPMNLIGVDRGENIPAVIALTDPEGCPLSRFKDSLGNPTHILRIGESYKEKQRTIQAKKEVEQRRAGGYSRKYASKAKNLADDMVRNTARDLLYYAVTQDAMLIFENLSRGFGRQGKRTFSAERQYTRMEDWLTAKLAYEGLPSKTYLSKTLAQYTSKTCSNCGFTITSADYDRVLEKLKKTATGWMTTINGKELKVEGQITYYNRYKRQNVVKDLSVELDRLSEESVNNDISSWTKGRSGEALSLLKKRFSHRPVQEKFVCLNCGFETHADEQAALNIARSWLFLRSQEYKKYQTNKTTGNTDKRAFVETWQSFYRKKLKEVWKPAV

SEQ ID NO: 36111 - protein, 978 aa, synthetic construct
  REGION 1..978: note = engineered CasX variant
QEIKRINKIRRRLVKDSNTKKAGKTGPMKTLLVRVMTPDLRERLENLRKKPENIPQPISNTSRANLNKLLTDYTEMKKAILHVYWEEFQKDPVGLMSRVAQPASKKIDQNKLKPEMDEKGNLTTAGFACSQCGQPLFVYKLEQVSEKGKAYTNYFGRCNVAEHEKLIKLAQLKPEKDSDEAVTYSLGKFGQRALDFYSIHVTKESTHPVKPLAQIAGNRYASGPVGKALSDACMGTIASFLSKYQDIIIEHQKVVKGNQKRLESLRELAGKENLEYPSVTLPPQPHTKEGVDAYNEVIARVRTWVNLNLWQKLKLSRDDAKPLLRLKGFPSFPLVERQANEVDWWDMVCNVKKLINEKKEDGKVFWQNLAGYKRQEALRPYLSSEEDRKKGKKFARYQLGDLLLHLEKKHGEDWGKVYDEAWERIDKKVEGLSKHIKLEEERRSEDAQSKAALTDWLRAKASFVIEGLKEADKDEFCRCELKLQKWYGDLRGKPFAIEAENSILDISGFSKQYNCAFIWQKDGVKKLNLYLIINYFKGGKLRFKKIKPEAFEANRFYTVINKKSGEIVPMEVNFNFDDPNLIILPLAFGKRQGREFIWNDLLSLETGSLKLANGRVIEKTLYNRRTRQDEPALFVALTFERREVLDSSNIKPMNLIGVDRGENIPAVIALTDPEGCPLSRFKDSLGNPTHILRIGESYKEKQRTIQAKKEVEQRRAGGYSRKYASKAKNLADDMVRNTARDLLYYAVTQDAMLIFENLSRGFGRQGKRTFSAERQYTRMEDWLTAKLAYEGLPSKTYLSKTLAQYTSKTCSNCGFTITSADYDRVLEKLKKTATGWMTTINGKELKVEGQITYYNRYKRQNVVKDLSVELDRLSEESVNNDISSWTKGRSGEALSLLKKRFSHRPVQEKFVCLNCGFETHADEQAALNIARSWLFLRSQEYKKYQTNKTTGNTDKRAFVETWQSFYRKKLKEVWKPAV

SEQ ID NO: 36112 - protein, 977 aa, synthetic construct
  REGION 1..977: note = engineered CasX variant
QEIKRINKIRRRLVKDSNTKKAGKTGPMKTLLVRVMTPDLRERLENLRKKPENIPQPISNTSRANLNKLLTDYTEMKKAILHVYWEEFQKDPVGLMSRVAQPASKKIDQNKLKPEMDEKGNLTTAGFACSQCGQPLFVYKLEQVSEKGKAYTNYFGRCNVAEHEKLILLAQLKPEKDSDEAVTYSLGKFGQRALDFYSIHVTKESTHPVKPLAQIAGNRYASPVGKALSDACMGTIASFLSKYQDIIIEHQKVVKGNQKRLESLRELAGKENLEYPSVTLPPQPHTKEGVDAYNEVIARVRTWVNLNLWQKLKLSRDDAKPLLRLKGFPSFPLVERQANEVDWWDMVCNVKKLINEKKEDGKVFWQNLAGYKRQEALRPYLSSEEDRKKGKKFARYQLGDLLLHLEKKHGEDWGKVYDEAWERIDKKVEGLSKHIKLEEERRSEDAQSKAALTDWLRAKASFVIEGLKEADKDEFCRCELKLQKWYGDLRGKPFAIEAENSILDISGFSKQYNCAFIWQKDGVKKLNLYLIINYFKGGKLRFKKIKPEAFEANRFYTVINKKSGEIVPMEVNFNFDDPNLIILPLAFGKRQGREFIWNDLLSLETGSLKLANGRVIEKTLYNRRTRQDEPALFVALTFERREVLDSSNIKPMNLIGVDRGENIPAVIALTDPEGCPLSRFKDSLGNPTHILRIGESYKEKQRTIQAKKEVEQRRAGGYSRKYASKAKNLADDMVRNTARDLLYYAVTQDAMLIFENLSRGFGRQGKRTFSAERQYTRMEDWLTAKLAYEGLPSKTYLSKTLAQYTSKTCSNCGFTITSADYDRVLEKLKKTATGWMTTINGKELKVEGQITYYNRYKRQNVVKDLSVELDRLSEESVNNDISSWTKGRSGEALSLLKKRFSHRPVQEKFVCLNCGFETHADEQAALNIARSWLFLRSQEYKKYQTNKTTGNTDKRAFVETWQSFYRKKLKEVWKPAV

SEQ ID NO: 36113 - protein, 978 aa, synthetic construct
  REGION 1..978: note = engineered CasX variant
QEIKRINKIRRRLVKDSNTKKAGKTGPMKTLLVRVMTPDLRERLENLRKKPENIPQPISNTSRANLNKLLTDYTEMKKAILHVYWEEFQKDPVGLMSRVAQPASKKIDQNKLKPEMDEKGNLTTAGFACSQCGQPLFVYKLEQVSEKGKAYTNYFGRCNVAEHEKLILLAQLKPEKDSDEAVTYSLGKFGQRALDFYSIHVTKESTHPVKPLAQIAGNRYASYPVGKALSDACMGTIASFLSKYQDIIIEHQKVVKGNQKRLESLRELAGKENLEYPSVTLPPQPHTKEGVDAYNEVIARVRTWVNLNLWQKLKLSRDDAKPLLRLKGFPSFPLVERQANEVDWWDMVCNVKKLINEKKEDGKVFWQNLAGYKRQEALRPYLSSEEDRKKGKKFARYQLGDLLLHLEKKHGEDWGKVYDEAWERIDKKVEGLSKHIKLEEERRSEDAQSKAALTDWLRAKASFVIEGLKEADKDEFCRCELKLQKWYGDLRGKPFAIEAENSILDISGFSKQYNCAFIWQKDGVKKLNLYLIINYFKGGKLRFKKIKPEAFEANRFYTVINKKSGEIVPMEVNFNFDDPNLIILPLAFGKRQGREFIWNDLLSLETGSLKLANGRVIEKTLYNRRTRQDEPALFVALTFERREVLDSSNIKPMNLIGVDRGENIPAVIALTDPEGCPLSRFKDSLGNPTHILRIGESYKEKQRTIQAKKEVEQRRAGGYSRKYASKAKNLADDMVRNTARDLLYYAVTQDAMLIFENLSRGFGRQGKRTFMAERQYTRMEDWLTAKLAYEGLPSKTYLSKTLAQYTSKTCSNCGFTITSADYDRVLEKLKKTATGWMTTINGKELKVEGQITYYNRYKRQNVVKDLSVELDRLSEESVNNDISSWDKGRSGEALSLLKKRFSHRPVQEKFVCLNCGFETHADEQAALNIARSWLFLRSQEYKKYQTNKTTGNTDKRAFVETWQSFYRKKLKEVWKPAV

SEQ ID NO: 36114 - protein, 978 aa, synthetic construct
  REGION 1..978: note = engineered CasX variant
QEIKRINKIRRRLVKDSNTKKAGKTGPMKTLLVRVMTPDLRERLENLRKKPENIPQPISNTSRANLNKLLTDYTEMKKAILHVYWEEFQKDPVGLMSRVAQPASKKIDQNKLKPEMDEKGNLTTAGFACSQCGQPLFVYKLEQVSEKGKAYTNYFGRCNVAEHEKLILLAQLKPEKDSDEAVTYSLGKFGQRALDFYSIHVTKESTHPVKPLAQIAGNRYASHPVGKALSDACMGTIASFLSKYQDIIIEHQKVVKGNQKRLESLRELAGKENLEYPSVTLPPQPHTKEGVDAYNEVIARVRTWVNLNLWQKLKLSRDDAKPLLRLKGFPSFPLVERQANEVDWWDMVCNVKKLINEKKEDGKVFWQNLAGYKRQEALRPYLSSEEDRKKGKKFARYQLGDLLLHLEKKHGEDWGKVYDEAWERIDKKVEGLSKHIKLEEERRSEDAQSKAALTDWLRAKASFVIEGLKEADKDEFCRCELKLQKWYGDLRGKPFAIEAENSILDISGFSKQYNCAFIWQKDGVKKLNLYLIINYFKGGKLRFKKIKPEAFEANRFYTVINKKSGEIVPMEVNFNFDDPNLIILPLAFGKRQGREFIWNDLLSLETGSLKLANGRVIEKTLYNRRTRQDEPALFVALTFERREVLDSSNIKPMNLIGVDRGENIPAVIALTDPEGCPLSRFKDSLGNPTHILRIGESYKEKQRTIQAKKEVEQRRAGGYSRKYASKAKNLADDMVRNTARDLLYYAVTQDAMLIFENLSRGFGRQGKRTFMAERQYTRMEDWLTAKLAYEGLPSKTYLSKTLAQYTSKTCSNCGFTITSADYDRVLEKLKKTATGWMTTINGKELKVEGQITYYNRYKRQNVVKDLSVELDRLSEESVNNDISSWDKGRSGEALSLLKKRFSHRPVQEKFVCLNCGFETHADEQAALNIARSWLFLRSQEYKKYQTNKTTGNTDKRAFVETWQSFYRKKLKEVWKPAV

SEQ ID NO: 36115 - protein, 978 aa, synthetic construct
  REGION 1..978: note = engineered CasX variant
QEIKRINKIRRRLVKDSNTKKAGKTGPMKTLLVRVMTPDLRERLENLRKKPENIPQPISNTSRANLNKLLTDYTEMKKAILHVYWEEFQKDPVGLMSRVAQPASKKIDQNKLKPEMDEKGNLTTAGFACSQCGQPLFVYKLEQVSEKGKAYTNYFGRCNVAEHEKLILLAQLKPEKDSDEAVTYSLGKFGQRALDFYSIHVTKESTHPVKPLAQIAGNRYASSPVGKALSDACMGTIASFLSKYQDIIIEHQKVVKGNQKRLESLRELAGKENLEYPSVTLPPQPHTKEGVDAYNEVIARVRTWVNLNLWQKLKLSRDDAKPLLRLKGFPSFPLVERQANEVDWWDMVCNVKKLINEKKEDGKVFWQNLAGYKRQEALRPYLSSEEDRKKGKKFARYQLGDLLLHLEKKHGEDWGKVYDEAWERIDKKVEGLSKHIKLEEERRSEDAQSKAALTDWLRAKASFVIEGLKEADKDEFCRCELKLQKWYGDLRGKPFAIEAENSILDISGFSKQYNCAFIWQKDGVKKLNLYLIINYFKGGKLRFKKIKPEAFEANRFYTVINKKSGEIVPMEVNFNFDDPNLIILPLAFGKRQGREFIWNDLLSLETGSLKLANGRVIEKTLYNRRTRQDEPALFVALTFERREVLDSSNIKPMNLIGVDRGENIPAVIALTDPEGCPLSRFKDSLGNPTHILRIGESYKEKQRTIQAKKEVEQRRAGGYSRKYASKAKNLADDMVRNTARDLLYYAVTQDAMLIFENLSRGFGRQGKRTFMAERQYTRMEDWLTAKLAYEGLPSKTYLSKTLAQYTSKTCSNCGFTITSADYDRVLEKLKKTATGWMTTINGKELKVEGQITYYNRYKRQNVVKDLSVELDRLSEESVNNDISSWDKGRSGEALSLLKKRFSHRPVQEKFVCLNCGFETHADEQAALNIARSWLFLRSQEYKKYQTNKTTGNTDKRAFVETWQSFYRKKLKEVWKPAV

SEQ ID NO: 36116 - protein, 978 aa, synthetic construct
  REGION 1..978: note = engineered CasX variant
QEIKRINKIRRRLVKDSNTKKAGKTGPMKTLLVRVMTPDLRERLENLRKKPENIPQPISNTSRANLNKLLTDYTEMKKAILHVYWEEFQKDPVGLMSRVAQPASKKIDQNKLKPEMDEKGNLTTAGFACSQCGQPLFVYKLEQVSEKGKAYTNYFGRCNVAEHEKLILLAQLKPEKDSDEAVTYSLGKFGQRALDFYSIHVTKESTHPVKPLAQIAGNRYASTPVGKALSDACMGTIASFLSKYQDIIIEHQKVVKGNQKRLESLRELAGKENLEYPSVTLPPQPHTKEGVDAYNEVIARVRTWVNLNLWQKLKLSRDDAKPLLRLKGFPSFPLVERQANEVDWWDMVCNVKKLINEKKEDGKVFWQNLAGYKRQEALRPYLSSEEDRKKGKKFARYQLGDLLLHLEKKHGEDWGKVYDEAWERIDKKVEGLSKHIKLEEERRSEDAQSKAALTDWLRAKASFVIEGLKEADKDEFCRCELKLQKWYGDLRGKPFAIEAENSILDISGFSKQYNCAFIWQKDGVKKLNLYLIINYFKGGKLRFKKIKPEAFEANRFYTVINKKSGEIVPMEVNFNFDDPNLIILPLAFGKRQGREFIWNDLLSLETGSLKLANGRVIEKTLYNRRTRQDEPALFVALTFERREVLDSSNIKPMNLIGVDRGENIPAVIALTDPEGCPLSRFKDSLGNPTHILRIGESYKEKQRTIQAKKEVEQRRAGGYSRKYASKAKNLADDMVRNTARDLLYYAVTQDAMLIFENLSRGFGRQGKRTFMAERQYTRMEDWLTAKLAYEGLPSKTYLSKTLAQYTSKTCSNCGFTITSADYDRVLEKLKKTATGWMTTINGKELKVEGQITYYNRYKRQNVVKDLSVELDRLSEESVNNDISSWDKGRSGEALSLLKKRFSHRPVQEKFVCLNCGFETHADEQAALNIARSWLFLRSQEYKKYQTNKTTGNTDKRAFVETWQSFYRKKLKEVWKPAV

SEQ ID NO: 36117 - protein, 978 aa, synthetic construct
  REGION 1..978: note = engineered CasX variant
QEIKRINKIRRRLVKDSNTKKAGKTGPMKTLLVRVMTPDLRERLENLRKKPENIPQPISNTSRANLNKLLTDYTEMKKAILHVYWEEFQKDPVGLMSRVAQPASKKIDQNKLKPEMDEKGNLTTAGFACSQCGQPLFVYKLEQVSEKGKAYTNYFGRCNVAEHEKLILLAQLKPEKDSDEAVTYSLGKFGQRALDFYSIHVTKESTHPVKPLAQIAGNRYASAPVGKALSDACMGTIASFLSKYQDIIIEHQKVVKGNQKRLESLRELAGKENLEYPSVTLPPQPHTKEGVDAYNEVIARVRTWVNLNLWQKLKLSRDDAKPLLRLKGFPSFPLVERQANEVDWWDMVCNVKKLINEKKEDGKVFWQNLAGYKRQEALRPYLSSEEDRKKGKKFARYQLGDLLLHLEKKHGEDWGKVYDEAWERIDKKVEGLSKHIKLEEERRSEDAQSKAALTDWLRAKASFVIEGLKEADKDEFCRCELKLQKWYGDLRGKPFAIEAENSILDISGFSKQYNCAFIWQKDGVKKLNLYLIINYFKGGKLRFKKIKPEAFEANRFYTVINKKSGEIVPMEVNFNFDDPNLIILPLAFGKRQGREFIWNDLLSLETGSLKLANGRVIEKTLYNRRTRQDEPALFVALTFERREVLDSSNIKPMNLIGVDRGENIPAVIALTDPEGCPLSRFKDSLGNPTHILRIGESYKEKQRTIQAKKEVEQRRAGGYSRKYASKAKNLADDMVRNTARDLLYYAVTQDAMLIFENLSRGFGRQGKRTFMAERQYTRMEDWLTAKLAYEGLPSKTYLSKTLAQYTSKTCSNCGFTITSADYDRVLEKLKKTATGWMTTINGKELKVEGQITYYNRYKRQNVVKDLSVELDRLSEESVNNDISSWDKGRSGEALSLLKKRFSHRPVQEKFVCLNCGFETHADEQAALNIARSWLFLRSQEYKKYQTNKTTGNTDKRAFVETWQSFYRKKLKEVWKPAV

SEQ ID NO: 36118 - protein, 978 aa, synthetic construct
  REGION 1..978: note = engineered CasX variant
QEIKRINKIRRRLVKDSNTKKAGKTGPMKTLLVRVMTPDLRERLENLRKKPENIPQPISNTSRANLNKLLTDYTEMKKAILHVYWEEFQKDPVGLMSRVAQPASKKIDQNKLKPEMDEKGNLTTAGFACSQCGQPLFVYKLEQVSEKGKAYTNYFGRCNVAEHEKLILLAQLKPEKDSDEAVTYSLGKFGQRALDFYSIHVTKESTHPVKPLAQIAGNRYASVPVGKALSDACMGTIASFLSKYQDIIIEHQKVVKGNQKRLESLRELAGKENLEYPSVTLPPQPHTKEGVDAYNEVIARVRTWVNLNLWQKLKLSRDDAKPLLRLKGFPSFPLVERQANEVDWWDMVCNVKKLINEKKEDGKVFWQNLAGYKRQEALRPYLSSEEDRKKGKKFARYQLGDLLLHLEKKHGEDWGKVYDEAWERIDKKVEGLSKHIKLEEERRSEDAQSKAALTDWLRAKASFVIEGLKEADKDEFCRCELKLQKWYGDLRGKPFAIEAENSILDISGFSKQYNCAFIWQKDGVKKLNLYLIINYFKGGKLRFKKIKPEAFEANRFYTVINKKSGEIVPMEVNFNFDDPNLIILPLAFGKRQGREFIWNDLLSLETGSLKLANGRVIEKTLYNRRTRQDEPALFVALTFERREVLDSSNIKPMNLIGVDRGENIPAVIALTDPEGCPLSRFKDSLGNPTHILRIGESYKEKQRTIQAKKEVEQRRAGGYSRKYASKAKNLADDMVRNTARDLLYYAVTQDAMLIFENLSRGFGRQGKRTFMAERQYTRMEDWLTAKLAYEGLPSKTYLSKTLAQYTSKTCSNCGFTITSADYDRVLEKLKKTATGWMTTINGKELKVEGQITYYNRYKRQNVVKDLSVELDRLSEESVNNDISSWDKGRSGEALSLLKKRFSHRPVQEKFVCLNCGFETHADEQAALNIARSWLFLRSQEYKKYQTNKTTGNTDKRAFVETWQSFYRKKLKEVWKPAV

SEQ ID NO: 36119 - protein, 978 aa, synthetic construct
  REGION 1..978: note = engineered CasX variant
QEIKRINKIRRRLVKDSNTKKAGKTGPMKTLLVRVMTPDLRERLENLRKKPENIPQPISNTSRANLNKLLTDYTEMKKAILHVYWEEFQKDPVGLMSRVAQPASKKIDQNKLKPEMDEKGNLTTAGFACSQCGQPLFVYKLEQVSEKGKAYTNYFGRCNVAEHEKLIKLAQLKPEKDSDEAVTYSLGKFGQRALDFYSIHVTKESTHPVKPLAQIAGNRYASGPVGKALSDACMGTIASFLSKYQDIIIEHQKVVKGNQKRLESLRELAGKENLEYPSVTLPPQPHTKEGVDAYNEVIARVRTWVNLNLWQKLKLSRDDAKPLLRLKGFPSFPLVERQANEVDWWDMVCNVKKLINEKKEDGKVFWQNLAGYKRQEALRPYLSSEEDRKKGKKFARYQLGDLLLHLEKKHGEDWGKVYDEAWERIDKKVEGLSKHIKLEEERRSEDAQSKAALTDWLRAKASFVIEGLKEADKDEFCRCELKLQKWYGDLRGKPFAIEAENSILDISGFSKQYNCAFIWQKDGVKKLNLYLIINYFKGGKLRFKKIKPEAFEANRFYTVINKKSGEIVPMEVNFNFDDPNLIILPLAFGKRQGREFIWNDLLSLETGSLKLANGRVIEKTLYNRRTRQDEPALFVALTFERREVLDSSNIKPMNLIGVDRGENIPAVIALTDPEGCPLSRFKDSLGNPTHILRIGESYKEKQRTIQAKKEVEQRRAGGYSRKYASKAKNLADDMVRNTARDLLYYAVTQDAMLIFENLSRGFGRQGKRTFMAERQYTRMEDWLTAKLAYEGLPSKTYLSKTLAQYTSKTCSNCGFTITSADYDRVLEKLKKTATGWMTTINGKELKVEGQITYYNRYKRQNVVKDLSVELDRLSEESVNNDISSWDKGRSGEALSLLKKRFSHRPVQEKFVCLNCGFETHADEQAALNIARSWLFLRSQEYKKYQTNKTTGNTDKRAFVETWQSFYRKKLKEVWKPAV

SEQ ID NO: 36120 - protein, 977 aa, synthetic construct
  REGION 1..977: note = engineered CasX variant
QEIKRINKIRRRLVKDSNTKKAGKTGPMKTLLVRVMTPDLRERLENLRKKPENIPQPISNTSRANLNKLLTDYTEMKKAILHVYWEEFQKDPVGLMSRVAQPASKKIDQNKLKPEMDEKGNLTTAGFACSQCGQPLFVYKLEQVSEKGKAYTNYFGRCNVAEHEKLILLAQLKPEKDSDEAVTYSLGKFGQRALDFYSIHVTKESTHPVKPLAQIAGNRYASPVGKALSDACMGTIASFLSKYQDIIIEHQKVVKGNQKRLESLRELAGKENLEYPSVTLPPQPHTKEGVDAYNEVIARVRTWVNLNLWQKLKLSRDDAKPLLRLKGFPSFPLVERQANEVDWWDMVCNVKKLINEKKEDGKVFWQNLAGYKRQEALRPYLSSEEDRKKGKKFARYQLGDLLLHLEKKHGEDWGKVYDEAWERIDKKVEGLSKHIKLEEERRSEDAQSKAALTDWLRAKASFVIEGLKEADKDEFCRCELKLQKWYGDLRGKPFAIEAENSILDISGFSKQYNCAFIWQKDGVKKLNLYLIINYFKGGKLRFKKIKPEAFEANRFYTVINKKSGEIVPMEVNFNFDDPNLIILPLAFGKRQGREFIWNDLLSLETGSLKLANGRVIEKTLYNRRTRQDEPALFVALTFERREVLDSSNIKPMNLIGVDRGENIPAVIALTDPEGCPLSRFKDSLGNPTHILRIGESYKEKQRTIQAKKEVEQRRAGGYSRKYASKAKNLADDMVRNTARDLLYYAVTQDAMLIFENLSRGFGRQGKRTFMAERQYTRMEDWLTAKLAYEGLPSKTYLSKTLAQYTSKTCSNCGFTITSADYDRVLEKLKKTATGWMTTINGKELKVEGQITYYNRYKRQNVVKDLSVELDRLSEESVNNDISSWDKGRSGEALSLLKKRFSHRPVQEKFVCLNCGFETHADEQAALNIARSWLFLRSQEYKKYQTNKTTGNTDKRAFVETWQSFYRKKLKEVWKPAV

SEQ ID NO: 36121 - protein, 978 aa, synthetic construct
  REGION 1..978: note = engineered CasX variant
QEIKRINKIRRRLVKDSNTKKAGKTGPMKTLLVRVMTPDLRERLENLRKKPENIPQPISNTSRANLNKLLTDYTEMKKAILHVYWEEFQVDPVGLMSRVAQPASKKIDQNKLKPEMDEKGNLTTAGFACSQCGQPLFVYKLEQVSEKGKAYTNYFGRCNVAEHEKLILLAQLKPEKDSDEAVTYSLGKFGQRALDFYSIHVTKESTHPVKPLAQIAGNRYASYPVGKALSDACMGTIASFLSKYQDIIIEHQKVVKGNQKRLESLRELAGKENLEYPSVTLPPQPHTKEGVDAYNEVIARVRTWVNLNLWQKLKLSRDDAKPLLRLKGFPSFPLVERQANEVDWWDMVCNVKKLINEKKEDGKVFWQNLAGYKRQEALRPYLSSEEDRKKGKKFARYQLGDLLLHLEKKHGEDWGKVYDEAWERIDKKVEGLSKHIKLEEERRSEDAQSKAALTDWLRAKASFVIEGLKEADKDEFCRCELKLQKWYGDLRGKPFAIEAENSILDISGFSKQYNCAFIWQKDGVKKLNLYLIINYFKGGKLRFKKIKPEAFEANRFYTVINKKSGEIVPMEVNFNFDDPNLIILPLAFGKRQGREFIWNDLLSLETGSLKLANGRVIEKTLYNRRTRQDEPALFVALTFERREVLDSSNIKPMNLIGVDRGENIPAVIALTDPEGCPLSRFKDSLGNPTHILRIGESYKEKQRTIQAKKEVEQRRAGGYSRKYASKAKNLADDMVRNTARDLLYYAVTQDAMLIFENLSRGFGRQGKRTFMAERQYTRMEDWLTAKLAYEGLPSKTYLSKTLAQYTSKTCSNCGFTITSADYDRVLEKLKKTATGWMTTINGKELKVEGQITYYNRYKRQNVVKDLSVELDRLSEESVNNDISSWTKGRSGEALSLLKKRFSHRPVQEKFVCLNCGFETHADEQAALNIARSWLFLRSQEYKKYQTNKTTGNTDKRAFVETWQSFYRKKLKEVWKPAV

SEQ ID NO: 36122 - protein, 978 aa, synthetic construct
  REGION 1..978: note = engineered CasX variant
QEIKRINKIRRRLVKDSNTKKAGKTGPMKTLLVRVMTPDLRERLENLRKKPENIPQPISNTSRANLNKLLTDYTEMKKAILHVYWEEFQVDPVGLMSRVAQPASKKIDQNKLKPEMDEKGNLTTAGFACSQCGQPLFVYKLEQVSEKGKAYTNYFGRCNVAEHEKLILLAQLKPEKDSDEAVTYSLGKFGQRALDFYSIHVTKESTHPVKPLAQIAGNRYASHPVGKALSDACMGTIASFLSKYQDIIIEHQKVVKGNQKRLESLRELAGKENLEYPSVTLPPQPHTKEGVDAYNEVIARVRTWVNLNLWQKLKLSRDDAKPLLRLKGFPSFPLVERQANEVDWWDMVCNVKKLINEKKEDGKVFWQNLAGYKRQEALRPYLSSEEDRKKGKKFARYQLGDLLLHLEKKHGEDWGKVYDEAWERIDKKVEGLSKHIKLEEERRSEDAQSKAALTDWLRAKASFVIEGLKEADKDEFCRCELKLQKWYGDLRGKPFAIEAENSILDISGFSKQYNCAFIWQKDGVKKLNLYLIINYFKGGKLRFKKIKPEAFEANRFYTVINKKSGEIVPMEVNFNFDDPNLIILPLAFGKRQGREFIWNDLLSLETGSLKLANGRVIEKTLYNRRTRQDEPALFVALTFERREVLDSSNIKPMNLIGVDRGENIPAVIALTDPEGCPLSRFKDSLGNPTHILRIGESYKEKQRTIQAKKEVEQRRAGGYSRKYASKAKNLADDMVRNTARDLLYYAVTQDAMLIFENLSRGFGRQGKRTFMAERQYTRMEDWLTAKLAYEGLPSKTYLSKTLAQYTSKTCSNCGFTITSADYDRVLEKLKKTATGWMTTINGKELKVEGQITYYNRYKRQNVVKDLSVELDRLSEESVNNDISSWTKGRSGEALSLLKKRFSHRPVQEKFVCLNCGFETHADEQAALNIARSWLFLRSQEYKKYQTNKTTGNTDKRAFVETWQSFYRKKLKEVWKPAV

SEQ ID NO: 36123 - protein, 978 aa, synthetic construct
  REGION 1..978: note = engineered CasX variant
QEIKRINKIRRRLVKDSNTKKAGKTGPMKTLLVRVMTPDLRERLENLRKKPENIPQPISNTSRANLNKLLTDYTEMKKAILHVYWEEFQVDPVGLMSRVAQPASKKIDQNKLKPEMDEKGNLTTAGFACSQCGQPLFVYKLEQVSEKGKAYTNYFGRCNVAEHEKLILLAQLKPEKDSDEAVTYSLGKFGQRALDFYSIHVTKESTHPVKPLAQIAGNRYASSPVGKALSDACMGTIASFLSKYQDIIIEHQKVVKGNQKRLESLRELAGKENLEYPSVTLPPQPHTKEGVDAYNEVIARVRTWVNLNLWQKLKLSRDDAKPLLRLKGFPSFPLVERQANEVDWWDMVCNVKKLINEKKEDGKVFWQNLAGYKRQEALRPYLSSEEDRKKGKKFARYQLGDLLLHLEKKHGEDWGKVYDEAWERIDKKVEGLSKHIKLEEERRSEDAQSKAALTDWLRAKASFVIEGLKEADKDEFCRCELKLQKWYGDLRGKPFAIEAENSILDISGFSKQYNCAFIWQKDGVKKLNLYLIINYFKGGKLRFKKIKPEAFEANRFYTVINKKSGEIVPMEVNFNFDDPNLIILPLAFGKRQGREFIWNDLLSLETGSLKLANGRVIEKTLYNRRTRQDEPALFVALTFERREVLDSSNIKPMNLIGVDRGENIPAVIALTDPEGCPLSRFKDSLGNPTHILRIGESYKEKQRTIQAKKEVEQRRAGGYSRKYASKAKNLADDMVRNTARDLLYYAVTQDAMLIFENLSRGFGRQGKRTFMAERQYTRMEDWLTAKLAYEGLPSKTYLSKTLAQYTSKTCSNCGFTITSADYDRVLEKLKKTATGWMTTINGKELKVEGQITYYNRYKRQNVVKDLSVELDRLSEESVNNDISSWTKGRSGEALSLLKKRFSHRPVQEKFVCLNCGFETHADEQAALNIARSWLFLRSQEYKKYQTNKTTGNTDKRAFVETWQSFYRKKLKEVWKPAV

SEQ ID NO: 36124 - protein, 978 aa, synthetic construct
  REGION 1..978: note = engineered CasX variant
QEIKRINKIRRRLVKDSNTKKAGKTGPMKTLLVRVMTPDLRERLENLRKKPENIPQPISNTSRANLNKLLTDYTEMKKAILHVYWEEFQVDPVGLMSRVAQPASKKIDQNKLKPEMDEKGNLTTAGFACSQCGQPLFVYKLEQVSEKGKAYTNYFGRCNVAEHEKLILLAQLKPEKDSDEAVTYSLGKFGQRALDFYSIHVTKESTHPVKPLAQIAGNRYASTPVGKALSDACMGTIASFLSKYQDIIIEHQKVVKGNQKRLESLRELAGKENLEYPSVTLPPQPHTKEGVDAYNEVIARVRTWVNLNLWQKLKLSRDDAKPLLRLKGFPSFPLVERQANEVDWWDMVCNVKKLINEKKEDGKVFWQNLAGYKRQEALRPYLSSEEDRKKGKKFARYQLGDLLLHLEKKHGEDWGKVYDEAWERIDKKVEGLSKHIKLEEERRSEDAQSKAALTDWLRAKASFVIEGLKEADKDEFCRCELKLQKWYGDLRGKPFAIEAENSILDISGFSKQYNCAFIWQKDGVKKLNLYLIINYFKGGKLRFKKIKPEAFEANRFYTVINKKSGEIVPMEVNFNFDDPNLIILPLAFGKRQGREFIWNDLLSLETGSLKLANGRVIEKTLYNRRTRQDEPALFVALTFERREVLDSSNIKPMNLIGVDRGENIPAVIALTDPEGCPLSRFKDSLGNPTHILRIGESYKEKQRTIQAKKEVEQRRAGGYSRKYASKAKNLADDMVRNTARDLLYYAVTQDAMLIFENLSRGFGRQGKRTFMAERQYTRMEDWLTAKLAYEGLPSKTYLSKTLAQYTSKTCSNCGFTITSADYDRVLEKLKKTATGWMTTINGKELKVEGQITYYNRYKRQNVVKDLSVELDRLSEESVNNDISSWTKGRSGEALSLLKKRFSHRPVQEKFVCLNCGFETHADEQAALNIARSWLFLRSQEYKKYQTNKTTGNTDKRAFVETWQSFYRKKLKEVWKPAV

SEQ ID NO: 36125 - protein, 978 aa, synthetic construct
  REGION 1..978: note = engineered CasX variant
QEIKRINKIRRRLVKDSNTKKAGKTGPMKTLLVRVMTPDLRERLENLRKKPENIPQPISNTSRANLNKLLTDYTEMKKAILHVYWEEFQVDPVGLMSRVAQPASKKIDQNKLKPEMDEKGNLTTAGFACSQCGQPLFVYKLEQVSEKGKAYTNYFGRCNVAEHEKLILLAQLKPEKDSDEAVTYSLGKFGQRALDFYSIHVTKESTHPVKPLAQIAGNRYASAPVGKALSDACMGTIASFLSKYQDIIIEHQKVVKGNQKRLESLRELAGKENLEYPSVTLPPQPHTKEGVDAYNEVIARVRTWVNLNLWQKLKLSRDDAKPLLRLKGFPSFPLVERQANEVDWWDMVCNVKKLINEKKEDGKVFWQNLAGYKRQEALRPYLSSEEDRKKGKKFARYQLGDLLLHLEKKHGEDWGKVYDEAWERIDKKVEGLSKHIKLEEERRSEDAQSKAALTDWLRAKASFVIEGLKEADKDEFCRCELKLQKWYGDLRGKPFAIEAENSILDISGFSKQYNCAFIWQKDGVKKLNLYLIINYFKGGKLRFKKIKPEAFEANRFYTVINKKSGEIVPMEVNFNFDDPNLIILPLAFGKRQGREFIWNDLLSLETGSLKLANGRVIEKTLYNRRTRQDEPALFVALTFERREVLDSSNIKPMNLIGVDRGENIPAVIALTDPEGCPLSRFKDSLGNPTHILRIGESYKEKQRTIQAKKEVEQRRAGGYSRKYASKAKNLADDMVRNTARDLLYYAVTQDAMLIFENLSRGFGRQGKRTFMAERQYTRMEDWLTAKLAYEGLPSKTYLSKTLAQYTSKTCSNCGFTITSADYDRVLEKLKKTATGWMTTINGKELKVEGQITYYNRYKRQNVVKDLSVELDRLSEESVNNDISSWTKGRSGEALSLLKKRFSHRPVQEKFVCLNCGFETHADEQAALNIARSWLFLRSQEYKKYQTNKTTGNTDKRAFVETWQSFYRKKLKEVWKPAV

SEQ ID NO: 36126 - protein, 978 aa, synthetic construct
  REGION 1..978: note = engineered CasX variant
QEIKRINKIRRRLVKDSNTKKAGKTGPMKTLLVRVMTPDLRERLENLRKKPENIPQPISNTSRANLNKLLTDYTEMKKAILHVYWEEFQVDPVGLMSRVAQPASKKIDQNKLKPEMDEKGNLTTAGFACSQCGQPLFVYKLEQVSEKGKAYTNYFGRCNVAEHEKLILLAQLKPEKDSDEAVTYSLGKFGQRALDFYSIHVTKESTHPVKPLAQIAGNRYASVPVGKALSDACMGTIASFLSKYQDIIIEHQKVVKGNQKRLESLRELAGKENLEYPSVTLPPQPHTKEGVDAYNEVIARVRTWVNLNLWQKLKLSRDDAKPLLRLKGFPSFPLVERQANEVDWWDMVCNVKKLINEKKEDGKVFWQNLAGYKRQEALRPYLSSEEDRKKGKKFARYQLGDLLLHLEKKHGEDWGKVYDEAWERIDKKVEGLSKHIKLEEERRSEDAQSKAALTDWLRAKASFVIEGLKEADKDEFCRCELKLQKWYGDLRGKPFAIEAENSILDISGFSKQYNCAFIWQKDGVKKLNLYLIINYFKGGKLRFKKIKPEAFEANRFYTVINKKSGEIVPMEVNFNFDDPNLIILPLAFGKRQGREFIWNDLLSLETGSLKLANGRVIEKTLYNRRTRQDEPALFVALTFERREVLDSSNIKPMNLIGVDRGENIPAVIALTDPEGCPLSRFKDSLGNPTHILRIGESYKEKQRTIQAKKEVEQRRAGGYSRKYASKAKNLADDMVRNTARDLLYYAVTQDAMLIFENLSRGFGRQGKRTFMAERQYTRMEDWLTAKLAYEGLPSKTYLSKTLAQYTSKTCSNCGFTITSADYDRVLEKLKKTATGWMTTINGKELKVEGQITYYNRYKRQNVVKDLSVELDRLSEESVNNDISSWTKGRSGEALSLLKKRFSHRPVQEKFVCLNCGFETHADEQAALNIARSWLFLRSQEYKKYQTNKTTGNTDKRAFVETWQSFYRKKLKEVWKPAV

SEQ ID NO: 36127 - protein, 978 aa, synthetic construct
  REGION 1..978: note = engineered CasX variant
QEIKRINKIRRRLVKDSNTKKAGKTGPMKTLLVRVMTPDLRERLENLRKKPENIPQPISNTSRANLNKLLTDYTEMKKAILHVYWEEFQVDPVGLMSRVAQPASKKIDQNKLKPEMDEKGNLTTAGFACSQCGQPLFVYKLEQVSEKGKAYTNYFGRCNVAEHEKLIKLAQLKPEKDSDEAVTYSLGKFGQRALDFYSIHVTKESTHPVKPLAQIAGNRYASGPVGKALSDACMGTIASFLSKYQDIIIEHQKVVKGNQKRLESLRELAGKENLEYPSVTLPPQPHTKEGVDAYNEVIARVRTWVNLNLWQKLKLSRDDAKPLLRLKGFPSFPLVERQANEVDWWDMVCNVKKLINEKKEDGKVFWQNLAGYKRQEALRPYLSSEEDRKKGKKFARYQLGDLLLHLEKKHGEDWGKVYDEAWERIDKKVEGLSKHIKLEEERRSEDAQSKAALTDWLRAKASFVIEGLKEADKDEFCRCELKLQKWYGDLRGKPFAIEAENSILDISGFSKQYNCAFIWQKDGVKKLNLYLIINYFKGGKLRFKKIKPEAFEANRFYTVINKKSGEIVPMEVNFNFDDPNLIILPLAFGKRQGREFIWNDLLSLETGSLKLANGRVIEKTLYNRRTRQDEPALFVALTFERREVLDSSNIKPMNLIGVDRGENIPAVIALTDPEGCPLSRFKDSLGNPTHILRIGESYKEKQRTIQAKKEVEQRRAGGYSRKYASKAKNLADDMVRNTARDLLYYAVTQDAMLIFENLSRGFGRQGKRTFMAERQYTRMEDWLTAKLAYEGLPSKTYLSKTLAQYTSKTCSNCGFTITSADYDRVLEKLKKTATGWMTTINGKELKVEGQITYYNRYKRQNVVKDLSVELDRLSEESVNNDISSWTKGRSGEALSLLKKRFSHRPVQEKFVCLNCGFETHADEQAALNIARSWLFLRSQEYKKYQTNKTTGNTDKRAFVETWQSFYRKKLKEVWKPAV

SEQ ID NO: 36128 - protein, 977 aa, synthetic construct
  REGION 1..977: note = engineered CasX variant
QEIKRINKIRRRLVKDSNTKKAGKTGPMKTLLVRVMTPDLRERLENLRKKPENIPQPISNTSRANLNKLLTDYTEMKKAILHVYWEEFQVDPVGLMSRVAQPASKKIDQNKLKPEMDEKGNLTTAGFACSQCGQPLFVYKLEQVSEKGKAYTNYFGRCNVAEHEKLILLAQLKPEKDSDEAVTYSLGKFGQRALDFYSIHVTKESTHPVKPLAQIAGNRYASPVGKALSDACMGTIASFLSKYQDIIIEHQKVVKGNQKRLESLRELAGKENLEYPSVTLPPQPHTKEGVDAYNEVIARVRTWVNLNLWQKLKLSRDDAKPLLRLKGFPSFPLVERQANEVDWWDMVCNVKKLINEKKEDGKVFWQNLAGYKRQEALRPYLSSEEDRKKGKKFARYQLGDLLLHLEKKHGEDWGKVYDEAWERIDKKVEGLSKHIKLEEERRSEDAQSKAALTDWLRAKASFVIEGLKEADKDEFCRCELKLQKWYGDLRGKPFAIEAENSILDISGFSKQYNCAFIWQKDGVKKLNLYLIINYFKGGKLRFKKIKPEAFEANRFYTVINKKSGEIVPMEVNFNFDDPNLIILPLAFGKRQGREFIWNDLLSLETGSLKLANGRVIEKTLYNRRTRQDEPALFVALTFERREVLDSSNIKPMNLIGVDRGENIPAVIALTDPEGCPLSRFKDSLGNPTHILRIGESYKEKQRTIQAKKEVEQRRAGGYSRKYASKAKNLADDMVRNTARDLLYYAVTQDAMLIFENLSRGFGRQGKRTFMAERQYTRMEDWLTAKLAYEGLPSKTYLSKTLAQYTSKTCSNCGFTITSADYDRVLEKLKKTATGWMTTINGKELKVEGQITYYNRYKRQNVVKDLSVELDRLSEESVNNDISSWTKGRSGEALSLLKKRFSHRPVQEKFVCLNCGFETHADEQAALNIARSWLFLRSQEYKKYQTNKTTGNTDKRAFVETWQSFYRKKLKEVWKPAV

SEQ ID NO: 36129 - protein, 978 aa, synthetic construct
  REGION 1..978: note = engineered CasX variant
QEIKRLNKIRRRLVKDSNTKKAGKTGPMKTLLVRVMTPDLRERLENLRKKPENIPQPISNTSRANLNKLLTDYTEMKKAILHVYWEEFQKDPVGLMSRVAQPASKKIDQNKLKPEMDEKGNLTTAGFACSQCGQPLFVYKLEQVSEKGKAYTNYFGRCNVAEHEKLILLAQLKPEKDSDEAVTYSLGKFGQRALDFYSIHVTKESTHPVKPLAQIAGNRYASYPVGKALSDACMGTIASFLSKYQDIIIEHQKVVKGNQKRLESLRELAGKENLEYPSVTLPPQPHTKEGVDAYNEVIARVRTWVNLNLWQKLKLSRDDAKPLLRLKGFPSFPLVERQANEVDWWDMVCNVKKLINEKKEDGKVFWQNLAGYKRQEALRPYLSSEEDRKKGKKFARYQLGDLLLHLEKKHGEDWGKVYDEAWERIDKKVEGLSKHIKLEEERRSEDAQSKAALTDWLRAKASFVIEGLKEADKDEFCRCELKLQKWYGDLRGKPFAIEAENSILDISGFSKQYNCAFIWQKDGVKKLNLYLIINYFKGGKLRFKKIKPEAFEANRFYTVINKKSGEIVPMEVNFNFDDPNLIILPLAFGKRQGREFIWNDLLSLETGSLKLANGRVIEKTLYNRRTRQDEPALFVALTFERREVLDSSNIKPMNLIGVDRGENIPAVIALTDPEGCPLSRFKDSLGNPTHILRIGESYKEKQRTIQAKKEVEQRRAGGYSRKYASKAKNLADDMVRNTARDLLYYAVTQDAMLIFENLSRGFGRQGKRTFMAERQYTRMEDWLTAKLAYEGLPSKTYLSKTLAQYTSKTCSNCGFTITSADYDRVLEKLKKTATGWMTTINGKELKVEGQITYYNRYKRQNVVKDLSVELDRLSEESVNNDISSWTKGRSGEALSLLKKRFSHRPVQEKFVCLNCGFETHADEQAALNIARSWLFLRSQEYKKYQTNKTTGNTDKRAFVETWQSFYRKKLKEVWKPAV

SEQ ID NO: 36130 - protein, 978 aa, synthetic construct
  REGION 1..978: note = engineered CasX variant
QEIKRLNKIRRRLVKDSNTKKAGKTGPMKTLLVRVMTPDLRERLENLRKKPENIPQPISNTSRANLNKLLTDYTEMKKAILHVYWEEFQKDPVGLMSRVAQPASKKIDQNKLKPEMDEKGNLTTAGFACSQCGQPLFVYKLEQVSEKGKAYTNYFGRCNVAEHEKLILLAQLKPEKDSDEAVTYSLGKFGQRALDFYSIHVTKESTHPVKPLAQIAGNRYASHPVGKALSDACMGTIASFLSKYQDIIIEHQKVVKGNQKRLESLRELAGKENLEYPSVTLPPQPHTKEGVDAYNEVIARVRTWVNLNLWQKLKLSRDDAKPLLRLKGFPSFPLVERQANEVDWWDMVCNVKKLINEKKEDGKVFWQNLAGYKRQEALRPYLSSEEDRKKGKKFARYQLGDLLLHLEKKHGEDWGKVYDEAWERIDKKVEGLSKHIKLEEERRSEDAQSKAALTDWLRAKASFVIEGLKEADKDEFCRCELKLQKWYGDLRGKPFAIEAENSILDISGFSKQYNCAFIWQKDGVKKLNLYLIINYFKGGKLRFKKIKPEAFEANRFYTVINKKSGEIVPMEVNFNFDDPNLIILPLAFGKRQGREFIWNDLLSLETGSLKLANGRVIEKTLYNRRTRQDEPALFVALTFERREVLDSSNIKPMNLIGVDRGENIPAVIALTDPEGCPLSRFKDSLGNPTHILRIGESYKEKQRTIQAKKEVEQRRAGGYSRKYASKAKNLADDMVRNTARDLLYYAVTQDAMLIFENLSRGFGRQGKRTFMAERQYTRMEDWLTAKLAYEGLPSKTYLSKTLAQYTSKTCSNCGFTITSADYDRVLEKLKKTATGWMTTINGKELKVEGQITYYNRYKRQNVVKDLSVELDRLSEESVNNDISSWTKGRSGEALSLLKKRFSHRPVQEKFVCLNCGFETHADEQAALNIARSWLFLRSQEYKKYQTNKTTGNTDKRAFVETWQSFYRKKLKEVWKPAV

SEQ ID NO: 36131 - protein, 978 aa, synthetic construct
  REGION 1..978: note = engineered CasX variant
QEIKRLNKIRRRLVKDSNTKKAGKTGPMKTLLVRVMTPDLRERLENLRKKPENIPQPISNTSRANLNKLLTDYTEMKKAILHVYWEEFQKDPVGLMSRVAQPASKKIDQNKLKPEMDEKGNLTTAGFACSQCGQPLFVYKLEQVSEKGKAYTNYFGRCNVAEHEKLILLAQLKPEKDSDEAVTYSLGKFGQRALDFYSIHVTKESTHPVKPLAQIAGNRYASSPVGKALSDACMGTIASFLSKYQDIIIEHQKVVKGNQKRLESLRELAGKENLEYPSVTLPPQPHTKEGVDAYNEVIARVRTWVNLNLWQKLKLSRDDAKPLLRLKGFPSFPLVERQANEVDWWDMVCNVKKLINEKKEDGKVFWQNLAGYKRQEALRPYLSSEEDRKKGKKFARYQLGDLLLHLEKKHGEDWGKVYDEAWERIDKKVEGLSKHIKLEEERRSEDAQSKAALTDWLRAKASFVIEGLKEADKDEFCRCELKLQKWYGDLRGKPFAIEAENSILDISGFSKQYNCAFIWQKDGVKKLNLYLIINYFKGGKLRFKKIKPEAFEANRFYTVINKKSGEIVPMEVNFNFDDPNLIILPLAFGKRQGREFIWNDLLSLETGSLKLANGRVIEKTLYNRRTRQDEPALFVALTFERREVLDSSNIKPMNLIGVDRGENIPAVIALTDPEGCPLSRFKDSLGNPTHILRIGESYKEKQRTIQAKKEVEQRRAGGYSRKYASKAKNLADDMVRNTARDLLYYAVTQDAMLIFENLSRGFGRQGKRTFMAERQYTRMEDWLTAKLAYEGLPSKTYLSKTLAQYTSKTCSNCGFTITSADYDRVLEKLKKTATGWMTTINGKELKVEGQITYYNRYKRQNVVKDLSVELDRLSEESVNNDISSWTKGRSGEALSLLKKRFSHRPVQEKFVCLNCGFETHADEQAALNIARSWLFLRSQEYKKYQTNKTTGNTDKRAFVETWQSFYRKKLKEVWKPAV

SEQ ID NO: 36132 - protein, 978 aa, synthetic construct
  REGION 1..978: note = engineered CasX variant
QEIKRLNKIRRRLVKDSNTKKAGKTGPMKTLLVRVMTPDLRERLENLRKKPENIPQPISNTSRANLNKLLTDYTEMKKAILHVYWEEFQKDPVGLMSRVAQPASKKIDQNKLKPEMDEKGNLTTAGFACSQCGQPLFVYKLEQVSEKGKAYTNYFGRCNVAEHEKLILLAQLKPEKDSDEAVTYSLGKFGQRALDFYSIHVTKESTHPVKPLAQIAGNRYASTPVGKALSDACMGTIASFLSKYQDIIIEHQKVVKGNQKRLESLRELAGKENLEYPSVTLPPQPHTKEGVDAYNEVIARVRTWVNLNLWQKLKLSRDDAKPLLRLKGFPSFPLVERQANEVDWWDMVCNVKKLINEKKEDGKVFWQNLAGYKRQEALRPYLSSEEDRKKGKKFARYQLGDLLLHLEKKHGEDWGKVYDEAWERIDKKVEGLSKHIKLEEERRSEDAQSKAALTDWLRAKASFVIEGLKEADKDEFCRCELKLQKWYGDLRGKPFAIEAENSILDISGFSKQYNCAFIWQKDGVKKLNLYLIINYFKGGKLRFKKIKPEAFEANRFYTVINKKSGEIVPMEVNFNFDDPNLIILPLAFGKRQGREFIWNDLLSLETGSLKLANGRVIEKTLYNRRTRQDEPALFVALTFERREVLDSSNIKPMNLIGVDRGENIPAVIALTDPEGCPLSRFKDSLGNPTHILRIGESYKEKQRTIQAKKEVEQRRAGGYSRKYASKAKNLADDMVRNTARDLLYYAVTQDAMLIFENLSRGFGRQGKRTFMAERQYTRMEDWLTAKLAYEGLPSKTYLSKTLAQYTSKTCSNCGFTITSADYDRVLEKLKKTATGWMTTINGKELKVEGQITYYNRYKRQNVVKDLSVELDRLSEESVNNDISSWTKGRSGEALSLLKKRFSHRPVQEKFVCLNCGFETHADEQAALNIARSWLFLRSQEYKKYQTNKTTGNTDKRAFVETWQSFYRKKLKEVWKPAV

SEQ ID NO: 36133 - protein, 978 aa, synthetic construct
  REGION 1..978: note = engineered CasX variant
QEIKRLNKIRRRLVKDSNTKKAGKTGPMKTLLVRVMTPDLRERLENLRKKPENIPQPISNTSRANLNKLLTDYTEMKKAILHVYWEEFQKDPVGLMSRVAQPASKKIDQNKLKPEMDEKGNLTTAGFACSQCGQPLFVYKLEQVSEKGKAYTNYFGRCNVAEHEKLILLAQLKPEKDSDEAVTYSLGKFGQRALDFYSIHVTKESTHPVKPLAQIAGNRYASAPVGKALSDACMGTIASFLSKYQDIIIEHQKVVKGNQKRLESLRELAGKENLEYPSVTLPPQPHTKEGVDAYNEVIARVRTWVNLNLWQKLKLSRDDAKPLLRLKGFPSFPLVERQANEVDWWDMVCNVKKLINEKKEDGKVFWQNLAGYKRQEALRPYLSSEEDRKKGKKFARYQLGDLLLHLEKKHGEDWGKVYDEAWERIDKKVEGLSKHIKLEEERRSEDAQSKAALTDWLRAKASFVIEGLKEADKDEFCRCELKLQKWYGDLRGKPFAIEAENSILDISGFSKQYNCAFIWQKDGVKKLNLYLIINYFKGGKLRFKKIKPEAFEANRFYTVINKKSGEIVPMEVNFNFDDPNLIILPLAFGKRQGREFIWNDLLSLETGSLKLANGRVIEKTLYNRRTRQDEPALFVALTFERREVLDSSNIKPMNLIGVDRGENIPAVIALTDPEGCPLSRFKDSLGNPTHILRIGESYKEKQRTIQAKKEVEQRRAGGYSRKYASKAKNLADDMVRNTARDLLYYAVTQDAMLIFENLSRGFGRQGKRTFMAERQYTRMEDWLTAKLAYEGLPSKTYLSKTLAQYTSKTCSNCGFTITSADYDRVLEKLKKTATGWMTTINGKELKVEGQITYYNRYKRQNVVKDLSVELDRLSEESVNNDISSWTKGRSGEALSLLKKRFSHRPVQEKFVCLNCGFETHADEQAALNIARSWLFLRSQEYKKYQTNKTTGNTDKRAFVETWQSFYRKKLKEVWKPAV

SEQ ID NO: 36134 - protein, 978 aa, synthetic construct
  REGION 1..978: note = engineered CasX variant
QEIKRLNKIRRRLVKDSNTKKAGKTGPMKTLLVRVMTPDLRERLENLRKKPENIPQPISNTSRANLNKLLTDYTEMKKAILHVYWEEFQKDPVGLMSRVAQPASKKIDQNKLKPEMDEKGNLTTAGFACSQCGQPLFVYKLEQVSEKGKAYTNYFGRCNVAEHEKLILLAQLKPEKDSDEAVTYSLGKFGQRALDFYSIHVTKESTHPVKPLAQIAGNRYASVPVGKALSDACMGTIASFLSKYQDIIIEHQKVVKGNQKRLESLRELAGKENLEYPSVTLPPQPHTKEGVDAYNEVIARVRTWVNLNLWQKLKLSRDDAKPLLRLKGFPSFPLVERQANEVDWWDMVCNVKKLINEKKEDGKVFWQNLAGYKRQEALRPYLSSEEDRKKGKKFARYQLGDLLLHLEKKHGEDWGKVYDEAWERIDKKVEGLSKHIKLEEERRSEDAQSKAALTDWLRAKASFVIEGLKEADKDEFCRCELKLQKWYGDLRGKPFAIEAENSILDISGFSKQYNCAFIWQKDGVKKLNLYLIINYFKGGKLRFKKIKPEAFEANRFYTVINKKSGEIVPMEVNFNFDDPNLIILPLAFGKRQGREFIWNDLLSLETGSLKLANGRVIEKTLYNRRTRQDEPALFVALTFERREVLDSSNIKPMNLIGVDRGENIPAVIALTDPEGCPLSRFKDSLGNPTHILRIGESYKEKQRTIQAKKEVEQRRAGGYSRKYASKAKNLADDMVRNTARDLLYYAVTQDAMLIFENLSRGFGRQGKRTFMAERQYTRMEDWLTAKLAYEGLPSKTYLSKTLAQYTSKTCSNCGFTITSADYDRVLEKLKKTATGWMTTINGKELKVEGQITYYNRYKRQNVVKDLSVELDRLSEESVNNDISSWTKGRSGEALSLLKKRFSHRPVQEKFVCLNCGFETHADEQAALNIARSWLFLRSQEYKKYQTNKTTGNTDKRAFVETWQSFYRKKLKEVWKPAV

SEQ ID NO: 36135 - protein, 978 aa, synthetic construct
  REGION 1..978: note = engineered CasX variant
QEIKRLNKIRRRLVKDSNTKKAGKTGPMKTLLVRVMTPDLRERLENLRKKPENIPQPISNTSRANLNKLLTDYTEMKKAILHVYWEEFQKDPVGLMSRVAQPASKKIDQNKLKPEMDEKGNLTTAGFACSQCGQPLFVYKLEQVSEKGKAYTNYFGRCNVAEHEKLIKLAQLKPEKDSDEAVTYSLGKFGQRALDFYSIHVTKESTHPVKPLAQIAGNRYASGPVGKALSDACMGTIASFLSKYQDIIIEHQKVVKGNQKRLESLRELAGKENLEYPSVTLPPQPHTKEGVDAYNEVIARVRTWVNLNLWQKLKLSRDDAKPLLRLKGFPSFPLVERQANEVDWWDMVCNVKKLINEKKEDGKVFWQNLAGYKRQEALRPYLSSEEDRKKGKKFARYQLGDLLLHLEKKHGEDWGKVYDEAWERIDKKVEGLSKHIKLEEERRSEDAQSKAALTDWLRAKASFVIEGLKEADKDEFCRCELKLQKWYGDLRGKPFAIEAENSILDISGFSKQYNCAFIWQKDGVKKLNLYLIINYFKGGKLRFKKIKPEAFEANRFYTVINKKSGEIVPMEVNFNFDDPNLIILPLAFGKRQGREFIWNDLLSLETGSLKLANGRVIEKTLYNRRTRQDEPALFVALTFERREVLDSSNIKPMNLIGVDRGENIPAVIALTDPEGCPLSRFKDSLGNPTHILRIGESYKEKQRTIQAKKEVEQRRAGGYSRKYASKAKNLADDMVRNTARDLLYYAVTQDAMLIFENLSRGFGRQGKRTFMAERQYTRMEDWLTAKLAYEGLPSKTYLSKTLAQYTSKTCSNCGFTITSADYDRVLEKLKKTATGWMTTINGKELKVEGQITYYNRYKRQNVVKDLSVELDRLSEESVNNDISSWTKGRSGEALSLLKKRFSHRPVQEKFVCLNCGFETHADEQAALNIARSWLFLRSQEYKKYQTNKTTGNTDKRAFVETWQSFYRKKLKEVWKPAV

SEQ ID NO: 36136 - protein, 977 aa, synthetic construct
  REGION 1..977: note = engineered CasX variant
QEIKRLNKIRRRLVKDSNTKKAGKTGPMKTLLVRVMTPDLRERLENLRKKPENIPQPISNTSRANLNKLLTDYTEMKKAILHVYWEEFQKDPVGLMSRVAQPASKKIDQNKLKPEMDEKGNLTTAGFACSQCGQPLFVYKLEQVSEKGKAYTNYFGRCNVAEHEKLILLAQLKPEKDSDEAVTYSLGKFGQRALDFYSIHVTKESTHPVKPLAQIAGNRYASPVGKALSDACMGTIASFLSKYQDIIIEHQKVVKGNQKRLESLRELAGKENLEYPSVTLPPQPHTKEGVDAYNEVIARVRTWVNLNLWQKLKLSRDDAKPLLRLKGFPSFPLVERQANEVDWWDMVCNVKKLINEKKEDGKVFWQNLAGYKRQEALRPYLSSEEDRKKGKKFARYQLGDLLLHLEKKHGEDWGKVYDEAWERIDKKVEGLSKHIKLEEERRSEDAQSKAALTDWLRAKASFVIEGLKEADKDEFCRCELKLQKWYGDLRGKPFAIEAENSILDISGFSKQYNCAFIWQKDGVKKLNLYLIINYFKGGKLRFKKIKPEAFEANRFYTVINKKSGEIVPMEVNFNFDDPNLIILPLAFGKRQGREFIWNDLLSLETGSLKLANGRVIEKTLYNRRTRQDEPALFVALTFERREVLDSSNIKPMNLIGVDRGENIPAVIALTDPEGCPLSRFKDSLGNPTHILRIGESYKEKQRTIQAKKEVEQRRAGGYSRKYASKAKNLADDMVRNTARDLLYYAVTQDAMLIFENLSRGFGRQGKRTFMAERQYTRMEDWLTAKLAYEGLPSKTYLSKTLAQYTSKTCSNCGFTITSADYDRVLEKLKKTATGWMTTINGKELKVEGQITYYNRYKRQNVVKDLSVELDRLSEESVNNDISSWTKGRSGEALSLLKKRFSHRPVQEKFVCLNCGFETHADEQAALNIARSWLFLRSQEYKKYQTNKTTGNTDKRAFVETWQSFYRKKLKEVWKPAV

SEQ ID NO: 36137 - protein, 978 aa, synthetic construct
  REGION 1..978: note = engineered CasX variant
QEIKRINKIRRRLVKDSNTKKAGKTGPMKTLLVRVMTPDLRERLENLRKKPENIPQPISNTSRANLNKLLTDYTEMKKAILHVYWEEFQKDPVGLMSRVAQPASKKIDQNKLKPEMDEKGNLTTAGFACSQCGQPLFVYKLEQVSEKGKAYTNYVGRCNVAEHEKLILLAQLKPEKDSDEAVTYSLGKFGQRALDFYSIHVTKESTHPVKPLAQIAGNRYASYPVGKALSDACMGTIASFLSKYQDIIIEHQKVVKGNQKRLESLRELAGKENLEYPSVTLPPQPHTKEGVDAYNEVIARVRTWVNLNLWQKLKLSRDDAKPLLRLKGFPSFPLVERQANEVDWWDMVCNVKKLINEKKEDGKVFWQNLAGYKRQEALRPYLSSEEDRKKGKKFARYQLGDLLLHLEKKHGEDWGKVYDEAWERIDKKVEGLSKHIKLEEERRSEDAQSKAALTDWLRAKASFVIEGLKEADKDEFCRCELKLQKWYGDLRGKPFAIEAENSILDISGFSKQYNCAFIWQKDGVKKLNLYLIINYFKGGKLRFKKIKPEAFEANRFYTVINKKSGEIVPMEVNFNFDDPNLIILPLAFGKRQGREFIWNDLLSLETGSLKLANGRVIEKTLYNRRTRQDEPALFVALTFERREVLDSSNIKPMNLIGVDRGENIPAVIALTDPEGCPLSRFKDSLGNPTHILRIGESYKEKQRTIQAKKEVEQRRAGGYSRKYASKAKNLADDMVRNTARDLLYYAVTQDAMLIFENLSRGFGRQGKRTFMAERQYTRMEDWLTAKLAYEGLPSKTYLSKTLAQYTSKTCSNCGFTITSADYDRVLEKLKKTATGWMTTINGKELKVEGQITYYNRYKRQNVVKDLSVELDRLSEESVNNDISSWTKGRSGEALSLLKKRFSHRPVQEKFVCLNCGFETHADEQAALNIARSWLFLRSQEYKKYQTNKTTGNTDKRAFVETWQSFYRKKLKEVWKPAV

SEQ ID NO: 36138 - protein, 978 aa, synthetic construct
  REGION 1..978: note = engineered CasX variant
QEIKRINKIRRRLVKDSNTKKAGKTGPMKTLLVRVMTPDLRERLENLRKKPENIPQPISNTSRANLNKLLTDYTEMKKAILHVYWEEFQKDPVGLMSRVAQPASKKIDQNKLKPEMDEKGNLTTAGFACSQCGQPLFVYKLEQVSEKGKAYTNYVGRCNVAEHEKLILLAQLKPEKDSDEAVTYSLGKFGQRALDFYSIHVTKESTHPVKPLAQIAGNRYASHPVGKALSDACMGTIASFLSKYQDIIIEHQKVVKGNQKRLESLRELAGKENLEYPSVTLPPQPHTKEGVDAYNEVIARVRTWVNLNLWQKLKLSRDDAKPLLRLKGFPSFPLVERQANEVDWWDMVCNVKKLINEKKEDGKVFWQNLAGYKRQEALRPYLSSEEDRKKGKKFARYQLGDLLLHLEKKHGEDWGKVYDEAWERIDKKVEGLSKHIKLEEERRSEDAQSKAALTDWLRAKASFVIEGLKEADKDEFCRCELKLQKWYGDLRGKPFAIEAENSILDISGFSKQYNCAFIWQKDGVKKLNLYLIINYFKGGKLRFKKIKPEAFEANRFYTVINKKSGEIVPMEVNFNFDDPNLIILPLAFGKRQGREFIWNDLLSLETGSLKLANGRVIEKTLYNRRTRQDEPALFVALTFERREVLDSSNIKPMNLIGVDRGENIPAVIALTDPEGCPLSRFKDSLGNPTHILRIGESYKEKQRTIQAKKEVEQRRAGGYSRKYASKAKNLADDMVRNTARDLLYYAVTQDAMLIFENLSRGFGRQGKRTFMAERQYTRMEDWLTAKLAYEGLPSKTYLSKTLAQYTSKTCSNCGFTITSADYDRVLEKLKKTATGWMTTINGKELKVEGQITYYNRYKRQNVVKDLSVELDRLSEESVNNDISSWTKGRSGEALSLLKKRFSHRPVQEKFVCLNCGFETHADEQAALNIARSWLFLRSQEYKKYQTNKTTGNTDKRAFVETWQSFYRKKLKEVWKPAV

SEQ ID NO: 36139 - protein, 978 aa, synthetic construct
  REGION 1..978: note = engineered CasX variant
QEIKRINKIRRRLVKDSNTKKAGKTGPMKTLLVRVMTPDLRERLENLRKKPENIPQPISNTSRANLNKLLTDYTEMKKAILHVYWEEFQKDPVGLMSRVAQPASKKIDQNKLKPEMDEKGNLTTAGFACSQCGQPLFVYKLEQVSEKGKAYTNYVGRCNVAEHEKLILLAQLKPEKDSDEAVTYSLGKFGQRALDFYSIHVTKESTHPVKPLAQIAGNRYASSPVGKALSDACMGTIASFLSKYQDIIIEHQKVVKGNQKRLESLRELAGKENLEYPSVTLPPQPHTKEGVDAYNEVIARVRTWVNLNLWQKLKLSRDDAKPLLRLKGFPSFPLVERQANEVDWWDMVCNVKKLINEKKEDGKVFWQNLAGYKRQEALRPYLSSEEDRKKGKKFARYQLGDLLLHLEKKHGEDWGKVYDEAWERIDKKVEGLSKHIKLEEERRSEDAQSKAALTDWLRAKASFVIEGLKEADKDEFCRCELKLQKWYGDLRGKPFAIEAENSILDISGFSKQYNCAFIWQKDGVKKLNLYLIINYFKGGKLRFKKIKPEAFEANRFYTVINKKSGEIVPMEVNFNFDDPNLIILPLAFGKRQGREFIWNDLLSLETGSLKLANGRVIEKTLYNRRTRQDEPALFVALTFERREVLDSSNIKPMNLIGVDRGENIPAVIALTDPEGCPLSRFKDSLGNPTHILRIGESYKEKQRTIQAKKEVEQRRAGGYSRKYASKAKNLADDMVRNTARDLLYYAVTQDAMLIFENLSRGFGRQGKRTFMAERQYTRMEDWLTAKLAYEGLPSKTYLSKTLAQYTSKTCSNCGFTITSADYDRVLEKLKKTATGWMTTINGKELKVEGQITYYNRYKRQNVVKDLSVELDRLSEESVNNDISSWTKGRSGEALSLLKKRFSHRPVQEKFVCLNCGFETHADEQAALNIARSWLFLRSQEYKKYQTNKTTGNTDKRAFVETWQSFYRKKLKEVWKPAV

SEQ ID NO: 36140 - protein, 978 aa, synthetic construct
  REGION 1..978: note = engineered CasX variant
QEIKRINKIRRRLVKDSNTKKAGKTGPMKTLLVRVMTPDLRERLENLRKKPENIPQPISNTSRANLNKLLTDYTEMKKAILHVYWEEFQKDPVGLMSRVAQPASKKIDQNKLKPEMDEKGNLTTAGFACSQCGQPLFVYKLEQVSEKGKAYTNYVGRCNVAEHEKLILLAQLKPEKDSDEAVTYSLGKFGQRALDFYSIHVTKESTHPVKPLAQIAGNRYASTPVGKALSDACMGTIASFLSKYQDIIIEHQKVVKGNQKRLESLRELAGKENLEYPSVTLPPQPHTKEGVDAYNEVIARVRTWVNLNLWQKLKLSRDDAKPLLRLKGFPSFPLVERQANEVDWWDMVCNVKKLINEKKEDGKVFWQNLAGYKRQEALRPYLSSEEDRKKGKKFARYQLGDLLLHLEKKHGEDWGKVYDEAWERIDKKVEGLSKHIKLEEERRSEDAQSKAALTDWLRAKASFVIEGLKEADKDEFCRCELKLQKWYGDLRGKPFAIEAENSILDISGFSKQYNCAFIWQKDGVKKLNLYLIINYFKGGKLRFKKIKPEAFEANRFYTVINKKSGEIVPMEVNFNFDDPNLIILPLAFGKRQGREFIWNDLLSLETGSLKLANGRVIEKTLYNRRTRQDEPALFVALTFERREVLDSSNIKPMNLIGVDRGENIPAVIALTDPEGCPLSRFKDSLGNPTHILRIGESYKEKQRTIQAKKEVEQRRAGGYSRKYASKAKNLADDMVRNTARDLLYYAVTQDAMLIFENLSRGFGRQGKRTFMAERQYTRMEDWLTAKLAYEGLPSKTYLSKTLAQYTSKTCSNCGFTITSADYDRVLEKLKKTATGWMTTINGKELKVEGQITYYNRYKRQNVVKDLSVELDRLSEESVNNDISSWTKGRSGEALSLLKKRFSHRPVQEKFVCLNCGFETHADEQAALNIARSWLFLRSQEYKKYQTNKTTGNTDKRAFVETWQSFYRKKLKEVWKPAV

SEQ ID NO: 36141 - protein, 978 aa, synthetic construct
  REGION 1..978: note = engineered CasX variant
QEIKRINKIRRRLVKDSNTKKAGKTGPMKTLLVRVMTPDLRERLENLRKKPENIPQPISNTSRANLNKLLTDYTEMKKAILHVYWEEFQKDPVGLMSRVAQPASKKIDQNKLKPEMDEKGNLTTAGFACSQCGQPLFVYKLEQVSEKGKAYTNYVGRCNVAEHEKLILLAQLKPEKDSDEAVTYSLGKFGQRALDFYSIHVTKESTHPVKPLAQIAGNRYASAPVGKALSDACMGTIASFLSKYQDIIIEHQKVVKGNQKRLESLRELAGKENLEYPSVTLPPQPHTKEGVDAYNEVIARVRTWVNLNLWQKLKLSRDDAKPLLRLKGFPSFPLVERQANEVDWWDMVCNVKKLINEKKEDGKVFWQNLAGYKRQEALRPYLSSEEDRKKGKKFARYQLGDLLLHLEKKHGEDWGKVYDEAWERIDKKVEGLSKHIKLEEERRSEDAQSKAALTDWLRAKASFVIEGLKEADKDEFCRCELKLQKWYGDLRGKPFAIEAENSILDISGFSKQYNCAFIWQKDGVKKLNLYLIINYFKGGKLRFKKIKPEAFEANRFYTVINKKSGEIVPMEVNFNFDDPNLIILPLAFGKRQGREFIWNDLLSLETGSLKLANGRVIEKTLYNRRTRQDEPALFVALTFERREVLDSSNIKPMNLIGVDRGENIPAVIALTDPEGCPLSRFKDSLGNPTHILRIGESYKEKQRTIQAKKEVEQRRAGGYSRKYASKAKNLADDMVRNTARDLLYYAVTQDAMLIFENLSRGFGRQGKRTFMAERQYTRMEDWLTAKLAYEGLPSKTYLSKTLAQYTSKTCSNCGFTITSADYDRVLEKLKKTATGWMTTINGKELKVEGQITYYNRYKRQNVVKDLSVELDRLSEESVNNDISSWTKGRSGEALSLLKKRFSHRPVQEKFVCLNCGFETHADEQAALNIARSWLFLRSQEYKKYQTNKTTGNTDKRAFVETWQSFYRKKLKEVWKPAV

SEQ ID NO: 36142 - protein, 978 aa, synthetic construct
  REGION 1..978: note = engineered CasX variant
QEIKRINKIRRRLVKDSNTKKAGKTGPMKTLLVRVMTPDLRERLENLRKKPENIPQPISNTSRANLNKLLTDYTEMKKAILHVYWEEFQKDPVGLMSRVAQPASKKIDQNKLKPEMDEKGNLTTAGFACSQCGQPLFVYKLEQVSEKGKAYTNYVGRCNVAEHEKLILLAQLKPEKDSDEAVTYSLGKFGQRALDFYSIHVTKESTHPVKPLAQIAGNRYASVPVGKALSDACMGTIASFLSKYQDIIIEHQKVVKGNQKRLESLRELAGKENLEYPSVTLPPQPHTKEGVDAYNEVIARVRTWVNLNLWQKLKLSRDDAKPLLRLKGFPSFPLVERQANEVDWWDMVCNVKKLINEKKEDGKVFWQNLAGYKRQEALRPYLSSEEDRKKGKKFARYQLGDLLLHLEKKHGEDWGKVYDEAWERIDKKVEGLSKHIKLEEERRSEDAQSKAALTDWLRAKASFVIEGLKEADKDEFCRCELKLQKWYGDLRGKPFAIEAENSILDISGFSKQYNCAFIWQKDGVKKLNLYLIINYFKGGKLRFKKIKPEAFEANRFYTVINKKSGEIVPMEVNFNFDDPNLIILPLAFGKRQGREFIWNDLLSLETGSLKLANGRVIEKTLYNRRTRQDEPALFVALTFERREVLDSSNIKPMNLIGVDRGENIPAVIALTDPEGCPLSRFKDSLGNPTHILRIGESYKEKQRTIQAKKEVEQRRAGGYSRKYASKAKNLADDMVRNTARDLLYYAVTQDAMLIFENLSRGFGRQGKRTFMAERQYTRMEDWLTAKLAYEGLPSKTYLSKTLAQYTSKTCSNCGFTITSADYDRVLEKLKKTATGWMTTINGKELKVEGQITYYNRYKRQNVVKDLSVELDRLSEESVNNDISSWTKGRSGEALSLLKKRFSHRPVQEKFVCLNCGFETHADEQAALNIARSWLFLRSQEYKKYQTNKTTGNTDKRAFVETWQSFYRKKLKEVWKPAV

SEQ ID NO: 36143 - protein, 978 aa, synthetic construct
  REGION 1..978: note = engineered CasX variant
QEIKRINKIRRRLVKDSNTKKAGKTGPMKTLLVRVMTPDLRERLENLRKKPENIPQPISNTSRANLNKLLTDYTEMKKAILHVYWEEFQKDPVGLMSRVAQPASKKIDQNKLKPEMDEKGNLTTAGFACSQCGQPLFVYKLEQVSEKGKAYTNYVGRCNVAEHEKLIKLAQLKPEKDSDEAVTYSLGKFGQRALDFYSIHVTKESTHPVKPLAQIAGNRYASGPVGKALSDACMGTIASFLSKYQDIIIEHQKVVKGNQKRLESLRELAGKENLEYPSVTLPPQPHTKEGVDAYNEVIARVRTWVNLNLWQKLKLSRDDAKPLLRLKGFPSFPLVERQANEVDWWDMVCNVKKLINEKKEDGKVFWQNLAGYKRQEALRPYLSSEEDRKKGKKFARYQLGDLLLHLEKKHGEDWGKVYDEAWERIDKKVEGLSKHIKLEEERRSEDAQSKAALTDWLRAKASFVIEGLKEADKDEFCRCELKLQKWYGDLRGKPFAIEAENSILDISGFSKQYNCAFIWQKDGVKKLNLYLIINYFKGGKLRFKKIKPEAFEANRFYTVINKKSGEIVPMEVNFNFDDPNLIILPLAFGKRQGREFIWNDLLSLETGSLKLANGRVIEKTLYNRRTRQDEPALFVALTFERREVLDSSNIKPMNLIGVDRGENIPAVIALTDPEGCPLSRFKDSLGNPTHILRIGESYKEKQRTIQAKKEVEQRRAGGYSRKYASKAKNLADDMVRNTARDLLYYAVTQDAMLIFENLSRGFGRQGKRTFMAERQYTRMEDWLTAKLAYEGLPSKTYLSKTLAQYTSKTCSNCGFTITSADYDRVLEKLKKTATGWMTTINGKELKVEGQITYYNRYKRQNVVKDLSVELDRLSEESVNNDISSWTKGRSGEALSLLKKRFSHRPVQEKFVCLNCGFETHADEQAALNIARSWLFLRSQEYKKYQTNKTTGNTDKRAFVETWQSFYRKKLKEVWKPAV

SEQ ID NO: 36144 - protein, 977 aa, synthetic construct
  REGION 1..977: note = engineered CasX variant
QEIKRINKIRRRLVKDSNTKKAGKTGPMKTLLVRVMTPDLRERLENLRKKPENIPQPISNTSRANLNKLLTDYTEMKKAILHVYWEEFQKDPVGLMSRVAQPASKKIDQNKLKPEMDEKGNLTTAGFACSQCGQPLFVYKLEQVSEKGKAYTNYVGRCNVAEHEKLILLAQLKPEKDSDEAVTYSLGKFGQRALDFYSIHVTKESTHPVKPLAQIAGNRYASPVGKALSDACMGTIASFLSKYQDIIIEHQKVVKGNQKRLESLRELAGKENLEYPSVTLPPQPHTKEGVDAYNEVIARVRTWVNLNLWQKLKLSRDDAKPLLRLKGFPSFPLVERQANEVDWWDMVCNVKKLINEKKEDGKVFWQNLAGYKRQEALRPYLSSEEDRKKGKKFARYQLGDLLLHLEKKHGEDWGKVYDEAWERIDKKVEGLSKHIKLEEERRSEDAQSKAALTDWLRAKASFVIEGLKEADKDEFCRCELKLQKWYGDLRGKPFAIEAENSILDISGFSKQYNCAFIWQKDGVKKLNLYLIINYFKGGKLRFKKIKPEAFEANRFYTVINKKSGEIVPMEVNFNFDDPNLIILPLAFGKRQGREFIWNDLLSLETGSLKLANGRVIEKTLYNRRTRQDEPALFVALTFERREVLDSSNIKPMNLIGVDRGENIPAVIALTDPEGCPLSRFKDSLGNPTHILRIGESYKEKQRTIQAKKEVEQRRAGGYSRKYASKAKNLADDMVRNTARDLLYYAVTQDAMLIFENLSRGFGRQGKRTFMAERQYTRMEDWLTAKLAYEGLPSKTYLSKTLAQYTSKTCSNCGFTITSADYDRVLEKLKKTATGWMTTINGKELKVEGQITYYNRYKRQNVVKDLSVELDRLSEESVNNDISSWTKGRSGEALSLLKKRFSHRPVQEKFVCLNCGFETHADEQAALNIARSWLFLRSQEYKKYQTNKTTGNTDKRAFVETWQSFYRKKLKEVWKPAV

SEQ ID NO: 36145 - protein, 978 aa, synthetic construct
  REGION 1..978: note = engineered CasX variant
QEIKRINKIRRRLVKDSNTKKAGKTGPMKTLLVRVMTPDLRERLENLRKKPENIPQPISNTSRANLNKLLTDYTEMKKAILHVYWEEFQKDPVGLMSRVAQPASKKIDQNKLKPEMDEKGNLTTAGFACSQCGQPLFVYKLEQVSEKGKAYTNYFGRCNVAEHEKLILLAQLKPEKDSDEAVTYSLGKFGQRALDFYSIHVTKESTHPVKPLAQIAGNRYASYPVGKALSDACMGTIASFLSKYQDIIIEHQKVVKGNQKRLESLRELAGKENLEYPSVTLPPQPHTKEGVDAYNEVIARVRTWVNLNLWQKLKLSRDDAKPLLRLKGFPSFPLVERQANEVDWWDMVCNVKKLINEKKEDGKVFWQNLAGYKRQEALRPYLSSEEDRKKGKKFARYQLGDLLLHLEKKHGEDWGKVYDEAWERIDKKVEGLSKHIKLEEERRSEDAQSKAALTDWLRAKASFVIEGLKEADKDEFCRCELKLQKWYGDLRGKPFAIEAENSILDISGFSKQYNCAFIWQKDGVKKLNLYLIINYFKGGKLRFKKIKPEAFEANRFYTVINKKSGEIVPMEVNFNFDDPNLIILPLAFGKRQGREFIWNDLLSLETGSLKLANGRVIEKTLYNRRTRQDEPALFVALTFERREVLDSSNIKPMNLIGVDRGENIPAVIALTDPEGCPLSRFKDSLGNPTHILRIGESYKEKQRTIQAKKEVEQRRAGGYSRKYASKAKNLADDMVRNTARDLLYYAVTQDAMLIFENLSRGFGRQGKRTFMAERQYTRMEDWLTAKLAYEGLASKTYLSKTLAQYTSKTCSNCGFTITSADYDRVLEKLKKTATGWMTTINGKELKVEGQITYYNRYKRQNVVKDLSVELDRLSEESVNNDISSWTKGRSGEALSLLKKRFSHRPVQEKFVCLNCGFETHADEQAALNIARSWLFLRSQEYKKYQTNKTTGNTDKRAFVETWQSFYRKKLKEVWKPAV

SEQ ID NO: 36146 - protein, 978 aa, synthetic construct
  REGION 1..978: note = engineered CasX variant
QEIKRINKIRRRLVKDSNTKKAGKTGPMKTLLVRVMTPDLRERLENLRKKPENIPQPISNTSRANLNKLLTDYTEMKKAILHVYWEEFQKDPVGLMSRVAQPASKKIDQNKLKPEMDEKGNLTTAGFACSQCGQPLFVYKLEQVSEKGKAYTNYFGRCNVAEHEKLILLAQLKPEKDSDEAVTYSLGKFGQRALDFYSIHVTKESTHPVKPLAQIAGNRYASHPVGKALSDACMGTIASFLSKYQDIIIEHQKVVKGNQKRLESLRELAGKENLEYPSVTLPPQPHTKEGVDAYNEVIARVRTWVNLNLWQKLKLSRDDAKPLLRLKGFPSFPLVERQANEVDWWDMVCNVKKLINEKKEDGKVFWQNLAGYKRQEALRPYLSSEEDRKKGKKFARYQLGDLLLHLEKKHGEDWGKVYDEAWERIDKKVEGLSKHIKLEEERRSEDAQSKAALTDWLRAKASFVIEGLKEADKDEFCRCELKLQKWYGDLRGKPFAIEAENSILDISGFSKQYNCAFIWQKDGVKKLNLYLIINYFKGGKLRFKKIKPEAFEANRFYTVINKKSGEIVPMEVNFNFDDPNLIILPLAFGKRQGREFIWNDLLSLETGSLKLANGRVIEKTLYNRRTRQDEPALFVALTFERREVLDSSNIKPMNLIGVDRGENIPAVIALTDPEGCPLSRFKDSLGNPTHILRIGESYKEKQRTIQAKKEVEQRRAGGYSRKYASKAKNLADDMVRNTARDLLYYAVTQDAMLIFENLSRGFGRQGKRTFMAERQYTRMEDWLTAKLAYEGLASKTYLSKTLAQYTSKTCSNCGFTITSADYDRVLEKLKKTATGWMTTINGKELKVEGQITYYNRYKRQNVVKDLSVELDRLSEESVNNDISSWTKGRSGEALSLLKKRFSHRPVQEKFVCLNCGFETHADEQAALNIARSWLFLRSQEYKKYQTNKTTGNTDKRAFVETWQSFYRKKLKEVWKPAV

SEQ ID NO: 36147 - protein, 978 aa, synthetic construct
  REGION 1..978: note = engineered CasX variant
QEIKRINKIRRRLVKDSNTKKAGKTGPMKTLLVRVMTPDLRERLENLRKKPENIPQPISNTSRANLNKLLTDYTEMKKAILHVYWEEFQKDPVGLMSRVAQPASKKIDQNKLKPEMDEKGNLTTAGFACSQCGQPLFVYKLEQVSEKGKAYTNYFGRCNVAEHEKLILLAQLKPEKDSDEAVTYSLGKFGQRALDFYSIHVTKESTHPVKPLAQIAGNRYASSPVGKALSDACMGTIASFLSKYQDIIIEHQKVVKGNQKRLESLRELAGKENLEYPSVTLPPQPHTKEGVDAYNEVIARVRTWVNLNLWQKLKLSRDDAKPLLRLKGFPSFPLVERQANEVDWWDMVCNVKKLINEKKEDGKVFWQNLAGYKRQEALRPYLSSEEDRKKGKKFARYQLGDLLLHLEKKHGEDWGKVYDEAWERIDKKVEGLSKHIKLEEERRSEDAQSKAALTDWLRAKASFVIEGLKEADKDEFCRCELKLQKWYGDLRGKPFAIEAENSILDISGFSKQYNCAFIWQKDGVKKLNLYLIINYFKGGKLRFKKIKPEAFEANRFYTVINKKSGEIVPMEVNFNFDDPNLIILPLAFGKRQGREFIWNDLLSLETGSLKLANGRVIEKTLYNRRTRQDEPALFVALTFERREVLDSSNIKPMNLIGVDRGENIPAVIALTDPEGCPLSRFKDSLGNPTHILRIGESYKEKQRTIQAKKEVEQRRAGGYSRKYASKAKNLADDMVRNTARDLLYYAVTQDAMLIFENLSRGFGRQGKRTFMAERQYTRMEDWLTAKLAYEGLASKTYLSKTLAQYTSKTCSNCGFTITSADYDRVLEKLKKTATGWMTTINGKELKVEGQITYYNRYKRQNVVKDLSVELDRLSEESVNNDISSWTKGRSGEALSLLKKRFSHRPVQEKFVCLNCGFETHADEQAALNIARSWLFLRSQEYKKYQTNKTTGNTDKRAFVETWQSFYRKKLKEVWKPAV

SEQ ID NO: 36148 - protein, 978 aa, synthetic construct
  REGION 1..978: note = engineered CasX variant
QEIKRINKIRRRLVKDSNTKKAGKTGPMKTLLVRVMTPDLRERLENLRKKPENIPQPISNTSRANLNKLLTDYTEMKKAILHVYWEEFQKDPVGLMSRVAQPASKKIDQNKLKPEMDEKGNLTTAGFACSQCGQPLFVYKLEQVSEKGKAYTNYFGRCNVAEHEKLILLAQLKPEKDSDEAVTYSLGKFGQRALDFYSIHVTKESTHPVKPLAQIAGNRYASTPVGKALSDACMGTIASFLSKYQDIIIEHQKVVKGNQKRLESLRELAGKENLEYPSVTLPPQPHTKEGVDAYNEVIARVRTWVNLNLWQKLKLSRDDAKPLLRLKGFPSFPLVERQANEVDWWDMVCNVKKLINEKKEDGKVFWQNLAGYKRQEALRPYLSSEEDRKKGKKFARYQLGDLLLHLEKKHGEDWGKVYDEAWERIDKKVEGLSKHIKLEEERRSEDAQSKAALTDWLRAKASFVIEGLKEADKDEFCRCELKLQKWYGDLRGKPFAIEAENSILDISGFSKQYNCAFIWQKDGVKKLNLYLIINYFKGGKLRFKKIKPEAFEANRFYTVINKKSGEIVPMEVNFNFDDPNLIILPLAFGKRQGREFIWNDLLSLETGSLKLANGRVIEKTLYNRRTRQDEPALFVALTFERREVLDSSNIKPMNLIGVDRGENIPAVIALTDPEGCPLSRFKDSLGNPTHILRIGESYKEKQRTIQAKKEVEQRRAGGYSRKYASKAKNLADDMVRNTARDLLYYAVTQDAMLIFENLSRGFGRQGKRTFMAERQYTRMEDWLTAKLAYEGLASKTYLSKTLAQYTSKTCSNCGFTITSADYDRVLEKLKKTATGWMTTINGKELKVEGQITYYNRYKRQNVVKDLSVELDRLSEESVNNDISSWTKGRSGEALSLLKKRFSHRPVQEKFVCLNCGFETHADEQAALNIARSWLFLRSQEYKKYQTNKTTGNTDKRAFVETWQSFYRKKLKEVWKPAV

SEQ ID NO: 36149 - protein, 978 aa, synthetic construct
  REGION 1..978: note = engineered CasX variant
QEIKRINKIRRRLVKDSNTKKAGKTGPMKTLLVRVMTPDLRERLENLRKKPENIPQPISNTSRANLNKLLTDYTEMKKAILHVYWEEFQKDPVGLMSRVAQPASKKIDQNKLKPEMDEKGNLTTAGFACSQCGQPLFVYKLEQVSEKGKAYTNYFGRCNVAEHEKLILLAQLKPEKDSDEAVTYSLGKFGQRALDFYSIHVTKESTHPVKPLAQIAGNRYASAPVGKALSDACMGTIASFLSKYQDIIIEHQKVVKGNQKRLESLRELAGKENLEYPSVTLPPQPHTKEGVDAYNEVIARVRTWVNLNLWQKLKLSRDDAKPLLRLKGFPSFPLVERQANEVDWWDMVCNVKKLINEKKEDGKVFWQNLAGYKRQEALRPYLSSEEDRKKGKKFARYQLGDLLLHLEKKHGEDWGKVYDEAWERIDKKVEGLSKHIKLEEERRSEDAQSKAALTDWLRAKASFVIEGLKEADKDEFCRCELKLQKWYGDLRGKPFAIEAENSILDISGFSKQYNCAFIWQKDGVKKLNLYLIINYFKGGKLRFKKIKPEAFEANRFYTVINKKSGEIVPMEVNFNFDDPNLIILPLAFGKRQGREFIWNDLLSLETGSLKLANGRVIEKTLYNRRTRQDEPALFVALTFERREVLDSSNIKPMNLIGVDRGENIPAVIALTDPEGCPLSRFKDSLGNPTHILRIGESYKEKQRTIQAKKEVEQRRAGGYSRKYASKAKNLADDMVRNTARDLLYYAVTQDAMLIFENLSRGFGRQGKRTFMAERQYTRMEDWLTAKLAYEGLASKTYLSKTLAQYTSKTCSNCGFTITSADYDRVLEKLKKTATGWMTTINGKELKVEGQITYYNRYKRQNVVKDLSVELDRLSEESVNNDISSWTKGRSGEALSLLKKRFSHRPVQEKFVCLNCGFETHADEQAALNIARSWLFLRSQEYKKYQTNKTTGNTDKRAFVETWQSFYRKKLKEVWKPAV

SEQ ID NO: 36150 - protein, 978 aa, synthetic construct
  REGION 1..978: note = engineered CasX variant
QEIKRINKIRRRLVKDSNTKKAGKTGPMKTLLVRVMTPDLRERLENLRKKPENIPQPISNTSRANLNKLLTDYTEMKKAILHVYWEEFQKDPVGLMSRVAQPASKKIDQNKLKPEMDEKGNLTTAGFACSQCGQPLFVYKLEQVSEKGKAYTNYFGRCNVAEHEKLILLAQLKPEKDSDEAVTYSLGKFGQRALDFYSIHVTKESTHPVKPLAQIAGNRYASVPVGKALSDACMGTIASFLSKYQDIIIEHQKVVKGNQKRLESLRELAGKENLEYPSVTLPPQPHTKEGVDAYNEVIARVRTWVNLNLWQKLKLSRDDAKPLLRLKGFPSFPLVERQANEVDWWDMVCNVKKLINEKKEDGKVFWQNLAGYKRQEALRPYLSSEEDRKKGKKFARYQLGDLLLHLEKKHGEDWGKVYDEAWERIDKKVEGLSKHIKLEEERRSEDAQSKAALTDWLRAKASFVIEGLKEADKDEFCRCELKLQKWYGDLRGKPFAIEAENSILDISGFSKQYNCAFIWQKDGVKKLNLYLIINYFKGGKLRFKKIKPEAFEANRFYTVINKKSGEIVPMEVNFNFDDPNLIILPLAFGKRQGREFIWNDLLSLETGSLKLANGRVIEKTLYNRRTRQDEPALFVALTFERREVLDSSNIKPMNLIGVDRGENIPAVIALTDPEGCPLSRFKDSLGNPTHILRIGESYKEKQRTIQAKKEVEQRRAGGYSRKYASKAKNLADDMVRNTARDLLYYAVTQDAMLIFENLSRGFGRQGKRTFMAERQYTRMEDWLTAKLAYEGLASKTYLSKTLAQYTSKTCSNCGFTITSADYDRVLEKLKKTATGWMTTINGKELKVEGQITYYNRYKRQNVVKDLSVELDRLSEESVNNDISSWTKGRSGEALSLLKKRFSHRPVQEKFVCLNCGFETHADEQAALNIARSWLFLRSQEYKKYQTNKTTGNTDKRAFVETWQSFYRKKLKEVWKPAV

SEQ ID NO: 36151 - protein, 978 aa, synthetic construct
  REGION 1..978: note = engineered CasX variant
QEIKRINKIRRRLVKDSNTKKAGKTGPMKTLLVRVMTPDLRERLENLRKKPENIPQPISNTSRANLNKLLTDYTEMKKAILHVYWEEFQKDPVGLMSRVAQPASKKIDQNKLKPEMDEKGNLTTAGFACSQCGQPLFVYKLEQVSEKGKAYTNYFGRCNVAEHEKLIKLAQLKPEKDSDEAVTYSLGKFGQRALDFYSIHVTKESTHPVKPLAQIAGNRYASGPVGKALSDACMGTIASFLSKYQDIIIEHQKVVKGNQKRLESLRELAGKENLEYPSVTLPPQPHTKEGVDAYNEVIARVRTWVNLNLWQKLKLSRDDAKPLLRLKGFPSFPLVERQANEVDWWDMVCNVKKLINEKKEDGKVFWQNLAGYKRQEALRPYLSSEEDRKKGKKFARYQLGDLLLHLEKKHGEDWGKVYDEAWERIDKKVEGLSKHIKLEEERRSEDAQSKAALTDWLRAKASFVIEGLKEADKDEFCRCELKLQKWYGDLRGKPFAIEAENSILDISGFSKQYNCAFIWQKDGVKKLNLYLIINYFKGGKLRFKKIKPEAFEANRFYTVINKKSGEIVPMEVNFNFDDPNLIILPLAFGKRQGREFIWNDLLSLETGSLKLANGRVIEKTLYNRRTRQDEPALFVALTFERREVLDSSNIKPMNLIGVDRGENIPAVIALTDPEGCPLSRFKDSLGNPTHILRIGESYKEKQRTIQAKKEVEQRRAGGYSRKYASKAKNLADDMVRNTARDLLYYAVTQDAMLIFENLSRGFGRQGKRTFMAERQYTRMEDWLTAKLAYEGLASKTYLSKTLAQYTSKTCSNCGFTITSADYDRVLEKLKKTATGWMTTINGKELKVEGQITYYNRYKRQNVVKDLSVELDRLSEESVNNDISSWTKGRSGEALSLLKKRFSHRPVQEKFVCLNCGFETHADEQAALNIARSWLFLRSQEYKKYQTNKTTGNTDKRAFVETWQSFYRKKLKEVWKPAV

SEQ ID NO: 36152 - protein, 977 aa, synthetic construct
  REGION 1..977: note = engineered CasX variant
QEIKRINKIRRRLVKDSNTKKAGKTGPMKTLLVRVMTPDLRERLENLRKKPENIPQPISNTSRANLNKLLTDYTEMKKAILHVYWEEFQKDPVGLMSRVAQPASKKIDQNKLKPEMDEKGNLTTAGFACSQCGQPLFVYKLEQVSEKGKAYTNYFGRCNVAEHEKLILLAQLKPEKDSDEAVTYSLGKFGQRALDFYSIHVTKESTHPVKPLAQIAGNRYASPVGKALSDACMGTIASFLSKYQDIIIEHQKVVKGNQKRLESLRELAGKENLEYPSVTLPPQPHTKEGVDAYNEVIARVRTWVNLNLWQKLKLSRDDAKPLLRLKGFPSFPLVERQANEVDWWDMVCNVKKLINEKKEDGKVFWQNLAGYKRQEALRPYLSSEEDRKKGKKFARYQLGDLLLHLEKKHGEDWGKVYDEAWERIDKKVEGLSKHIKLEEERRSEDAQSKAALTDWLRAKASFVIEGLKEADKDEFCRCELKLQKWYGDLRGKPFAIEAENSILDISGFSKQYNCAFIWQKDGVKKLNLYLIINYFKGGKLRFKKIKPEAFEANRFYTVINKKSGEIVPMEVNFNFDDPNLIILPLAFGKRQGREFIWNDLLSLETGSLKLANGRVIEKTLYNRRTRQDEPALFVALTFERREVLDSSNIKPMNLIGVDRGENIPAVIALTDPEGCPLSRFKDSLGNPTHILRIGESYKEKQRTIQAKKEVEQRRAGGYSRKYASKAKNLADDMVRNTARDLLYYAVTQDAMLIFENLSRGFGRQGKRTFMAERQYTRMEDWLTAKLAYEGLASKTYLSKTLAQYTSKTCSNCGFTITSADYDRVLEKLKKTATGWMTTINGKELKVEGQITYYNRYKRQNVVKDLSVELDRLSEESVNNDISSWTKGRSGEALSLLKKRFSHRPVQEKFVCLNCGFETHADEQAALNIARSWLFLRSQEYKKYQTNKTTGNTDKRAFVETWQSFYRKKLKEVWKPAV

SEQ ID NO: 36153 - protein, 978 aa, synthetic construct
  REGION 1..978: note = engineered CasX variant
QEIKRINKIRRRLVKDSNTKKAGKTGPMKTLLVRVMTPDLRERLENLRKKPENIPQPISNTSRANLNKLLTDYTEMKKAILHVYWEEFQKDPVGLMSRVAQPASKKIDQNKLKPEMDEKGNLTTAGFACSQCGQPLFVYKLEQVSEKGKAYTNYFGRCNVAEHEKLILLAQLKPEKDSDEAVTYSLGKFGQRALDFYSIHVTKESTHPVKPLAQIAGNRYASYPVGKALSDACMGTIASFLSKYQDIIIEHQKVVKGNQKRLESLRELAGKENLEYPSVTLPPQPHTKEGVDAYNEVIARVRTWVNLNLWQKLKLSRDDAKPLLRLKGFPSFPLVERQANEVDWWDMVCNVKKLINEKKEDGKVFWQNLAGYKRQEALRPYLSSEEDRKKGKKFARYQLGDLLLHLEKKHGEDWGKVYDEAWERIDKKVEGLSKHIKLEEERRSEDAQSKAALTDWLRAKASFVIEGLKEADKDEFCRCELKLQKWYGDLRGKPFAIEAENSILDISGFSKQYNCAFIWQKDGVKKLNLYLIINYFKGGKLRFKKIKPEAFEANRFYTVINKKSGEIVPMEVNFNFDDPNLIILPLAFGKRQGREFIWNDLLSLETGSLKLANGRVIEKTLYNRRTRQDEPALFVALTFERREVLDSSNIKPMNLIGVDRGENIPAVIALTDPEGCPLSRFKDSLGNPTHILRIGESYKEKQRTIQAKKEVEQRRAGGYSRKYASKAKNLADDMVRNTARDLLYYAVTQDAMLIFENLSRGFGRQGKRTFMAERQYTRMEDWLTAKLAYEGLPSKVYLSKTLAQYTSKTCSNCGFTITSADYDRVLEKLKKTATGWMTTINGKELKVEGQITYYNRYKRQNVVKDLSVELDRLSEESVNNDISSWTKGRSGEALSLLKKRFSHRPVQEKFVCLNCGFETHADEQAALNIARSWLFLRSQEYKKYQTNKTTGNTDKRAFVETWQSFYRKKLKEVWKPAV

SEQ ID NO: 36154 - protein, 978 aa, synthetic construct
  REGION 1..978: note = engineered CasX variant
QEIKRINKIRRRLVKDSNTKKAGKTGPMKTLLVRVMTPDLRERLENLRKKPENIPQPISNTSRANLNKLLTDYTEMKKAILHVYWEEFQKDPVGLMSRVAQPASKKIDQNKLKPEMDEKGNLTTAGFACSQCGQPLFVYKLEQVSEKGKAYTNYFGRCNVAEHEKLILLAQLKPEKDSDEAVTYSLGKFGQRALDFYSIHVTKESTHPVKPLAQIAGNRYASHPVGKALSDACMGTIASFLSKYQDIIIEHQKVVKGNQKRLESLRELAGKENLEYPSVTLPPQPHTKEGVDAYNEVIARVRTWVNLNLWQKLKLSRDDAKPLLRLKGFPSFPLVERQANEVDWWDMVCNVKKLINEKKEDGKVFWQNLAGYKRQEALRPYLSSEEDRKKGKKFARYQLGDLLLHLEKKHGEDWGKVYDEAWERIDKKVEGLSKHIKLEEERRSEDAQSKAALTDWLRAKASFVIEGLKEADKDEFCRCELKLQKWYGDLRGKPFAIEAENSILDISGFSKQYNCAFIWQKDGVKKLNLYLIINYFKGGKLRFKKIKPEAFEANRFYTVINKKSGEIVPMEVNFNFDDPNLIILPLAFGKRQGREFIWNDLLSLETGSLKLANGRVIEKTLYNRRTRQDEPALFVALTFERREVLDSSNIKPMNLIGVDRGENIPAVIALTDPEGCPLSRFKDSLGNPTHILRIGESYKEKQRTIQAKKEVEQRRAGGYSRKYASKAKNLADDMVRNTARDLLYYAVTQDAMLIFENLSRGFGRQGKRTFMAERQYTRMEDWLTAKLAYEGLPSKVYLSKTLAQYTSKTCSNCGFTITSADYDRVLEKLKKTATGWMTTINGKELKVEGQITYYNRYKRQNVVKDLSVELDRLSEESVNNDISSWTKGRSGEALSLLKKRFSHRPVQEKFVCLNCGFETHADEQAALNIARSWLFLRSQEYKKYQTNKTTGNTDKRAFVETWQSFYRKKLKEVWKPAV

SEQ ID NO: 36155 - protein, 978 aa, synthetic construct
  REGION 1..978: note = engineered CasX variant
QEIKRINKIRRRLVKDSNTKKAGKTGPMKTLLVRVMTPDLRERLENLRKKPENIPQPISNTSRANLNKLLTDYTEMKKAILHVYWEEFQKDPVGLMSRVAQPASKKIDQNKLKPEMDEKGNLTTAGFACSQCGQPLFVYKLEQVSEKGKAYTNYFGRCNVAEHEKLILLAQLKPEKDSDEAVTYSLGKFGQRALDFYSIHVTKESTHPVKPLAQIAGNRYASSPVGKALSDACMGTIASFLSKYQDIIIEHQKVVKGNQKRLESLRELAGKENLEYPSVTLPPQPHTKEGVDAYNEVIARVRTWVNLNLWQKLKLSRDDAKPLLRLKGFPSFPLVERQANEVDWWDMVCNVKKLINEKKEDGKVFWQNLAGYKRQEALRPYLSSEEDRKKGKKFARYQLGDLLLHLEKKHGEDWGKVYDEAWERIDKKVEGLSKHIKLEEERRSEDAQSKAALTDWLRAKASFVIEGLKEADKDEFCRCELKLQKWYGDLRGKPFAIEAENSILDISGFSKQYNCAFIWQKDGVKKLNLYLIINYFKGGKLRFKKIKPEAFEANRFYTVINKKSGEIVPMEVNFNFDDPNLIILPLAFGKRQGREFIWNDLLSLETGSLKLANGRVIEKTLYNRRTRQDEPALFVALTFERREVLDSSNIKPMNLIGVDRGENIPAVIALTDPEGCPLSRFKDSLGNPTHILRIGESYKEKQRTIQAKKEVEQRRAGGYSRKYASKAKNLADDMVRNTARDLLYYAVTQDAMLIFENLSRGFGRQGKRTFMAERQYTRMEDWLTAKLAYEGLPSKVYLSKTLAQYTSKTCSNCGFTITSADYDRVLEKLKKTATGWMTTINGKELKVEGQITYYNRYKRQNVVKDLSVELDRLSEESVNNDISSWTKGRSGEALSLLKKRFSHRPVQEKFVCLNCGFETHADEQAALNIARSWLFLRSQEYKKYQTNKTTGNTDKRAFVETWQSFYRKKLKEVWKPAV

SEQ ID NO: 36156 - protein, 978 aa, synthetic construct
  REGION 1..978: note = engineered CasX variant
QEIKRINKIRRRLVKDSNTKKAGKTGPMKTLLVRVMTPDLRERLENLRKKPENIPQPISNTSRANLNKLLTDYTEMKKAILHVYWEEFQKDPVGLMSRVAQPASKKIDQNKLKPEMDEKGNLTTAGFACSQCGQPLFVYKLEQVSEKGKAYTNYFGRCNVAEHEKLILLAQLKPEKDSDEAVTYSLGKFGQRALDFYSIHVTKESTHPVKPLAQIAGNRYASTPVGKALSDACMGTIASFLSKYQDIIIEHQKVVKGNQKRLESLRELAGKENLEYPSVTLPPQPHTKEGVDAYNEVIARVRTWVNLNLWQKLKLSRDDAKPLLRLKGFPSFPLVERQANEVDWWDMVCNVKKLINEKKEDGKVFWQNLAGYKRQEALRPYLSSEEDRKKGKKFARYQLGDLLLHLEKKHGEDWGKVYDEAWERIDKKVEGLSKHIKLEEERRSEDAQSKAALTDWLRAKASFVIEGLKEADKDEFCRCELKLQKWYGDLRGKPFAIEAENSILDISGFSKQYNCAFIWQKDGVKKLNLYLIINYFKGGKLRFKKIKPEAFEANRFYTVINKKSGEIVPMEVNFNFDDPNLIILPLAFGKRQGREFIWNDLLSLETGSLKLANGRVIEKTLYNRRTRQDEPALFVALTFERREVLDSSNIKPMNLIGVDRGENIPAVIALTDPEGCPLSRFKDSLGNPTHILRIGESYKEKQRTIQAKKEVEQRRAGGYSRKYASKAKNLADDMVRNTARDLLYYAVTQDAMLIFENLSRGFGRQGKRTFMAERQYTRMEDWLTAKLAYEGLPSKVYLSKTLAQYTSKTCSNCGFTITSADYDRVLEKLKKTATGWMTTINGKELKVEGQITYYNRYKRQNVVKDLSVELDRLSEESVNNDISSWTKGRSGEALSLLKKRFSHRPVQEKFVCLNCGFETHADEQAALNIARSWLFLRSQEYKKYQTNKTTGNTDKRAFVETWQSFYRKKLKEVWKPAV

SEQ ID NO: 36157 - protein, 978 aa, synthetic construct
  REGION 1..978: note = engineered CasX variant
QEIKRINKIRRRLVKDSNTKKAGKTGPMKTLLVRVMTPDLRERLENLRKKPENIPQPISNTSRANLNKLLTDYTEMKKAILHVYWEEFQKDPVGLMSRVAQPASKKIDQNKLKPEMDEKGNLTTAGFACSQCGQPLFVYKLEQVSEKGKAYTNYFGRCNVAEHEKLILLAQLKPEKDSDEAVTYSLGKFGQRALDFYSIHVTKESTHPVKPLAQIAGNRYASAPVGKALSDACMGTIASFLSKYQDIIIEHQKVVKGNQKRLESLRELAGKENLEYPSVTLPPQPHTKEGVDAYNEVIARVRTWVNLNLWQKLKLSRDDAKPLLRLKGFPSFPLVERQANEVDWWDMVCNVKKLINEKKEDGKVFWQNLAGYKRQEALRPYLSSEEDRKKGKKFARYQLGDLLLHLEKKHGEDWGKVYDEAWERIDKKVEGLSKHIKLEEERRSEDAQSKAALTDWLRAKASFVIEGLKEADKDEFCRCELKLQKWYGDLRGKPFAIEAENSILDISGFSKQYNCAFIWQKDGVKKLNLYLIINYFKGGKLRFKKIKPEAFEANRFYTVINKKSGEIVPMEVNFNFDDPNLIILPLAFGKRQGREFIWNDLLSLETGSLKLANGRVIEKTLYNRRTRQDEPALFVALTFERREVLDSSNIKPMNLIGVDRGENIPAVIALTDPEGCPLSRFKDSLGNPTHILRIGESYKEKQRTIQAKKEVEQRRAGGYSRKYASKAKNLADDMVRNTARDLLYYAVTQDAMLIFENLSRGFGRQGKRTFMAERQYTRMEDWLTAKLAYEGLPSKVYLSKTLAQYTSKTCSNCGFTITSADYDRVLEKLKKTATGWMTTINGKELKVEGQITYYNRYKRQNVVKDLSVELDRLSEESVNNDISSWTKGRSGEALSLLKKRFSHRPVQEKFVCLNCGFETHADEQAALNIARSWLFLRSQEYKKYQTNKTTGNTDKRAFVETWQSFYRKKLKEVWKPAV

SEQ ID NO: 36158 - protein, 978 aa, synthetic construct
  REGION 1..978: note = engineered CasX variant
QEIKRINKIRRRLVKDSNTKKAGKTGPMKTLLVRVMTPDLRERLENLRKKPENIPQPISNTSRANLNKLLTDYTEMKKAILHVYWEEFQKDPVGLMSRVAQPASKKIDQNKLKPEMDEKGNLTTAGFACSQCGQPLFVYKLEQVSEKGKAYTNYFGRCNVAEHEKLILLAQLKPEKDSDEAVTYSLGKFGQRALDFYSIHVTKESTHPVKPLAQIAGNRYASVPVGKALSDACMGTIASFLSKYQDIIIEHQKVVKGNQKRLESLRELAGKENLEYPSVTLPPQPHTKEGVDAYNEVIARVRTWVNLNLWQKLKLSRDDAKPLLRLKGFPSFPLVERQANEVDWWDMVCNVKKLINEKKEDGKVFWQNLAGYKRQEALRPYLSSEEDRKKGKKFARYQLGDLLLHLEKKHGEDWGKVYDEAWERIDKKVEGLSKHIKLEEERRSEDAQSKAALTDWLRAKASFVIEGLKEADKDEFCRCELKLQKWYGDLRGKPFAIEAENSILDISGFSKQYNCAFIWQKDGVKKLNLYLIINYFKGGKLRFKKIKPEAFEANRFYTVINKKSGEIVPMEVNFNFDDPNLIILPLAFGKRQGREFIWNDLLSLETGSLKLANGRVIEKTLYNRRTRQDEPALFVALTFERREVLDSSNIKPMNLIGVDRGENIPAVIALTDPEGCPLSRFKDSLGNPTHILRIGESYKEKQRTIQAKKEVEQRRAGGYSRKYASKAKNLADDMVRNTARDLLYYAVTQDAMLIFENLSRGFGRQGKRTFMAERQYTRMEDWLTAKLAYEGLPSKVYLSKTLAQYTSKTCSNCGFTITSADYDRVLEKLKKTATGWMTTINGKELKVEGQITYYNRYKRQNVVKDLSVELDRLSEESVNNDISSWTKGRSGEALSLLKKRFSHRPVQEKFVCLNCGFETHADEQAALNIARSWLFLRSQEYKKYQTNKTTGNTDKRAFVETWQSFYRKKLKEVWKPAV

SEQ ID NO: 36159 - protein, 978 aa, synthetic construct
  REGION 1..978: note = engineered CasX variant
QEIKRINKIRRRLVKDSNTKKAGKTGPMKTLLVRVMTPDLRERLENLRKKPENIPQPISNTSRANLNKLLTDYTEMKKAILHVYWEEFQKDPVGLMSRVAQPASKKIDQNKLKPEMDEKGNLTTAGFACSQCGQPLFVYKLEQVSEKGKAYTNYFGRCNVAEHEKLIKLAQLKPEKDSDEAVTYSLGKFGQRALDFYSIHVTKESTHPVKPLAQIAGNRYASGPVGKALSDACMGTIASFLSKYQDIIIEHQKVVKGNQKRLESLRELAGKENLEYPSVTLPPQPHTKEGVDAYNEVIARVRTWVNLNLWQKLKLSRDDAKPLLRLKGFPSFPLVERQANEVDWWDMVCNVKKLINEKKEDGKVFWQNLAGYKRQEALRPYLSSEEDRKKGKKFARYQLGDLLLHLEKKHGEDWGKVYDEAWERIDKKVEGLSKHIKLEEERRSEDAQSKAALTDWLRAKASFVIEGLKEADKDEFCRCELKLQKWYGDLRGKPFAIEAENSILDISGFSKQYNCAFIWQKDGVKKLNLYLIINYFKGGKLRFKKIKPEAFEANRFYTVINKKSGEIVPMEVNFNFDDPNLIILPLAFGKRQGREFIWNDLLSLETGSLKLANGRVIEKTLYNRRTRQDEPALFVALTFERREVLDSSNIKPMNLIGVDRGENIPAVIALTDPEGCPLSRFKDSLGNPTHILRIGESYKEKQRTIQAKKEVEQRRAGGYSRKYASKAKNLADDMVRNTARDLLYYAVTQDAMLIFENLSRGFGRQGKRTFMAERQYTRMEDWLTAKLAYEGLPSKVYLSKTLAQYTSKTCSNCGFTITSADYDRVLEKLKKTATGWMTTINGKELKVEGQITYYNRYKRQNVVKDLSVELDRLSEESVNNDISSWTKGRSGEALSLLKKRFSHRPVQEKFVCLNCGFETHADEQAALNIARSWLFLRSQEYKKYQTNKTTGNTDKRAFVETWQSFYRKKLKEVWKPAV

SEQ ID NO: 36160 - protein, 977 aa, synthetic construct
  REGION 1..977: note = engineered CasX variant
QEIKRINKIRRRLVKDSNTKKAGKTGPMKTLLVRVMTPDLRERLENLRKKPENIPQPISNTSRANLNKLLTDYTEMKKAILHVYWEEFQKDPVGLMSRVAQPASKKIDQNKLKPEMDEKGNLTTAGFACSQCGQPLFVYKLEQVSEKGKAYTNYFGRCNVAEHEKLILLAQLKPEKDSDEAVTYSLGKFGQRALDFYSIHVTKESTHPVKPLAQIAGNRYASPVGKALSDACMGTIASFLSKYQDIIIEHQKVVKGNQKRLESLRELAGKENLEYPSVTLPPQPHTKEGVDAYNEVIARVRTWVNLNLWQKLKLSRDDAKPLLRLKGFPSFPLVERQANEVDWWDMVCNVKKLINEKKEDGKVFWQNLAGYKRQEALRPYLSSEEDRKKGKKFARYQLGDLLLHLEKKHGEDWGKVYDEAWERIDKKVEGLSKHIKLEEERRSEDAQSKAALTDWLRAKASFVIEGLKEADKDEFCRCELKLQKWYGDLRGKPFAIEAENSILDISGFSKQYNCAFIWQKDGVKKLNLYLIINYFKGGKLRFKKIKPEAFEANRFYTVINKKSGEIVPMEVNFNFDDPNLIILPLAFGKRQGREFIWNDLLSLETGSLKLANGRVIEKTLYNRRTRQDEPALFVALTFERREVLDSSNIKPMNLIGVDRGENIPAVIALTDPEGCPLSRFKDSLGNPTHILRIGESYKEKQRTIQAKKEVEQRRAGGYSRKYASKAKNLADDMVRNTARDLLYYAVTQDAMLIFENLSRGFGRQGKRTFMAERQYTRMEDWLTAKLAYEGLPSKVYLSKTLAQYTSKTCSNCGFTITSADYDRVLEKLKKTATGWMTTINGKELKVEGQITYYNRYKRQNVVKDLSVELDRLSEESVNNDISSWTKGRSGEALSLLKKRFSHRPVQEKFVCLNCGFETHADEQAALNIARSWLFLRSQEYKKYQTNKTTGNTDKRAFVETWQSFYRKKLKEVWKPAV

SEQ ID NO: 36161 - protein, 979 aa, synthetic construct
  REGION 1..979: note = engineered CasX variant
QEIKRINKIRRRLVKDSNTKKAGKTGPMKTLLVRVMTPDLRERLENLRKKPENIPQPISNTSRANLNKLLTDYTEMKKAILHVYWEEFQKDPVGLMSRVAQPASKKIDQNKLKPEMDEKGNLTTAGFACSQCGQPLFVYKLEQVSEKGKAYTNYFGRCNVAEHEKLILLAQLKPEKDSDEAVTYSLGKFGQRALDFYSIHVTKESTHPVKPLAQIAGNRYASYPVGKALSDACMGTIASFLSKYQDIIIEHQKVVKGNQKRLESLRELAGKENLEYPSVTLPPQPHTKEGVDAYNEVIARVRTWVNLNLWQKLKLSRDDAKPLLRLKGFPSFPLVERQANEVDWWDMVCNVKKLINEKKEDGKVFWQNLAGYKRQEALRPYLSSEEDRKKGKKFARYQLGDLLLHLEKKHGEDWGKVYDEAWERIDKKVEGLSKHIKLEEERRSEDAQSKAALTDWLRAKASFVIEGLKEADKDEFCRCELKLQKWYGDLRGKPFAIEAENSILDISGFSKQYNCAFIWQKDGVKKLNLYLIINYFKGGKLRFKKIKPEAFEANRFYTVINKKSGEIVPMEVNFNFDDPNLIILPLAFGKRQGREFIWNDLLSLETGSLKLANGRVIEKTLYNRRTRQDEPALFVALTFERREVLDSSNIKPMNLIGVDRGENIPAVIALTDPEGCPLSRFKDSLGNPTHILRIGESYKEKQRTIQAKKEVEQRRAGGYSRKYASKAKNLADDMVRNTARDLLYYAVTQDAMLIFENLSRGFGRQGKRTFMAERQYTRMEDWLTAKLAYEGPLPSKTYLSKTLAQYTSKTCSNCGFTITSADYDRVLEKLKKTATGWMTTINGKELKVEGQITYYNRYKRQNVVKDLSVELDRLSEESVNNDISSWTKGRSGEALSLLKKRFSHRPVQEKFVCLNCGFETHADEQAALNIARSWLFLRSQEYKKYQTNKTTGNTDKRAFVETWQSFYRKKLKEVWKPAV

SEQ ID NO: 36162 - protein, 979 aa, synthetic construct
  REGION 1..979: note = engineered CasX variant
QEIKRINKIRRRLVKDSNTKKAGKTGPMKTLLVRVMTPDLRERLENLRKKPENIPQPISNTSRANLNKLLTDYTEMKKAILHVYWEEFQKDPVGLMSRVAQPASKKIDQNKLKPEMDEKGNLTTAGFACSQCGQPLFVYKLEQVSEKGKAYTNYFGRCNVAEHEKLILLAQLKPEKDSDEAVTYSLGKFGQRALDFYSIHVTKESTHPVKPLAQIAGNRYASHPVGKALSDACMGTIASFLSKYQDIIIEHQKVVKGNQKRLESLRELAGKENLEYPSVTLPPQPHTKEGVDAYNEVIARVRTWVNLNLWQKLKLSRDDAKPLLRLKGFPSFPLVERQANEVDWWDMVCNVKKLINEKKEDGKVFWQNLAGYKRQEALRPYLSSEEDRKKGKKFARYQLGDLLLHLEKKHGEDWGKVYDEAWERIDKKVEGLSKHIKLEEERRSEDAQSKAALTDWLRAKASFVIEGLKEADKDEFCRCELKLQKWYGDLRGKPFAIEAENSILDISGFSKQYNCAFIWQKDGVKKLNLYLIINYFKGGKLRFKKIKPEAFEANRFYTVINKKSGEIVPMEVNFNFDDPNLIILPLAFGKRQGREFIWNDLLSLETGSLKLANGRVIEKTLYNRRTRQDEPALFVALTFERREVLDSSNIKPMNLIGVDRGENIPAVIALTDPEGCPLSRFKDSLGNPTHILRIGESYKEKQRTIQAKKEVEQRRAGGYSRKYASKAKNLADDMVRNTARDLLYYAVTQDAMLIFENLSRGFGRQGKRTFMAERQYTRMEDWLTAKLAYEGPLPSKTYLSKTLAQYTSKTCSNCGFTITSADYDRVLEKLKKTATGWMTTINGKELKVEGQITYYNRYKRQNVVKDLSVELDRLSEESVNNDISSWTKGRSGEALSLLKKRFSHRPVQEKFVCLNCGFETHADEQAALNIARSWLFLRSQEYKKYQTNKTTGNTDKRAFVETWQSFYRKKLKEVWKPAV

SEQ ID NO: 36163 - protein, 979 aa, synthetic construct
  REGION 1..979: note = engineered CasX variant
QEIKRINKIRRRLVKDSNTKKAGKTGPMKTLLVRVMTPDLRERLENLRKKPENIPQPISNTSRANLNKLLTDYTEMKKAILHVYWEEFQKDPVGLMSRVAQPASKKIDQNKLKPEMDEKGNLTTAGFACSQCGQPLFVYKLEQVSEKGKAYTNYFGRCNVAEHEKLILLAQLKPEKDSDEAVTYSLGKFGQRALDFYSIHVTKESTHPVKPLAQIAGNRYASSPVGKALSDACMGTIASFLSKYQDIIIEHQKVVKGNQKRLESLRELAGKENLEYPSVTLPPQPHTKEGVDAYNEVIARVRTWVNLNLWQKLKLSRDDAKPLLRLKGFPSFPLVERQANEVDWWDMVCNVKKLINEKKEDGKVFWQNLAGYKRQEALRPYLSSEEDRKKGKKFARYQLGDLLLHLEKKHGEDWGKVYDEAWERIDKKVEGLSKHIKLEEERRSEDAQSKAALTDWLRAKASFVIEGLKEADKDEFCRCELKLQKWYGDLRGKPFAIEAENSILDISGFSKQYNCAFIWQKDGVKKLNLYLIINYFKGGKLRFKKIKPEAFEANRFYTVINKKSGEIVPMEVNFNFDDPNLIILPLAFGKRQGREFIWNDLLSLETGSLKLANGRVIEKTLYNRRTRQDEPALFVALTFERREVLDSSNIKPMNLIGVDRGENIPAVIALTDPEGCPLSRFKDSLGNPTHILRIGESYKEKQRTIQAKKEVEQRRAGGYSRKYASKAKNLADDMVRNTARDLLYYAVTQDAMLIFENLSRGFGRQGKRTFMAERQYTRMEDWLTAKLAYEGPLPSKTYLSKTLAQYTSKTCSNCGFTITSADYDRVLEKLKKTATGWMTTINGKELKVEGQITYYNRYKRQNVVKDLSVELDRLSEESVNNDISSWTKGRSGEALSLLKKRFSHRPVQEKFVCLNCGFETHADEQAALNIARSWLFLRSQEYKKYQTNKTTGNTDKRAFVETWQSFYRKKLKEVWKPAV

SEQ ID NO: 36164 - protein, 979 aa, synthetic construct
  REGION 1..979: note = engineered CasX variant
QEIKRINKIRRRLVKDSNTKKAGKTGPMKTLLVRVMTPDLRERLENLRKKPENIPQPISNTSRANLNKLLTDYTEMKKAILHVYWEEFQKDPVGLMSRVAQPASKKIDQNKLKPEMDEKGNLTTAGFACSQCGQPLFVYKLEQVSEKGKAYTNYFGRCNVAEHEKLILLAQLKPEKDSDEAVTYSLGKFGQRALDFYSIHVTKESTHPVKPLAQIAGNRYASTPVGKALSDACMGTIASFLSKYQDIIIEHQKVVKGNQKRLESLRELAGKENLEYPSVTLPPQPHTKEGVDAYNEVIARVRTWVNLNLWQKLKLSRDDAKPLLRLKGFPSFPLVERQANEVDWWDMVCNVKKLINEKKEDGKVFWQNLAGYKRQEALRPYLSSEEDRKKGKKFARYQLGDLLLHLEKKHGEDWGKVYDEAWERIDKKVEGLSKHIKLEEERRSEDAQSKAALTDWLRAKASFVIEGLKEADKDEFCRCELKLQKWYGDLRGKPFAIEAENSILDISGFSKQYNCAFIWQKDGVKKLNLYLIINYFKGGKLRFKKIKPEAFEANRFYTVINKKSGEIVPMEVNFNFDDPNLIILPLAFGKRQGREFIWNDLLSLETGSLKLANGRVIEKTLYNRRTRQDEPALFVALTFERREVLDSSNIKPMNLIGVDRGENIPAVIALTDPEGCPLSRFKDSLGNPTHILRIGESYKEKQRTIQAKKEVEQRRAGGYSRKYASKAKNLADDMVRNTARDLLYYAVTQDAMLIFENLSRGFGRQGKRTFMAERQYTRMEDWLTAKLAYEGPLPSKTYLSKTLAQYTSKTCSNCGFTITSADYDRVLEKLKKTATGWMTTINGKELKVEGQITYYNRYKRQNVVKDLSVELDRLSEESVNNDISSWTKGRSGEALSLLKKRFSHRPVQEKFVCLNCGFETHADEQAALNIARSWLFLRSQEYKKYQTNKTTGNTDKRAFVETWQSFYRKKLKEVWKPAV

SEQ ID NO: 36165 - protein, 979 aa, synthetic construct
  REGION 1..979: note = engineered CasX variant
QEIKRINKIRRRLVKDSNTKKAGKTGPMKTLLVRVMTPDLRERLENLRKKPENIPQPISNTSRANLNKLLTDYTEMKKAILHVYWEEFQKDPVGLMSRVAQPASKKIDQNKLKPEMDEKGNLTTAGFACSQCGQPLFVYKLEQVSEKGKAYTNYFGRCNVAEHEKLILLAQLKPEKDSDEAVTYSLGKFGQRALDFYSIHVTKESTHPVKPLAQIAGNRYASAPVGKALSDACMGTIASFLSKYQDIIIEHQKVVKGNQKRLESLRELAGKENLEYPSVTLPPQPHTKEGVDAYNEVIARVRTWVNLNLWQKLKLSRDDAKPLLRLKGFPSFPLVERQANEVDWWDMVCNVKKLINEKKEDGKVFWQNLAGYKRQEALRPYLSSEEDRKKGKKFARYQLGDLLLHLEKKHGEDWGKVYDEAWERIDKKVEGLSKHIKLEEERRSEDAQSKAALTDWLRAKASFVIEGLKEADKDEFCRCELKLQKWYGDLRGKPFAIEAENSILDISGFSKQYNCAFIWQKDGVKKLNLYLIINYFKGGKLRFKKIKPEAFEANRFYTVINKKSGEIVPMEVNFNFDDPNLIILPLAFGKRQGREFIWNDLLSLETGSLKLANGRVIEKTLYNRRTRQDEPALFVALTFERREVLDSSNIKPMNLIGVDRGENIPAVIALTDPEGCPLSRFKDSLGNPTHILRIGESYKEKQRTIQAKKEVEQRRAGGYSRKYASKAKNLADDMVRNTARDLLYYAVTQDAMLIFENLSRGFGRQGKRTFMAERQYTRMEDWLTAKLAYEGPLPSKTYLSKTLAQYTSKTCSNCGFTITSADYDRVLEKLKKTATGWMTTINGKELKVEGQITYYNRYKRQNVVKDLSVELDRLSEESVNNDISSWTKGRSGEALSLLKKRFSHRPVQEKFVCLNCGFETHADEQAALNIARSWLFLRSQEYKKYQTNKTTGNTDKRAFVETWQSFYRKKLKEVWKPAV

SEQ ID NO: 36166 - protein, 979 aa, synthetic construct
  REGION 1..979: note = engineered CasX variant
QEIKRINKIRRRLVKDSNTKKAGKTGPMKTLLVRVMTPDLRERLENLRKKPENIPQPISNTSRANLNKLLTDYTEMKKAILHVYWEEFQKDPVGLMSRVAQPASKKIDQNKLKPEMDEKGNLTTAGFACSQCGQPLFVYKLEQVSEKGKAYTNYFGRCNVAEHEKLILLAQLKPEKDSDEAVTYSLGKFGQRALDFYSIHVTKESTHPVKPLAQIAGNRYASVPVGKALSDACMGTIASFLSKYQDIIIEHQKVVKGNQKRLESLRELAGKENLEYPSVTLPPQPHTKEGVDAYNEVIARVRTWVNLNLWQKLKLSRDDAKPLLRLKGFPSFPLVERQANEVDWWDMVCNVKKLINEKKEDGKVFWQNLAGYKRQEALRPYLSSEEDRKKGKKFARYQLGDLLLHLEKKHGEDWGKVYDEAWERIDKKVEGLSKHIKLEEERRSEDAQSKAALTDWLRAKASFVIEGLKEADKDEFCRCELKLQKWYGDLRGKPFAIEAENSILDISGFSKQYNCAFIWQKDGVKKLNLYLIINYFKGGKLRFKKIKPEAFEANRFYTVINKKSGEIVPMEVNFNFDDPNLIILPLAFGKRQGREFIWNDLLSLETGSLKLANGRVIEKTLYNRRTRQDEPALFVALTFERREVLDSSNIKPMNLIGVDRGENIPAVIALTDPEGCPLSRFKDSLGNPTHILRIGESYKEKQRTIQAKKEVEQRRAGGYSRKYASKAKNLADDMVRNTARDLLYYAVTQDAMLIFENLSRGFGRQGKRTFMAERQYTRMEDWLTAKLAYEGPLPSKTYLSKTLAQYTSKTCSNCGFTITSADYDRVLEKLKKTATGWMTTINGKELKVEGQITYYNRYKRQNVVKDLSVELDRLSEESVNNDISSWTKGRSGEALSLLKKRFSHRPVQEKFVCLNCGFETHADEQAALNIARSWLFLRSQEYKKYQTNKTTGNTDKRAFVETWQSFYRKKLKEVWKPAV

SEQ ID NO: 36167 - protein, 979 aa, synthetic construct
  REGION 1..979: note = engineered CasX variant
QEIKRINKIRRRLVKDSNTKKAGKTGPMKTLLVRVMTPDLRERLENLRKKPENIPQPISNTSRANLNKLLTDYTEMKKAILHVYWEEFQKDPVGLMSRVAQPASKKIDQNKLKPEMDEKGNLTTAGFACSQCGQPLFVYKLEQVSEKGKAYTNYFGRCNVAEHEKLIKLAQLKPEKDSDEAVTYSLGKFGQRALDFYSIHVTKESTHPVKPLAQIAGNRYASGPVGKALSDACMGTIASFLSKYQDIIIEHQKVVKGNQKRLESLRELAGKENLEYPSVTLPPQPHTKEGVDAYNEVIARVRTWVNLNLWQKLKLSRDDAKPLLRLKGFPSFPLVERQANEVDWWDMVCNVKKLINEKKEDGKVFWQNLAGYKRQEALRPYLSSEEDRKKGKKFARYQLGDLLLHLEKKHGEDWGKVYDEAWERIDKKVEGLSKHIKLEEERRSEDAQSKAALTDWLRAKASFVIEGLKEADKDEFCRCELKLQKWYGDLRGKPFAIEAENSILDISGFSKQYNCAFIWQKDGVKKLNLYLIINYFKGGKLRFKKIKPEAFEANRFYTVINKKSGEIVPMEVNFNFDDPNLIILPLAFGKRQGREFIWNDLLSLETGSLKLANGRVIEKTLYNRRTRQDEPALFVALTFERREVLDSSNIKPMNLIGVDRGENIPAVIALTDPEGCPLSRFKDSLGNPTHILRIGESYKEKQRTIQAKKEVEQRRAGGYSRKYASKAKNLADDMVRNTARDLLYYAVTQDAMLIFENLSRGFGRQGKRTFMAERQYTRMEDWLTAKLAYEGPLPSKTYLSKTLAQYTSKTCSNCGFTITSADYDRVLEKLKKTATGWMTTINGKELKVEGQITYYNRYKRQNVVKDLSVELDRLSEESVNNDISSWTKGRSGEALSLLKKRFSHRPVQEKFVCLNCGFETHADEQAALNIARSWLFLRSQEYKKYQTNKTTGNTDKRAFVETWQSFYRKKLKEVWKPAV

SEQ ID NO: 36168 - protein, 978 aa, synthetic construct
  REGION 1..978: note = engineered CasX variant
QEIKRINKIRRRLVKDSNTKKAGKTGPMKTLLVRVMTPDLRERLENLRKKPENIPQPISNTSRANLNKLLTDYTEMKKAILHVYWEEFQKDPVGLMSRVAQPASKKIDQNKLKPEMDEKGNLTTAGFACSQCGQPLFVYKLEQVSEKGKAYTNYFGRCNVAEHEKLILLAQLKPEKDSDEAVTYSLGKFGQRALDFYSIHVTKESTHPVKPLAQIAGNRYASPVGKALSDACMGTIASFLSKYQDIIIEHQKVVKGNQKRLESLRELAGKENLEYPSVTLPPQPHTKEGVDAYNEVIARVRTWVNLNLWQKLKLSRDDAKPLLRLKGFPSFPLVERQANEVDWWDMVCNVKKLINEKKEDGKVFWQNLAGYKRQEALRPYLSSEEDRKKGKKFARYQLGDLLLHLEKKHGEDWGKVYDEAWERIDKKVEGLSKHIKLEEERRSEDAQSKAALTDWLRAKASFVIEGLKEADKDEFCRCELKLQKWYGDLRGKPFAIEAENSILDISGFSKQYNCAFIWQKDGVKKLNLYLIINYFKGGKLRFKKIKPEAFEANRFYTVINKKSGEIVPMEVNFNFDDPNLIILPLAFGKRQGREFIWNDLLSLETGSLKLANGRVIEKTLYNRRTRQDEPALFVALTFERREVLDSSNIKPMNLIGVDRGENIPAVIALTDPEGCPLSRFKDSLGNPTHILRIGESYKEKQRTIQAKKEVEQRRAGGYSRKYASKAKNLADDMVRNTARDLLYYAVTQDAMLIFENLSRGFGRQGKRTFMAERQYTRMEDWLTAKLAYEGPLPSKTYLSKTLAQYTSKTCSNCGFTITSADYDRVLEKLKKTATGWMTTINGKELKVEGQITYYNRYKRQNVVKDLSVELDRLSEESVNNDISSWTKGRSGEALSLLKKRFSHRPVQEKFVCLNCGFETHADEQAALNIARSWLFLRSQEYKKYQTNKTTGNTDKRAFVETWQSFYRKKLKEVWKPAV

SEQ ID NO: 36169 - protein, 979 aa, synthetic construct
  REGION 1..979: note = engineered CasX variant
QEIKRINKIRRRLVKDSNTKKAGKTGPMKTLLVRVMTPDLRERLENLRKKPENIPQPISNTSRANLNKLLTDYTEMKKAILHVYWEEFQKDPVGLMSRVAQPASKKIDQNKLKPEMDEKGNLTTAGFACSQCGQPLFVYKLEQVSEKGKAYTNYFGRCNVAEHEKLILLAQLKPEKDSDEAVTYSLGKFGQRALDFYSIHVTKESTHPVKPLAQIAGNRYASYPVGKALSDACMGTIASFLSKYQDIIIEHQKVVKGNQKRLESLRELAGKENLEYPSVTLPPQPHTKEGVDAYNEVIARVRTWVNLNLWQKLKLSRDDAKPLLRLKGFPSFPLVERQANEVDWWDMVCNVKKLINEKKEDGKVFWQNLAGYKRQEALRPYLSSEEDVRKKGKKFARYQLGDLLLHLEKKHGEDWGKVYDEAWERIDKKVEGLSKHIKLEEERRSEDAQSKAALTDWLRAKASFVIEGLKEADKDEFCRCELKLQKWYGDLRGKPFAIEAENSILDISGFSKQYNCAFIWQKDGVKKLNLYLIINYFKGGKLRFKKIKPEAFEANRFYTVINKKSGEIVPMEVNFNFDDPNLIILPLAFGKRQGREFIWNDLLSLETGSLKLANGRVIEKTLYNRRTRQDEPALFVALTFERREVLDSSNIKPMNLIGVDRGENIPAVIALTDPEGCPLSRFKDSLGNPTHILRIGESYKEKQRTIQAKKEVEQRRAGGYSRKYASKAKNLADDMVRNTARDLLYYAVTQDAMLIFENLSRGFGRQGKRTFMAERQYTRMEDWLTAKLAYEGLPSKTYLSKTLAQYTSKTCSNCGFTITSADYDRVLEKLKKTATGWMTTINGKELKVEGQITYYNRYKRQNVVKDLSVELDRLSEESVNNDISSWTKGRSGEALSLLKKRFSHRPVQEKFVCLNCGFETHADEQAALNIARSWLFLRSQEYKKYQTNKTTGNTDKRAFVETWQSFYRKKLKEVWKPAV

SEQ ID NO: 36170 - protein, 979 aa, synthetic construct
  REGION 1..979: note = engineered CasX variant
QEIKRINKIRRRLVKDSNTKKAGKTGPMKTLLVRVMTPDLRERLENLRKKPENIPQPISNTSRANLNKLLTDYTEMKKAILHVYWEEFQKDPVGLMSRVAQPASKKIDQNKLKPEMDEKGNLTTAGFACSQCGQPLFVYKLEQVSEKGKAYTNYFGRCNVAEHEKLILLAQLKPEKDSDEAVTYSLGKFGQRALDFYSIHVTKESTHPVKPLAQIAGNRYASHPVGKALSDACMGTIASFLSKYQDIIIEHQKVVKGNQKRLESLRELAGKENLEYPSVTLPPQPHTKEGVDAYNEVIARVRTWVNLNLWQKLKLSRDDAKPLLRLKGFPSFPLVERQANEVDWWDMVCNVKKLINEKKEDGKVFWQNLAGYKRQEALRPYLSSEEDVRKKGKKFARYQLGDLLLHLEKKHGEDWGKVYDEAWERIDKKVEGLSKHIKLEEERRSEDAQSKAALTDWLRAKASFVIEGLKEADKDEFCRCELKLQKWYGDLRGKPFAIEAENSILDISGFSKQYNCAFIWQKDGVKKLNLYLIINYFKGGKLRFKKIKPEAFEANRFYTVINKKSGEIVPMEVNFNFDDPNLIILPLAFGKRQGREFIWNDLLSLETGSLKLANGRVIEKTLYNRRTRQDEPALFVALTFERREVLDSSNIKPMNLIGVDRGENIPAVIALTDPEGCPLSRFKDSLGNPTHILRIGESYKEKQRTIQAKKEVEQRRAGGYSRKYASKAKNLADDMVRNTARDLLYYAVTQDAMLIFENLSRGFGRQGKRTFMAERQYTRMEDWLTAKLAYEGLPSKTYLSKTLAQYTSKTCSNCGFTITSADYDRVLEKLKKTATGWMTTINGKELKVEGQITYYNRYKRQNVVKDLSVELDRLSEESVNNDISSWTKGRSGEALSLLKKRFSHRPVQEKFVCLNCGFETHADEQAALNIARSWLFLRSQEYKKYQTNKTTGNTDKRAFVETWQSFYRKKLKEVWKPAV

SEQ ID NO: 36171 - protein, 979 aa, synthetic construct
  REGION 1..979: note = engineered CasX variant
QEIKRINKIRRRLVKDSNTKKAGKTGPMKTLLVRVMTPDLRERLENLRKKPENIPQPISNTSRANLNKLLTDYTEMKKAILHVYWEEFQKDPVGLMSRVAQPASKKIDQNKLKPEMDEKGNLTTAGFACSQCGQPLFVYKLEQVSEKGKAYTNYFGRCNVAEHEKLILLAQLKPEKDSDEAVTYSLGKFGQRALDFYSIHVTKESTHPVKPLAQIAGNRYASSPVGKALSDACMGTIASFLSKYQDIIIEHQKVVKGNQKRLESLRELAGKENLEYPSVTLPPQPHTKEGVDAYNEVIARVRTWVNLNLWQKLKLSRDDAKPLLRLKGFPSFPLVERQANEVDWWDMVCNVKKLINEKKEDGKVFWQNLAGYKRQEALRPYLSSEEDVRKKGKKFARYQLGDLLLHLEKKHGEDWGKVYDEAWERIDKKVEGLSKHIKLEEERRSEDAQSKAALTDWLRAKASFVIEGLKEADKDEFCRCELKLQKWYGDLRGKPFAIEAENSILDISGFSKQYNCAFIWQKDGVKKLNLYLIINYFKGGKLRFKKIKPEAFEANRFYTVINKKSGEIVPMEVNFNFDDPNLIILPLAFGKRQGREFIWNDLLSLETGSLKLANGRVIEKTLYNRRTRQDEPALFVALTFERREVLDSSNIKPMNLIGVDRGENIPAVIALTDPEGCPLSRFKDSLGNPTHILRIGESYKEKQRTIQAKKEVEQRRAGGYSRKYASKAKNLADDMVRNTARDLLYYAVTQDAMLIFENLSRGFGRQGKRTFMAERQYTRMEDWLTAKLAYEGLPSKTYLSKTLAQYTSKTCSNCGFTITSADYDRVLEKLKKTATGWMTTINGKELKVEGQITYYNRYKRQNVVKDLSVELDRLSEESVNNDISSWTKGRSGEALSLLKKRFSHRPVQEKFVCLNCGFETHADEQAALNIARSWLFLRSQEYKKYQTNKTTGNTDKRAFVETWQSFYRKKLKEVWKPAV

SEQ ID NO: 36172 - protein, 979 aa, synthetic construct
  REGION 1..979: note = engineered CasX variant
QEIKRINKIRRRLVKDSNTKKAGKTGPMKTLLVRVMTPDLRERLENLRKKPENIPQPISNTSRANLNKLLTDYTEMKKAILHVYWEEFQKDPVGLMSRVAQPASKKIDQNKLKPEMDEKGNLTTAGFACSQCGQPLFVYKLEQVSEKGKAYTNYFGRCNVAEHEKLILLAQLKPEKDSDEAVTYSLGKFGQRALDFYSIHVTKESTHPVKPLAQIAGNRYASTPVGKALSDACMGTIASFLSKYQDIIIEHQKVVKGNQKRLESLRELAGKENLEYPSVTLPPQPHTKEGVDAYNEVIARVRTWVNLNLWQKLKLSRDDAKPLLRLKGFPSFPLVERQANEVDWWDMVCNVKKLINEKKEDGKVFWQNLAGYKRQEALRPYLSSEEDVRKKGKKFARYQLGDLLLHLEKKHGEDWGKVYDEAWERIDKKVEGLSKHIKLEEERRSEDAQSKAALTDWLRAKASFVIEGLKEADKDEFCRCELKLQKWYGDLRGKPFAIEAENSILDISGFSKQYNCAFIWQKDGVKKLNLYLIINYFKGGKLRFKKIKPEAFEANRFYTVINKKSGEIVPMEVNFNFDDPNLIILPLAFGKRQGREFIWNDLLSLETGSLKLANGRVIEKTLYNRRTRQDEPALFVALTFERREVLDSSNIKPMNLIGVDRGENIPAVIALTDPEGCPLSRFKDSLGNPTHILRIGESYKEKQRTIQAKKEVEQRRAGGYSRKYASKAKNLADDMVRNTARDLLYYAVTQDAMLIFENLSRGFGRQGKRTFMAERQYTRMEDWLTAKLAYEGLPSKTYLSKTLAQYTSKTCSNCGFTITSADYDRVLEKLKKTATGWMTTINGKELKVEGQITYYNRYKRQNVVKDLSVELDRLSEESVNNDISSWTKGRSGEALSLLKKRFSHRPVQEKFVCLNCGFETHADEQAALNIARSWLFLRSQEYKKYQTNKTTGNTDKRAFVETWQSFYRKKLKEVWKPAV

SEQ ID NO: 36173 - protein, 979 aa, synthetic construct
  REGION 1..979: note = engineered CasX variant
QEIKRINKIRRRLVKDSNTKKAGKTGPMKTLLVRVMTPDLRERLENLRKKPENIPQPISNTSRANLNKLLTDYTEMKKAILHVYWEEFQKDPVGLMSRVAQPASKKIDQNKLKPEMDEKGNLTTAGFACSQCGQPLFVYKLEQVSEKGKAYTNYFGRCNVAEHEKLILLAQLKPEKDSDEAVTYSLGKFGQRALDFYSIHVTKESTHPVKPLAQIAGNRYASAPVGKALSDACMGTIASFLSKYQDIIIEHQKVVKGNQKRLESLRELAGKENLEYPSVTLPPQPHTKEGVDAYNEVIARVRTWVNLNLWQKLKLSRDDAKPLLRLKGFPSFPLVERQANEVDWWDMVCNVKKLINEKKEDGKVFWQNLAGYKRQEALRPYLSSEEDVRKKGKKFARYQLGDLLLHLEKKHGEDWGKVYDEAWERIDKKVEGLSKHIKLEEERRSEDAQSKAALTDWLRAKASFVIEGLKEADKDEFCRCELKLQKWYGDLRGKPFAIEAENSILDISGFSKQYNCAFIWQKDGVKKLNLYLIINYFKGGKLRFKKIKPEAFEANRFYTVINKKSGEIVPMEVNFNFDDPNLIILPLAFGKRQGREFIWNDLLSLETGSLKLANGRVIEKTLYNRRTRQDEPALFVALTFERREVLDSSNIKPMNLIGVDRGENIPAVIALTDPEGCPLSRFKDSLGNPTHILRIGESYKEKQRTIQAKKEVEQRRAGGYSRKYASKAKNLADDMVRNTARDLLYYAVTQDAMLIFENLSRGFGRQGKRTFMAERQYTRMEDWLTAKLAYEGLPSKTYLSKTLAQYTSKTCSNCGFTITSADYDRVLEKLKKTATGWMTTINGKELKVEGQITYYNRYKRQNVVKDLSVELDRLSEESVNNDISSWTKGRSGEALSLLKKRFSHRPVQEKFVCLNCGFETHADEQAALNIARSWLFLRSQEYKKYQTNKTTGNTDKRAFVETWQSFYRKKLKEVWKPAV

SEQ ID NO: 36174 - protein, 979 aa, synthetic construct
  REGION 1..979: note = engineered CasX variant
QEIKRINKIRRRLVKDSNTKKAGKTGPMKTLLVRVMTPDLRERLENLRKKPENIPQPISNTSRANLNKLLTDYTEMKKAILHVYWEEFQKDPVGLMSRVAQPASKKIDQNKLKPEMDEKGNLTTAGFACSQCGQPLFVYKLEQVSEKGKAYTNYFGRCNVAEHEKLILLAQLKPEKDSDEAVTYSLGKFGQRALDFYSIHVTKESTHPVKPLAQIAGNRYASVPVGKALSDACMGTIASFLSKYQDIIIEHQKVVKGNQKRLESLRELAGKENLEYPSVTLPPQPHTKEGVDAYNEVIARVRTWVNLNLWQKLKLSRDDAKPLLRLKGFPSFPLVERQANEVDWWDMVCNVKKLINEKKEDGKVFWQNLAGYKRQEALRPYLSSEEDVRKKGKKFARYQLGDLLLHLEKKHGEDWGKVYDEAWERIDKKVEGLSKHIKLEEERRSEDAQSKAALTDWLRAKASFVIEGLKEADKDEFCRCELKLQKWYGDLRGKPFAIEAENSILDISGFSKQYNCAFIWQKDGVKKLNLYLIINYFKGGKLRFKKIKPEAFEANRFYTVINKKSGEIVPMEVNFNFDDPNLIILPLAFGKRQGREFIWNDLLSLETGSLKLANGRVIEKTLYNRRTRQDEPALFVALTFERREVLDSSNIKPMNLIGVDRGENIPAVIALTDPEGCPLSRFKDSLGNPTHILRIGESYKEKQRTIQAKKEVEQRRAGGYSRKYASKAKNLADDMVRNTARDLLYYAVTQDAMLIFENLSRGFGRQGKRTFMAERQYTRMEDWLTAKLAYEGLPSKTYLSKTLAQYTSKTCSNCGFTITSADYDRVLEKLKKTATGWMTTINGKELKVEGQITYYNRYKRQNVVKDLSVELDRLSEESVNNDISSWTKGRSGEALSLLKKRFSHRPVQEKFVCLNCGFETHADEQAALNIARSWLFLRSQEYKKYQTNKTTGNTDKRAFVETWQSFYRKKLKEVWKPAV

SEQ ID NO: 36175 - protein, 979 aa, synthetic construct
  REGION 1..979: note = engineered CasX variant
QEIKRINKIRRRLVKDSNTKKAGKTGPMKTLLVRVMTPDLRERLENLRKKPENIPQPISNTSRANLNKLLTDYTEMKKAILHVYWEEFQKDPVGLMSRVAQPASKKIDQNKLKPEMDEKGNLTTAGFACSQCGQPLFVYKLEQVSEKGKAYTNYFGRCNVAEHEKLIKLAQLKPEKDSDEAVTYSLGKFGQRALDFYSIHVTKESTHPVKPLAQIAGNRYASGPVGKALSDACMGTIASFLSKYQDIIIEHQKVVKGNQKRLESLRELAGKENLEYPSVTLPPQPHTKEGVDAYNEVIARVRTWVNLNLWQKLKLSRDDAKPLLRLKGFPSFPLVERQANEVDWWDMVCNVKKLINEKKEDGKVFWQNLAGYKRQEALRPYLSSEEDVRKKGKKFARYQLGDLLLHLEKKHGEDWGKVYDEAWERIDKKVEGLSKHIKLEEERRSEDAQSKAALTDWLRAKASFVIEGLKEADKDEFCRCELKLQKWYGDLRGKPFAIEAENSILDISGFSKQYNCAFIWQKDGVKKLNLYLIINYFKGGKLRFKKIKPEAFEANRFYTVINKKSGEIVPMEVNFNFDDPNLIILPLAFGKRQGREFIWNDLLSLETGSLKLANGRVIEKTLYNRRTRQDEPALFVALTFERREVLDSSNIKPMNLIGVDRGENIPAVIALTDPEGCPLSRFKDSLGNPTHILRIGESYKEKQRTIQAKKEVEQRRAGGYSRKYASKAKNLADDMVRNTARDLLYYAVTQDAMLIFENLSRGFGRQGKRTFMAERQYTRMEDWLTAKLAYEGLPSKTYLSKTLAQYTSKTCSNCGFTITSADYDRVLEKLKKTATGWMTTINGKELKVEGQITYYNRYKRQNVVKDLSVELDRLSEESVNNDISSWTKGRSGEALSLLKKRFSHRPVQEKFVCLNCGFETHADEQAALNIARSWLFLRSQEYKKYQTNKTTGNTDKRAFVETWQSFYRKKLKEVWKPAV

SEQ ID NO: 36176 - protein, 978 aa, synthetic construct
  REGION 1..978: note = engineered CasX variant
QEIKRINKIRRRLVKDSNTKKAGKTGPMKTLLVRVMTPDLRERLENLRKKPENIPQPISNTSRANLNKLLTDYTEMKKAILHVYWEEFQKDPVGLMSRVAQPASKKIDQNKLKPEMDEKGNLTTAGFACSQCGQPLFVYKLEQVSEKGKAYTNYFGRCNVAEHEKLILLAQLKPEKDSDEAVTYSLGKFGQRALDFYSIHVTKESTHPVKPLAQIAGNRYASPVGKALSDACMGTIASFLSKYQDIIIEHQKVVKGNQKRLESLRELAGKENLEYPSVTLPPQPHTKEGVDAYNEVIARVRTWVNLNLWQKLKLSRDDAKPLLRLKGFPSFPLVERQANEVDWWDMVCNVKKLINEKKEDGKVFWQNLAGYKRQEALRPYLSSEEDVRKKGKKFARYQLGDLLLHLEKKHGEDWGKVYDEAWERIDKKVEGLSKHIKLEEERRSEDAQSKAALTDWLRAKASFVIEGLKEADKDEFCRCELKLQKWYGDLRGKPFAIEAENSILDISGFSKQYNCAFIWQKDGVKKLNLYLIINYFKGGKLRFKKIKPEAFEANRFYTVINKKSGEIVPMEVNFNFDDPNLIILPLAFGKRQGREFIWNDLLSLETGSLKLANGRVIEKTLYNRRTRQDEPALFVALTFERREVLDSSNIKPMNLIGVDRGENIPAVIALTDPEGCPLSRFKDSLGNPTHILRIGESYKEKQRTIQAKKEVEQRRAGGYSRKYASKAKNLADDMVRNTARDLLYYAVTQDAMLIFENLSRGFGRQGKRTFMAERQYTRMEDWLTAKLAYEGLPSKTYLSKTLAQYTSKTCSNCGFTITSADYDRVLEKLKKTATGWMTTINGKELKVEGQITYYNRYKRQNVVKDLSVELDRLSEESVNNDISSWTKGRSGEALSLLKKRFSHRPVQEKFVCLNCGFETHADEQAALNIARSWLFLRSQEYKKYQTNKTTGNTDKRAFVETWQSFYRKKLKEVWKPAV

SEQ ID NO: 36177 - protein, 978 aa, synthetic construct
  REGION 1..978: note = engineered CasX variant
QEIKRINKIRRRLVKDSNTKKAGKTGPMKTLLVRVMTPDLRERLENLRKKPENIPQPISNTSRANLNKLLTDYTEMKKAILHVYWEEFQKDPVGLMSRVAQPASKKIDQNKLKPEMDEKGNLTTAGFACSQCGQPLFVYKLEQVSEKGKAYTNYFGRCNVAEHEKLILLAQLKPEKDSDEAVTYSLGKFGQRALDFYSIHVTKESTHPVKPLAQIAGNRYASYPVGKALSDACMGTIASFLSKYQDIIIEHQKVVKGNQKRLESLRELAGKENLEYPSVTLPPQPHTKEGVDAYNEVIARVRTWVNLNLWQKLKLSRDDAKPLLRLKGFPSFPLVERQANEVDWWDMVCNVKKLINEKKEDGKVFWQNLAGYKRQEALRPYLSSEEDRKKGKKFARYQLGDLLLHLEKKHGEDWGKVYDEAWERIDKKVEGLSKHIKLEEERRSEDAQSKAALTDWLRAKASFVIEGLKEADKDEFCRCELKLQKWYGDLRGKPFAIEAENSILDISGFSKQYNCAFIWQKDGVKKLNLYLIINYFKGGKLRFKKIKPEAFEANRFYTVINKKSGEIVPMEVNFNFDDPNLIILPLAFGKRQGREFIWNDLLSLETGSLKLANGRVIEKTLYNRRTRQDEPALFVALTFERREVLDSSNIKPMNLIGVDRGENIPAVIALTDPEGCPLSRFKDSLGNPTHILRIGESYKEKQRTIQAKKEVEQRRAGGYSRKYASKAKNLADDMVRNTARDLLYYAVTQDAMLIFENLSRGFGRQGKRTFMAERQYTRMEDWLTAKLAYEGLPSKTYLSKTLAQYTSKTCSNCGFTITSADYDRMLEKLKKTATGWMTTINGKELKVEGQITYYNRYKRQNVVKDLSVELDRLSEESVNNDISSWTKGRSGEALSLLKKRFSHRPVQEKFVCLNCGFETHADEQAALNIARSWLFLRSQEYKKYQTNKTTGNTDKRAFVETWQSFYRKKLKEVWKPAV

SEQ ID NO: 36178 - protein, 978 aa, synthetic construct
  REGION 1..978: note = engineered CasX variant
QEIKRINKIRRRLVKDSNTKKAGKTGPMKTLLVRVMTPDLRERLENLRKKPENIPQPISNTSRANLNKLLTDYTEMKKAILHVYWEEFQKDPVGLMSRVAQPASKKIDQNKLKPEMDEKGNLTTAGFACSQCGQPLFVYKLEQVSEKGKAYTNYFGRCNVAEHEKLILLAQLKPEKDSDEAVTYSLGKFGQRALDFYSIHVTKESTHPVKPLAQIAGNRYASHPVGKALSDACMGTIASFLSKYQDIIIEHQKVVKGNQKRLESLRELAGKENLEYPSVTLPPQPHTKEGVDAYNEVIARVRTWVNLNLWQKLKLSRDDAKPLLRLKGFPSFPLVERQANEVDWWDMVCNVKKLINEKKEDGKVFWQNLAGYKRQEALRPYLSSEEDRKKGKKFARYQLGDLLLHLEKKHGEDWGKVYDEAWERIDKKVEGLSKHIKLEEERRSEDAQSKAALTDWLRAKASFVIEGLKEADKDEFCRCELKLQKWYGDLRGKPFAIEAENSILDISGFSKQYNCAFIWQKDGVKKLNLYLIINYFKGGKLRFKKIKPEAFEANRFYTVINKKSGEIVPMEVNFNFDDPNLIILPLAFGKRQGREFIWNDLLSLETGSLKLANGRVIEKTLYNRRTRQDEPALFVALTFERREVLDSSNIKPMNLIGVDRGENIPAVIALTDPEGCPLSRFKDSLGNPTHILRIGESYKEKQRTIQAKKEVEQRRAGGYSRKYASKAKNLADDMVRNTARDLLYYAVTQDAMLIFENLSRGFGRQGKRTFMAERQYTRMEDWLTAKLAYEGLPSKTYLSKTLAQYTSKTCSNCGFTITSADYDRMLEKLKKTATGWMTTINGKELKVEGQITYYNRYKRQNVVKDLSVELDRLSEESVNNDISSWTKGRSGEALSLLKKRFSHRPVQEKFVCLNCGFETHADEQAALNIARSWLFLRSQEYKKYQTNKTTGNTDKRAFVETWQSFYRKKLKEVWKPAV

SEQ ID NO: 36179 - protein, 978 aa, synthetic construct
  REGION 1..978: note = engineered CasX variant
QEIKRINKIRRRLVKDSNTKKAGKTGPMKTLLVRVMTPDLRERLENLRKKPENIPQPISNTSRANLNKLLTDYTEMKKAILHVYWEEFQKDPVGLMSRVAQPASKKIDQNKLKPEMDEKGNLTTAGFACSQCGQPLFVYKLEQVSEKGKAYTNYFGRCNVAEHEKLILLAQLKPEKDSDEAVTYSLGKFGQRALDFYSIHVTKESTHPVKPLAQIAGNRYASSPVGKALSDACMGTIASFLSKYQDIIIEHQKVVKGNQKRLESLRELAGKENLEYPSVTLPPQPHTKEGVDAYNEVIARVRTWVNLNLWQKLKLSRDDAKPLLRLKGFPSFPLVERQANEVDWWDMVCNVKKLINEKKEDGKVFWQNLAGYKRQEALRPYLSSEEDRKKGKKFARYQLGDLLLHLEKKHGEDWGKVYDEAWERIDKKVEGLSKHIKLEEERRSEDAQSKAALTDWLRAKASFVIEGLKEADKDEFCRCELKLQKWYGDLRGKPFAIEAENSILDISGFSKQYNCAFIWQKDGVKKLNLYLIINYFKGGKLRFKKIKPEAFEANRFYTVINKKSGEIVPMEVNFNFDDPNLIILPLAFGKRQGREFIWNDLLSLETGSLKLANGRVIEKTLYNRRTRQDEPALFVALTFERREVLDSSNIKPMNLIGVDRGENIPAVIALTDPEGCPLSRFKDSLGNPTHILRIGESYKEKQRTIQAKKEVEQRRAGGYSRKYASKAKNLADDMVRNTARDLLYYAVTQDAMLIFENLSRGFGRQGKRTFMAERQYTRMEDWLTAKLAYEGLPSKTYLSKTLAQYTSKTCSNCGFTITSADYDRMLEKLKKTATGWMTTINGKELKVEGQITYYNRYKRQNVVKDLSVELDRLSEESVNNDISSWTKGRSGEALSLLKKRFSHRPVQEKFVCLNCGFETHADEQAALNIARSWLFLRSQEYKKYQTNKTTGNTDKRAFVETWQSFYRKKLKEVWKPAV

SEQ ID NO: 36180 - protein, 978 aa, synthetic construct
  REGION 1..978: note = engineered CasX variant
QEIKRINKIRRRLVKDSNTKKAGKTGPMKTLLVRVMTPDLRERLENLRKKPENIPQPISNTSRANLNKLLTDYTEMKKAILHVYWEEFQKDPVGLMSRVAQPASKKIDQNKLKPEMDEKGNLTTAGFACSQCGQPLFVYKLEQVSEKGKAYTNYFGRCNVAEHEKLILLAQLKPEKDSDEAVTYSLGKFGQRALDFYSIHVTKESTHPVKPLAQIAGNRYASTPVGKALSDACMGTIASFLSKYQDIIIEHQKVVKGNQKRLESLRELAGKENLEYPSVTLPPQPHTKEGVDAYNEVIARVRTWVNLNLWQKLKLSRDDAKPLLRLKGFPSFPLVERQANEVDWWDMVCNVKKLINEKKEDGKVFWQNLAGYKRQEALRPYLSSEEDRKKGKKFARYQLGDLLLHLEKKHGEDWGKVYDEAWERIDKKVEGLSKHIKLEEERRSEDAQSKAALTDWLRAKASFVIEGLKEADKDEFCRCELKLQKWYGDLRGKPFAIEAENSILDISGFSKQYNCAFIWQKDGVKKLNLYLIINYFKGGKLRFKKIKPEAFEANRFYTVINKKSGEIVPMEVNFNFDDPNLIILPLAFGKRQGREFIWNDLLSLETGSLKLANGRVIEKTLYNRRTRQDEPALFVALTFERREVLDSSNIKPMNLIGVDRGENIPAVIALTDPEGCPLSRFKDSLGNPTHILRIGESYKEKQRTIQAKKEVEQRRAGGYSRKYASKAKNLADDMVRNTARDLLYYAVTQDAMLIFENLSRGFGRQGKRTFMAERQYTRMEDWLTAKLAYEGLPSKTYLSKTLAQYTSKTCSNCGFTITSADYDRMLEKLKKTATGWMTTINGKELKVEGQITYYNRYKRQNVVKDLSVELDRLSEESVNNDISSWTKGRSGEALSLLKKRFSHRPVQEKFVCLNCGFETHADEQAALNIARSWLFLRSQEYKKYQTNKTTGNTDKRAFVETWQSFYRKKLKEVWKPAV

SEQ ID NO: 36181 - protein, 978 aa, synthetic construct
  REGION 1..978: note = engineered CasX variant
QEIKRINKIRRRLVKDSNTKKAGKTGPMKTLLVRVMTPDLRERLENLRKKPENIPQPISNTSRANLNKLLTDYTEMKKAILHVYWEEFQKDPVGLMSRVAQPASKKIDQNKLKPEMDEKGNLTTAGFACSQCGQPLFVYKLEQVSEKGKAYTNYFGRCNVAEHEKLILLAQLKPEKDSDEAVTYSLGKFGQRALDFYSIHVTKESTHPVKPLAQIAGNRYASAPVGKALSDACMGTIASFLSKYQDIIIEHQKVVKGNQKRLESLRELAGKENLEYPSVTLPPQPHTKEGVDAYNEVIARVRTWVNLNLWQKLKLSRDDAKPLLRLKGFPSFPLVERQANEVDWWDMVCNVKKLINEKKEDGKVFWQNLAGYKRQEALRPYLSSEEDRKKGKKFARYQLGDLLLHLEKKHGEDWGKVYDEAWERIDKKVEGLSKHIKLEEERRSEDAQSKAALTDWLRAKASFVIEGLKEADKDEFCRCELKLQKWYGDLRGKPFAIEAENSILDISGFSKQYNCAFIWQKDGVKKLNLYLIINYFKGGKLRFKKIKPEAFEANRFYTVINKKSGEIVPMEVNFNFDDPNLIILPLAFGKRQGREFIWNDLLSLETGSLKLANGRVIEKTLYNRRTRQDEPALFVALTFERREVLDSSNIKPMNLIGVDRGENIPAVIALTDPEGCPLSRFKDSLGNPTHILRIGESYKEKQRTIQAKKEVEQRRAGGYSRKYASKAKNLADDMVRNTARDLLYYAVTQDAMLIFENLSRGFGRQGKRTFMAERQYTRMEDWLTAKLAYEGLPSKTYLSKTLAQYTSKTCSNCGFTITSADYDRMLEKLKKTATGWMTTINGKELKVEGQITYYNRYKRQNVVKDLSVELDRLSEESVNNDISSWTKGRSGEALSLLKKRFSHRPVQEKFVCLNCGFETHADEQAALNIARSWLFLRSQEYKKYQTNKTTGNTDKRAFVETWQSFYRKKLKEVWKPAV

SEQ ID NO: 36182 - protein, 978 aa, synthetic construct
  REGION 1..978: note = engineered CasX variant
QEIKRINKIRRRLVKDSNTKKAGKTGPMKTLLVRVMTPDLRERLENLRKKPENIPQPISNTSRANLNKLLTDYTEMKKAILHVYWEEFQKDPVGLMSRVAQPASKKIDQNKLKPEMDEKGNLTTAGFACSQCGQPLFVYKLEQVSEKGKAYTNYFGRCNVAEHEKLILLAQLKPEKDSDEAVTYSLGKFGQRALDFYSIHVTKESTHPVKPLAQIAGNRYASVPVGKALSDACMGTIASFLSKYQDIIIEHQKVVKGNQKRLESLRELAGKENLEYPSVTLPPQPHTKEGVDAYNEVIARVRTWVNLNLWQKLKLSRDDAKPLLRLKGFPSFPLVERQANEVDWWDMVCNVKKLINEKKEDGKVFWQNLAGYKRQEALRPYLSSEEDRKKGKKFARYQLGDLLLHLEKKHGEDWGKVYDEAWERIDKKVEGLSKHIKLEEERRSEDAQSKAALTDWLRAKASFVIEGLKEADKDEFCRCELKLQKWYGDLRGKPFAIEAENSILDISGFSKQYNCAFIWQKDGVKKLNLYLIINYFKGGKLRFKKIKPEAFEANRFYTVINKKSGEIVPMEVNFNFDDPNLIILPLAFGKRQGREFIWNDLLSLETGSLKLANGRVIEKTLYNRRTRQDEPALFVALTFERREVLDSSNIKPMNLIGVDRGENIPAVIALTDPEGCPLSRFKDSLGNPTHILRIGESYKEKQRTIQAKKEVEQRRAGGYSRKYASKAKNLADDMVRNTARDLLYYAVTQDAMLIFENLSRGFGRQGKRTFMAERQYTRMEDWLTAKLAYEGLPSKTYLSKTLAQYTSKTCSNCGFTITSADYDRMLEKLKKTATGWMTTINGKELKVEGQITYYNRYKRQNVVKDLSVELDRLSEESVNNDISSWTKGRSGEALSLLKKRFSHRPVQEKFVCLNCGFETHADEQAALNIARSWLFLRSQEYKKYQTNKTTGNTDKRAFVETWQSFYRKKLKEVWKPAV

SEQ ID NO: 36183 - protein, 978 aa, synthetic construct
  REGION 1..978: note = engineered CasX variant
QEIKRINKIRRRLVKDSNTKKAGKTGPMKTLLVRVMTPDLRERLENLRKKPENIPQPISNTSRANLNKLLTDYTEMKKAILHVYWEEFQKDPVGLMSRVAQPASKKIDQNKLKPEMDEKGNLTTAGFACSQCGQPLFVYKLEQVSEKGKAYTNYFGRCNVAEHEKLIKLAQLKPEKDSDEAVTYSLGKFGQRALDFYSIHVTKESTHPVKPLAQIAGNRYASGPVGKALSDACMGTIASFLSKYQDIIIEHQKVVKGNQKRLESLRELAGKENLEYPSVTLPPQPHTKEGVDAYNEVIARVRTWVNLNLWQKLKLSRDDAKPLLRLKGFPSFPLVERQANEVDWWDMVCNVKKLINEKKEDGKVFWQNLAGYKRQEALRPYLSSEEDRKKGKKFARYQLGDLLLHLEKKHGEDWGKVYDEAWERIDKKVEGLSKHIKLEEERRSEDAQSKAALTDWLRAKASFVIEGLKEADKDEFCRCELKLQKWYGDLRGKPFAIEAENSILDISGFSKQYNCAFIWQKDGVKKLNLYLIINYFKGGKLRFKKIKPEAFEANRFYTVINKKSGEIVPMEVNFNFDDPNLIILPLAFGKRQGREFIWNDLLSLETGSLKLANGRVIEKTLYNRRTRQDEPALFVALTFERREVLDSSNIKPMNLIGVDRGENIPAVIALTDPEGCPLSRFKDSLGNPTHILRIGESYKEKQRTIQAKKEVEQRRAGGYSRKYASKAKNLADDMVRNTARDLLYYAVTQDAMLIFENLSRGFGRQGKRTFMAERQYTRMEDWLTAKLAYEGLPSKTYLSKTLAQYTSKTCSNCGFTITSADYDRMLEKLKKTATGWMTTINGKELKVEGQITYYNRYKRQNVVKDLSVELDRLSEESVNNDISSWTKGRSGEALSLLKKRFSHRPVQEKFVCLNCGFETHADEQAALNIARSWLFLRSQEYKKYQTNKTTGNTDKRAFVETWQSFYRKKLKEVWKPAV

SEQ ID NO: 36184 - protein, 977 aa, synthetic construct
  REGION 1..977: note = engineered CasX variant
QEIKRINKIRRRLVKDSNTKKAGKTGPMKTLLVRVMTPDLRERLENLRKKPENIPQPISNTSRANLNKLLTDYTEMKKAILHVYWEEFQKDPVGLMSRVAQPASKKIDQNKLKPEMDEKGNLTTAGFACSQCGQPLFVYKLEQVSEKGKAYTNYFGRCNVAEHEKLILLAQLKPEKDSDEAVTYSLGKFGQRALDFYSIHVTKESTHPVKPLAQIAGNRYASPVGKALSDACMGTIASFLSKYQDIIIEHQKVVKGNQKRLESLRELAGKENLEYPSVTLPPQPHTKEGVDAYNEVIARVRTWVNLNLWQKLKLSRDDAKPLLRLKGFPSFPLVERQANEVDWWDMVCNVKKLINEKKEDGKVFWQNLAGYKRQEALRPYLSSEEDRKKGKKFARYQLGDLLLHLEKKHGEDWGKVYDEAWERIDKKVEGLSKHIKLEEERRSEDAQSKAALTDWLRAKASFVIEGLKEADKDEFCRCELKLQKWYGDLRGKPFAIEAENSILDISGFSKQYNCAFIWQKDGVKKLNLYLIINYFKGGKLRFKKIKPEAFEANRFYTVINKKSGEIVPMEVNFNFDDPNLIILPLAFGKRQGREFIWNDLLSLETGSLKLANGRVIEKTLYNRRTRQDEPALFVALTFERREVLDSSNIKPMNLIGVDRGENIPAVIALTDPEGCPLSRFKDSLGNPTHILRIGESYKEKQRTIQAKKEVEQRRAGGYSRKYASKAKNLADDMVRNTARDLLYYAVTQDAMLIFENLSRGFGRQGKRTFMAERQYTRMEDWLTAKLAYEGLPSKTYLSKTLAQYTSKTCSNCGFTITSADYDRMLEKLKKTATGWMTTINGKELKVEGQITYYNRYKRQNVVKDLSVELDRLSEESVNNDISSWTKGRSGEALSLLKKRFSHRPVQEKFVCLNCGFETHADEQAALNIARSWLFLRSQEYKKYQTNKTTGNTDKRAFVETWQSFYRKKLKEVWKPAV

SEQ ID NO: 36185 - protein, 978 aa, synthetic construct
  REGION 1..978: note = engineered CasX variant
QEIKRINKIRRRLVKDSNTKKAGKTGPMKTLLVRVMTPDLRERLENLRKKPENIPQPISNTSRANLNKLLTDYTEMKKAILHVYWEEFQKDPVGLMSRVAQPASKKIDQNKLKPEMDEKGNLTTAGFACSQCGQPLFVYKLEQVSEKGKAYTNYFGRCNVAEHEKLILLAQLKPEKDSDEAVTYSLGKFGQRALDFYSIHVTKESTHPVKPLAQIAGNRYASYPVGKALSDACMGTIASFLSKYQDIIIEHQKVVKGNQKRLESLRELAGKENLEYPSVTLPPQPHTKEGVDAYNEVIARVRTWVNLNLWQKLKLSRDDAKPLLRLKGFPSFPLVERQANEVDWWDMVCNVKKLINEKKEDGKVFWQNLAGYKRQEALRPYLSSEEDRKKGKKFARYQLGDLLLHLEKKHGEDWGKVYDEAWERIDKKVEGLSKHIKLEEERRSEDAQSKAALTDWLRAKASFVIEGLKEADKDEFCRCELKLQKWYGDLRGKPFAIEAENSILDISGFSKQYNCAFIWQKDGVKKLNLYLIINYFKGGKLRFKKIKPEAFEANRFYTVINKKSGEIVPMEVNFNFDDPNLIILPLAFGKRQGREFIWNDLLSLETGSLKLANGRVIEKTLYNRRTRQDEPALFVALTFERREVLDSSNIKPMNLIGVDRGENIPAVIALTDPEGCPLSRFKDSLGNPTHILRIGESYKEKQRTIQAKKEVEQRRAGGYSRKYASKAKNLADDMVRNTARDLLYYAVTQDAMLIFENLSRGFGRQGKRTFMAERQYTRMEDWLTAKLAYEGLPSKTYLSKTLAQYTSKTCSNCGFTITSADYDRVLEKLKKTATGWMTTINGKELKVEGQITYYNRYKRQNVVKDLSVELDRLSEESVNNDISSWTKGRQGEALSLLKKRFSHRPVQEKFVCLNCGFETHADEQAALNIARSWLFLRSQEYKKYQTNKTTGNTDKRAFVETWQSFYRKKLKEVWKPAV

SEQ ID NO: 36186 - protein, 978 aa, synthetic construct
  REGION 1..978: note = engineered CasX variant
QEIKRINKIRRRLVKDSNTKKAGKTGPMKTLLVRVMTPDLRERLENLRKKPENIPQPISNTSRANLNKLLTDYTEMKKAILHVYWEEFQKDPVGLMSRVAQPASKKIDQNKLKPEMDEKGNLTTAGFACSQCGQPLFVYKLEQVSEKGKAYTNYFGRCNVAEHEKLILLAQLKPEKDSDEAVTYSLGKFGQRALDFYSIHVTKESTHPVKPLAQIAGNRYASHPVGKALSDACMGTIASFLSKYQDIIIEHQKVVKGNQKRLESLRELAGKENLEYPSVTLPPQPHTKEGVDAYNEVIARVRTWVNLNLWQKLKLSRDDAKPLLRLKGFPSFPLVERQANEVDWWDMVCNVKKLINEKKEDGKVFWQNLAGYKRQEALRPYLSSEEDRKKGKKFARYQLGDLLLHLEKKHGEDWGKVYDEAWERIDKKVEGLSKHIKLEEERRSEDAQSKAALTDWLRAKASFVIEGLKEADKDEFCRCELKLQKWYGDLRGKPFAIEAENSILDISGFSKQYNCAFIWQKDGVKKLNLYLIINYFKGGKLRFKKIKPEAFEANRFYTVINKKSGEIVPMEVNFNFDDPNLIILPLAFGKRQGREFIWNDLLSLETGSLKLANGRVIEKTLYNRRTRQDEPALFVALTFERREVLDSSNIKPMNLIGVDRGENIPAVIALTDPEGCPLSRFKDSLGNPTHILRIGESYKEKQRTIQAKKEVEQRRAGGYSRKYASKAKNLADDMVRNTARDLLYYAVTQDAMLIFENLSRGFGRQGKRTFMAERQYTRMEDWLTAKLAYEGLPSKTYLSKTLAQYTSKTCSNCGFTITSADYDRVLEKLKKTATGWMTTINGKELKVEGQITYYNRYKRQNVVKDLSVELDRLSEESVNNDISSWTKGRQGEALSLLKKRFSHRPVQEKFVCLNCGFETHADEQAALNIARSWLFLRSQEYKKYQTNKTTGNTDKRAFVETWQSFYRKKLKEVWKPAV

SEQ ID NO: 36187 - protein, 978 aa, synthetic construct
  REGION 1..978: note = engineered CasX variant
QEIKRINKIRRRLVKDSNTKKAGKTGPMKTLLVRVMTPDLRERLENLRKKPENIPQPISNTSRANLNKLLTDYTEMKKAILHVYWEEFQKDPVGLMSRVAQPASKKIDQNKLKPEMDEKGNLTTAGFACSQCGQPLFVYKLEQVSEKGKAYTNYFGRCNVAEHEKLILLAQLKPEKDSDEAVTYSLGKFGQRALDFYSIHVTKESTHPVKPLAQIAGNRYASSPVGKALSDACMGTIASFLSKYQDIIIEHQKVVKGNQKRLESLRELAGKENLEYPSVTLPPQPHTKEGVDAYNEVIARVRTWVNLNLWQKLKLSRDDAKPLLRLKGFPSFPLVERQANEVDWWDMVCNVKKLINEKKEDGKVFWQNLAGYKRQEALRPYLSSEEDRKKGKKFARYQLGDLLLHLEKKHGEDWGKVYDEAWERIDKKVEGLSKHIKLEEERRSEDAQSKAALTDWLRAKASFVIEGLKEADKDEFCRCELKLQKWYGDLRGKPFAIEAENSILDISGFSKQYNCAFIWQKDGVKKLNLYLIINYFKGGKLRFKKIKPEAFEANRFYTVINKKSGEIVPMEVNFNFDDPNLIILPLAFGKRQGREFIWNDLLSLETGSLKLANGRVIEKTLYNRRTRQDEPALFVALTFERREVLDSSNIKPMNLIGVDRGENIPAVIALTDPEGCPLSRFKDSLGNPTHILRIGESYKEKQRTIQAKKEVEQRRAGGYSRKYASKAKNLADDMVRNTARDLLYYAVTQDAMLIFENLSRGFGRQGKRTFMAERQYTRMEDWLTAKLAYEGLPSKTYLSKTLAQYTSKTCSNCGFTITSADYDRVLEKLKKTATGWMTTINGKELKVEGQITYYNRYKRQNVVKDLSVELDRLSEESVNNDISSWTKGRQGEALSLLKKRFSHRPVQEKFVCLNCGFETHADEQAALNIARSWLFLRSQEYKKYQTNKTTGNTDKRAFVETWQSFYRKKLKEVWKPAV

SEQ ID NO: 36188 - protein, 978 aa, synthetic construct
  REGION 1..978: note = engineered CasX variant
QEIKRINKIRRRLVKDSNTKKAGKTGPMKTLLVRVMTPDLRERLENLRKKPENIPQPISNTSRANLNKLLTDYTEMKKAILHVYWEEFQKDPVGLMSRVAQPASKKIDQNKLKPEMDEKGNLTTAGFACSQCGQPLFVYKLEQVSEKGKAYTNYFGRCNVAEHEKLILLAQLKPEKDSDEAVTYSLGKFGQRALDFYSIHVTKESTHPVKPLAQIAGNRYASTPVGKALSDACMGTIASFLSKYQDIIIEHQKVVKGNQKRLESLRELAGKENLEYPSVTLPPQPHTKEGVDAYNEVIARVRTWVNLNLWQKLKLSRDDAKPLLRLKGFPSFPLVERQANEVDWWDMVCNVKKLINEKKEDGKVFWQNLAGYKRQEALRPYLSSEEDRKKGKKFARYQLGDLLLHLEKKHGEDWGKVYDEAWERIDKKVEGLSKHIKLEEERRSEDAQSKAALTDWLRAKASFVIEGLKEADKDEFCRCELKLQKWYGDLRGKPFAIEAENSILDISGFSKQYNCAFIWQKDGVKKLNLYLIINYFKGGKLRFKKIKPEAFEANRFYTVINKKSGEIVPMEVNFNFDDPNLIILPLAFGKRQGREFIWNDLLSLETGSLKLANGRVIEKTLYNRRTRQDEPALFVALTFERREVLDSSNIKPMNLIGVDRGENIPAVIALTDPEGCPLSRFKDSLGNPTHILRIGESYKEKQRTIQAKKEVEQRRAGGYSRKYASKAKNLADDMVRNTARDLLYYAVTQDAMLIFENLSRGFGRQGKRTFMAERQYTRMEDWLTAKLAYEGLPSKTYLSKTLAQYTSKTCSNCGFTITSADYDRVLEKLKKTATGWMTTINGKELKVEGQITYYNRYKRQNVVKDLSVELDRLSEESVNNDISSWTKGRQGEALSLLKKRFSHRPVQEKFVCLNCGFETHADEQAALNIARSWLFLRSQEYKKYQTNKTTGNTDKRAFVETWQSFYRKKLKEVWKPAV

SEQ ID NO: 36189 - protein, 978 aa, synthetic construct
  REGION 1..978: note = engineered CasX variant
QEIKRINKIRRRLVKDSNTKKAGKTGPMKTLLVRVMTPDLRERLENLRKKPENIPQPISNTSRANLNKLLTDYTEMKKAILHVYWEEFQKDPVGLMSRVAQPASKKIDQNKLKPEMDEKGNLTTAGFACSQCGQPLFVYKLEQVSEKGKAYTNYFGRCNVAEHEKLILLAQLKPEKDSDEAVTYSLGKFGQRALDFYSIHVTKESTHPVKPLAQIAGNRYASAPVGKALSDACMGTIASFLSKYQDIIIEHQKVVKGNQKRLESLRELAGKENLEYPSVTLPPQPHTKEGVDAYNEVIARVRTWVNLNLWQKLKLSRDDAKPLLRLKGFPSFPLVERQANEVDWWDMVCNVKKLINEKKEDGKVFWQNLAGYKRQEALRPYLSSEEDRKKGKKFARYQLGDLLLHLEKKHGEDWGKVYDEAWERIDKKVEGLSKHIKLEEERRSEDAQSKAALTDWLRAKASFVIEGLKEADKDEFCRCELKLQKWYGDLRGKPFAIEAENSILDISGFSKQYNCAFIWQKDGVKKLNLYLIINYFKGGKLRFKKIKPEAFEANRFYTVINKKSGEIVPMEVNFNFDDPNLIILPLAFGKRQGREFIWNDLLSLETGSLKLANGRVIEKTLYNRRTRQDEPALFVALTFERREVLDSSNIKPMNLIGVDRGENIPAVIALTDPEGCPLSRFKDSLGNPTHILRIGESYKEKQRTIQAKKEVEQRRAGGYSRKYASKAKNLADDMVRNTARDLLYYAVTQDAMLIFENLSRGFGRQGKRTFMAERQYTRMEDWLTAKLAYEGLPSKTYLSKTLAQYTSKTCSNCGFTITSADYDRVLEKLKKTATGWMTTINGKELKVEGQITYYNRYKRQNVVKDLSVELDRLSEESVNNDISSWTKGRQGEALSLLKKRFSHRPVQEKFVCLNCGFETHADEQAALNIARSWLFLRSQEYKKYQTNKTTGNTDKRAFVETWQSFYRKKLKEVWKPAV

SEQ ID NO: 36190 - protein, 978 aa, synthetic construct
  REGION 1..978: note = engineered CasX variant
QEIKRINKIRRRLVKDSNTKKAGKTGPMKTLLVRVMTPDLRERLENLRKKPENIPQPISNTSRANLNKLLTDYTEMKKAILHVYWEEFQKDPVGLMSRVAQPASKKIDQNKLKPEMDEKGNLTTAGFACSQCGQPLFVYKLEQVSEKGKAYTNYFGRCNVAEHEKLILLAQLKPEKDSDEAVTYSLGKFGQRALDFYSIHVTKESTHPVKPLAQIAGNRYASVPVGKALSDACMGTIASFLSKYQDIIIEHQKVVKGNQKRLESLRELAGKENLEYPSVTLPPQPHTKEGVDAYNEVIARVRTWVNLNLWQKLKLSRDDAKPLLRLKGFPSFPLVERQANEVDWWDMVCNVKKLINEKKEDGKVFWQNLAGYKRQEALRPYLSSEEDRKKGKKFARYQLGDLLLHLEKKHGEDWGKVYDEAWERIDKKVEGLSKHIKLEEERRSEDAQSKAALTDWLRAKASFVIEGLKEADKDEFCRCELKLQKWYGDLRGKPFAIEAENSILDISGFSKQYNCAFIWQKDGVKKLNLYLIINYFKGGKLRFKKIKPEAFEANRFYTVINKKSGEIVPMEVNFNFDDPNLIILPLAFGKRQGREFIWNDLLSLETGSLKLANGRVIEKTLYNRRTRQDEPALFVALTFERREVLDSSNIKPMNLIGVDRGENIPAVIALTDPEGCPLSRFKDSLGNPTHILRIGESYKEKQRTIQAKKEVEQRRAGGYSRKYASKAKNLADDMVRNTARDLLYYAVTQDAMLIFENLSRGFGRQGKRTFMAERQYTRMEDWLTAKLAYEGLPSKTYLSKTLAQYTSKTCSNCGFTITSADYDRVLEKLKKTATGWMTTINGKELKVEGQITYYNRYKRQNVVKDLSVELDRLSEESVNNDISSWTKGRQGEALSLLKKRFSHRPVQEKFVCLNCGFETHADEQAALNIARSWLFLRSQEYKKYQTNKTTGNTDKRAFVETWQSFYRKKLKEVWKPAV

SEQ ID NO: 36191 - protein, 978 aa, synthetic construct
  REGION 1..978: note = engineered CasX variant
QEIKRINKIRRRLVKDSNTKKAGKTGPMKTLLVRVMTPDLRERLENLRKKPENIPQPISNTSRANLNKLLTDYTEMKKAILHVYWEEFQKDPVGLMSRVAQPASKKIDQNKLKPEMDEKGNLTTAGFACSQCGQPLFVYKLEQVSEKGKAYTNYFGRCNVAEHEKLIKLAQLKPEKDSDEAVTYSLGKFGQRALDFYSIHVTKESTHPVKPLAQIAGNRYASGPVGKALSDACMGTIASFLSKYQDIIIEHQKVVKGNQKRLESLRELAGKENLEYPSVTLPPQPHTKEGVDAYNEVIARVRTWVNLNLWQKLKLSRDDAKPLLRLKGFPSFPLVERQANEVDWWDMVCNVKKLINEKKEDGKVFWQNLAGYKRQEALRPYLSSEEDRKKGKKFARYQLGDLLLHLEKKHGEDWGKVYDEAWERIDKKVEGLSKHIKLEEERRSEDAQSKAALTDWLRAKASFVIEGLKEADKDEFCRCELKLQKWYGDLRGKPFAIEAENSILDISGFSKQYNCAFIWQKDGVKKLNLYLIINYFKGGKLRFKKIKPEAFEANRFYTVINKKSGEIVPMEVNFNFDDPNLIILPLAFGKRQGREFIWNDLLSLETGSLKLANGRVIEKTLYNRRTRQDEPALFVALTFERREVLDSSNIKPMNLIGVDRGENIPAVIALTDPEGCPLSRFKDSLGNPTHILRIGESYKEKQRTIQAKKEVEQRRAGGYSRKYASKAKNLADDMVRNTARDLLYYAVTQDAMLIFENLSRGFGRQGKRTFMAERQYTRMEDWLTAKLAYEGLPSKTYLSKTLAQYTSKTCSNCGFTITSADYDRVLEKLKKTATGWMTTINGKELKVEGQITYYNRYKRQNVVKDLSVELDRLSEESVNNDISSWTKGRQGEALSLLKKRFSHRPVQEKFVCLNCGFETHADEQAALNIARSWLFLRSQEYKKYQTNKTTGNTDKRAFVETWQSFYRKKLKEVWKPAV

SEQ ID NO: 36192 - protein, 977 aa, synthetic construct
  REGION 1..977: note = engineered CasX variant
QEIKRINKIRRRLVKDSNTKKAGKTGPMKTLLVRVMTPDLRERLENLRKKPENIPQPISNTSRANLNKLLTDYTEMKKAILHVYWEEFQKDPVGLMSRVAQPASKKIDQNKLKPEMDEKGNLTTAGFACSQCGQPLFVYKLEQVSEKGKAYTNYFGRCNVAEHEKLILLAQLKPEKDSDEAVTYSLGKFGQRALDFYSIHVTKESTHPVKPLAQIAGNRYASPVGKALSDACMGTIASFLSKYQDIIIEHQKVVKGNQKRLESLRELAGKENLEYPSVTLPPQPHTKEGVDAYNEVIARVRTWVNLNLWQKLKLSRDDAKPLLRLKGFPSFPLVERQANEVDWWDMVCNVKKLINEKKEDGKVFWQNLAGYKRQEALRPYLSSEEDRKKGKKFARYQLGDLLLHLEKKHGEDWGKVYDEAWERIDKKVEGLSKHIKLEEERRSEDAQSKAALTDWLRAKASFVIEGLKEADKDEFCRCELKLQKWYGDLRGKPFAIEAENSILDISGFSKQYNCAFIWQKDGVKKLNLYLIINYFKGGKLRFKKIKPEAFEANRFYTVINKKSGEIVPMEVNFNFDDPNLIILPLAFGKRQGREFIWNDLLSLETGSLKLANGRVIEKTLYNRRTRQDEPALFVALTFERREVLDSSNIKPMNLIGVDRGENIPAVIALTDPEGCPLSRFKDSLGNPTHILRIGESYKEKQRTIQAKKEVEQRRAGGYSRKYASKAKNLADDMVRNTARDLLYYAVTQDAMLIFENLSRGFGRQGKRTFMAERQYTRMEDWLTAKLAYEGLPSKTYLSKTLAQYTSKTCSNCGFTITSADYDRVLEKLKKTATGWMTTINGKELKVEGQITYYNRYKRQNVVKDLSVELDRLSEESVNNDISSWTKGRQGEALSLLKKRFSHRPVQEKFVCLNCGFETHADEQAALNIARSWLFLRSQEYKKYQTNKTTGNTDKRAFVETWQSFYRKKLKEVWKPAV

SEQ ID NO: 36193 - protein, 978 aa, synthetic construct
  REGION 1..978: note = engineered CasX variant
QEIKRINKIRRRLVKDSNTKKAGKTGPMKTLLVRVMTPDLRERLENLRKKPENIPQPISNTSRANLNKLLTDYTEMKKAILHVYWEEFQKDPVGLMSRVAQPASKKIDQNKLKPEMDEKGNLTTAGFACSQCGQPLFVYKLEQVSEKGKAYTNYFGRCNVAEHEKLILLAQLKPEKDSDEAVTYSLGKFGQRALDFYSIHVTKESTHPVKPLAQIAGNRYASYPVGKALSDACMGTIASFLSKYQDIIIEHQKVVKGNQKRLESLRELAGKENLEYPSVTLPPQPHTKEGVDAYNEVIARVRTWVNLNLWQKLKLSRDDAKPLLRLKGFPSFPLVERQANEVDWWDMVCNVKKLINEKKEDGKVFWQNLAGYKRQEALRPYLSSEEDRKKGKKFARYQLGDLLLHLEKKHGEDWGKVYDEAWERIDKKVEGLSKHIKLEEERRSEDAQSKAALTDWLRAKASFVIEGLKEADKDEFCRCELKLQKWYGDLRGKPFAIEAENSILDISGFSKQYNCAFIWQKDGVKKLNLYLIINYFKGGKLRFKKIKPEAFEANRFYTVINKKSGEIVPMEVNFNFDDPNLIILPLAFGKRQGREFIWNDLLSLETGSLKLANGRVIEKTLYNRRTRQDEPALFVALTFERREVLDSSNIKPMNLIGVDRGENIPAVIALTDPEGCPLSRFKDSLGNPTHILRIGESYKEKQRTIQAKKEVEQRRAGGYSRKYASKAKNLADDMVRNTARDLLYYAVTQDAMLIFENLSRGFGRQGKRTFMAERQYTRMEDWLTAKLAYEGLPSKTYLSKTLAQYTSKTCSNCGFTITSADYDRVLEKLKKTATGWMTTINGKELKVEGQITYYNRYKRQNVVKDLSVELDRLSEESVNNDISSWTKGRSGEALSLLKKRFSHRPVQEKFVCLNCEFETHADEQAALNIARSWLFLRSQEYKKYQTNKTTGNTDKRAFVETWQSFYRKKLKEVWKPAV

SEQ ID NO: 36194 - protein, 978 aa, synthetic construct
  REGION 1..978: note = engineered CasX variant
QEIKRINKIRRRLVKDSNTKKAGKTGPMKTLLVRVMTPDLRERLENLRKKPENIPQPISNTSRANLNKLLTDYTEMKKAILHVYWEEFQKDPVGLMSRVAQPASKKIDQNKLKPEMDEKGNLTTAGFACSQCGQPLFVYKLEQVSEKGKAYTNYFGRCNVAEHEKLILLAQLKPEKDSDEAVTYSLGKFGQRALDFYSIHVTKESTHPVKPLAQIAGNRYASHPVGKALSDACMGTIASFLSKYQDIIIEHQKVVKGNQKRLESLRELAGKENLEYPSVTLPPQPHTKEGVDAYNEVIARVRTWVNLNLWQKLKLSRDDAKPLLRLKGFPSFPLVERQANEVDWWDMVCNVKKLINEKKEDGKVFWQNLAGYKRQEALRPYLSSEEDRKKGKKFARYQLGDLLLHLEKKHGEDWGKVYDEAWERIDKKVEGLSKHIKLEEERRSEDAQSKAALTDWLRAKASFVIEGLKEADKDEFCRCELKLQKWYGDLRGKPFAIEAENSILDISGFSKQYNCAFIWQKDGVKKLNLYLIINYFKGGKLRFKKIKPEAFEANRFYTVINKKSGEIVPMEVNFNFDDPNLIILPLAFGKRQGREFIWNDLLSLETGSLKLANGRVIEKTLYNRRTRQDEPALFVALTFERREVLDSSNIKPMNLIGVDRGENIPAVIALTDPEGCPLSRFKDSLGNPTHILRIGESYKEKQRTIQAKKEVEQRRAGGYSRKYASKAKNLADDMVRNTARDLLYYAVTQDAMLIFENLSRGFGRQGKRTFMAERQYTRMEDWLTAKLAYEGLPSKTYLSKTLAQYTSKTCSNCGFTITSADYDRVLEKLKKTATGWMTTINGKELKVEGQITYYNRYKRQNVVKDLSVELDRLSEESVNNDISSWTKGRSGEALSLLKKRFSHRPVQEKFVCLNCEFETHADEQAALNIARSWLFLRSQEYKKYQTNKTTGNTDKRAFVETWQSFYRKKLKEVWKPAV

SEQ ID NO: 36195 - protein, 978 aa, synthetic construct
  REGION 1..978: note = engineered CasX variant
QEIKRINKIRRRLVKDSNTKKAGKTGPMKTLLVRVMTPDLRERLENLRKKPENIPQPISNTSRANLNKLLTDYTEMKKAILHVYWEEFQKDPVGLMSRVAQPASKKIDQNKLKPEMDEKGNLTTAGFACSQCGQPLFVYKLEQVSEKGKAYTNYFGRCNVAEHEKLILLAQLKPEKDSDEAVTYSLGKFGQRALDFYSIHVTKESTHPVKPLAQIAGNRYASSPVGKALSDACMGTIASFLSKYQDIIIEHQKVVKGNQKRLESLRELAGKENLEYPSVTLPPQPHTKEGVDAYNEVIARVRTWVNLNLWQKLKLSRDDAKPLLRLKGFPSFPLVERQANEVDWWDMVCNVKKLINEKKEDGKVFWQNLAGYKRQEALRPYLSSEEDRKKGKKFARYQLGDLLLHLEKKHGEDWGKVYDEAWERIDKKVEGLSKHIKLEEERRSEDAQSKAALTDWLRAKASFVIEGLKEADKDEFCRCELKLQKWYGDLRGKPFAIEAENSILDISGFSKQYNCAFIWQKDGVKKLNLYLIINYFKGGKLRFKKIKPEAFEANRFYTVINKKSGEIVPMEVNFNFDDPNLIILPLAFGKRQGREFIWNDLLSLETGSLKLANGRVIEKTLYNRRTRQDEPALFVALTFERREVLDSSNIKPMNLIGVDRGENIPAVIALTDPEGCPLSRFKDSLGNPTHILRIGESYKEKQRTIQAKKEVEQRRAGGYSRKYASKAKNLADDMVRNTARDLLYYAVTQDAMLIFENLSRGFGRQGKRTFMAERQYTRMEDWLTAKLAYEGLPSKTYLSKTLAQYTSKTCSNCGFTITSADYDRVLEKLKKTATGWMTTINGKELKVEGQITYYNRYKRQNVVKDLSVELDRLSEESVNNDISSWTKGRSGEALSLLKKRFSHRPVQEKFVCLNCEFETHADEQAALNIARSWLFLRSQEYKKYQTNKTTGNTDKRAFVETWQSFYRKKLKEVWKPAV

SEQ ID NO: 36196 - protein, 978 aa, synthetic construct
  REGION 1..978: note = engineered CasX variant
QEIKRINKIRRRLVKDSNTKKAGKTGPMKTLLVRVMTPDLRERLENLRKKPENIPQPISNTSRANLNKLLTDYTEMKKAILHVYWEEFQKDPVGLMSRVAQPASKKIDQNKLKPEMDEKGNLTTAGFACSQCGQPLFVYKLEQVSEKGKAYTNYFGRCNVAEHEKLILLAQLKPEKDSDEAVTYSLGKFGQRALDFYSIHVTKESTHPVKPLAQIAGNRYASTPVGKALSDACMGTIASFLSKYQDIIIEHQKVVKGNQKRLESLRELAGKENLEYPSVTLPPQPHTKEGVDAYNEVIARVRTWVNLNLWQKLKLSRDDAKPLLRLKGFPSFPLVERQANEVDWWDMVCNVKKLINEKKEDGKVFWQNLAGYKRQEALRPYLSSEEDRKKGKKFARYQLGDLLLHLEKKHGEDWGKVYDEAWERIDKKVEGLSKHIKLEEERRSEDAQSKAALTDWLRAKASFVIEGLKEADKDEFCRCELKLQKWYGDLRGKPFAIEAENSILDISGFSKQYNCAFIWQKDGVKKLNLYLIINYFKGGKLRFKKIKPEAFEANRFYTVINKKSGEIVPMEVNFNFDDPNLIILPLAFGKRQGREFIWNDLLSLETGSLKLANGRVIEKTLYNRRTRQDEPALFVALTFERREVLDSSNIKPMNLIGVDRGENIPAVIALTDPEGCPLSRFKDSLGNPTHILRIGESYKEKQRTIQAKKEVEQRRAGGYSRKYASKAKNLADDMVRNTARDLLYYAVTQDAMLIFENLSRGFGRQGKRTFMAERQYTRMEDWLTAKLAYEGLPSKTYLSKTLAQYTSKTCSNCGFTITSADYDRVLEKLKKTATGWMTTINGKELKVEGQITYYNRYKRQNVVKDLSVELDRLSEESVNNDISSWTKGRSGEALSLLKKRFSHRPVQEKFVCLNCEFETHADEQAALNIARSWLFLRSQEYKKYQTNKTTGNTDKRAFVETWQSFYRKKLKEVWKPAV

SEQ ID NO: 36197 - protein, 978 aa, synthetic construct
  REGION 1..978: note = engineered CasX variant
QEIKRINKIRRRLVKDSNTKKAGKTGPMKTLLVRVMTPDLRERLENLRKKPENIPQPISNTSRANLNKLLTDYTEMKKAILHVYWEEFQKDPVGLMSRVAQPASKKIDQNKLKPEMDEKGNLTTAGFACSQCGQPLFVYKLEQVSEKGKAYTNYFGRCNVAEHEKLILLAQLKPEKDSDEAVTYSLGKFGQRALDFYSIHVTKESTHPVKPLAQIAGNRYASAPVGKALSDACMGTIASFLSKYQDIIIEHQKVVKGNQKRLESLRELAGKENLEYPSVTLPPQPHTKEGVDAYNEVIARVRTWVNLNLWQKLKLSRDDAKPLLRLKGFPSFPLVERQANEVDWWDMVCNVKKLINEKKEDGKVFWQNLAGYKRQEALRPYLSSEEDRKKGKKFARYQLGDLLLHLEKKHGEDWGKVYDEAWERIDKKVEGLSKHIKLEEERRSEDAQSKAALTDWLRAKASFVIEGLKEADKDEFCRCELKLQKWYGDLRGKPFAIEAENSILDISGFSKQYNCAFIWQKDGVKKLNLYLIINYFKGGKLRFKKIKPEAFEANRFYTVINKKSGEIVPMEVNFNFDDPNLIILPLAFGKRQGREFIWNDLLSLETGSLKLANGRVIEKTLYNRRTRQDEPALFVALTFERREVLDSSNIKPMNLIGVDRGENIPAVIALTDPEGCPLSRFKDSLGNPTHILRIGESYKEKQRTIQAKKEVEQRRAGGYSRKYASKAKNLADDMVRNTARDLLYYAVTQDAMLIFENLSRGFGRQGKRTFMAERQYTRMEDWLTAKLAYEGLPSKTYLSKTLAQYTSKTCSNCGFTITSADYDRVLEKLKKTATGWMTTINGKELKVEGQITYYNRYKRQNVVKDLSVELDRLSEESVNNDISSWTKGRSGEALSLLKKRFSHRPVQEKFVCLNCEFETHADEQAALNIARSWLFLRSQEYKKYQTNKTTGNTDKRAFVETWQSFYRKKLKEVWKPAV

SEQ ID NO: 36198 - protein, 978 aa, synthetic construct
  REGION 1..978: note = engineered CasX variant
QEIKRINKIRRRLVKDSNTKKAGKTGPMKTLLVRVMTPDLRERLENLRKKPENIPQPISNTSRANLNKLLTDYTEMKKAILHVYWEEFQKDPVGLMSRVAQPASKKIDQNKLKPEMDEKGNLTTAGFACSQCGQPLFVYKLEQVSEKGKAYTNYFGRCNVAEHEKLILLAQLKPEKDSDEAVTYSLGKFGQRALDFYSIHVTKESTHPVKPLAQIAGNRYASVPVGKALSDACMGTIASFLSKYQDIIIEHQKVVKGNQKRLESLRELAGKENLEYPSVTLPPQPHTKEGVDAYNEVIARVRTWVNLNLWQKLKLSRDDAKPLLRLKGFPSFPLVERQANEVDWWDMVCNVKKLINEKKEDGKVFWQNLAGYKRQEALRPYLSSEEDRKKGKKFARYQLGDLLLHLEKKHGEDWGKVYDEAWERIDKKVEGLSKHIKLEEERRSEDAQSKAALTDWLRAKASFVIEGLKEADKDEFCRCELKLQKWYGDLRGKPFAIEAENSILDISGFSKQYNCAFIWQKDGVKKLNLYLIINYFKGGKLRFKKIKPEAFEANRFYTVINKKSGEIVPMEVNFNFDDPNLIILPLAFGKRQGREFIWNDLLSLETGSLKLANGRVIEKTLYNRRTRQDEPALFVALTFERREVLDSSNIKPMNLIGVDRGENIPAVIALTDPEGCPLSRFKDSLGNPTHILRIGESYKEKQRTIQAKKEVEQRRAGGYSRKYASKAKNLADDMVRNTARDLLYYAVTQDAMLIFENLSRGFGRQGKRTFMAERQYTRMEDWLTAKLAYEGLPSKTYLSKTLAQYTSKTCSNCGFTITSADYDRVLEKLKKTATGWMTTINGKELKVEGQITYYNRYKRQNVVKDLSVELDRLSEESVNNDISSWTKGRSGEALSLLKKRFSHRPVQEKFVCLNCEFETHADEQAALNIARSWLFLRSQEYKKYQTNKTTGNTDKRAFVETWQSFYRKKLKEVWKPAV

SEQ ID NO: 36199 - protein, 978 aa, synthetic construct
  REGION 1..978: note = engineered CasX variant
QEIKRINKIRRRLVKDSNTKKAGKTGPMKTLLVRVMTPDLRERLENLRKKPENIPQPISNTSRANLNKLLTDYTEMKKAILHVYWEEFQKDPVGLMSRVAQPASKKIDQNKLKPEMDEKGNLTTAGFACSQCGQPLFVYKLEQVSEKGKAYTNYFGRCNVAEHEKLIKLAQLKPEKDSDEAVTYSLGKFGQRALDFYSIHVTKESTHPVKPLAQIAGNRYASGPVGKALSDACMGTIASFLSKYQDIIIEHQKVVKGNQKRLESLRELAGKENLEYPSVTLPPQPHTKEGVDAYNEVIARVRTWVNLNLWQKLKLSRDDAKPLLRLKGFPSFPLVERQANEVDWWDMVCNVKKLINEKKEDGKVFWQNLAGYKRQEALRPYLSSEEDRKKGKKFARYQLGDLLLHLEKKHGEDWGKVYDEAWERIDKKVEGLSKHIKLEEERRSEDAQSKAALTDWLRAKASFVIEGLKEADKDEFCRCELKLQKWYGDLRGKPFAIEAENSILDISGFSKQYNCAFIWQKDGVKKLNLYLIINYFKGGKLRFKKIKPEAFEANRFYTVINKKSGEIVPMEVNFNFDDPNLIILPLAFGKRQGREFIWNDLLSLETGSLKLANGRVIEKTLYNRRTRQDEPALFVALTFERREVLDSSNIKPMNLIGVDRGENIPAVIALTDPEGCPLSRFKDSLGNPTHILRIGESYKEKQRTIQAKKEVEQRRAGGYSRKYASKAKNLADDMVRNTARDLLYYAVTQDAMLIFENLSRGFGRQGKRTFMAERQYTRMEDWLTAKLAYEGLPSKTYLSKTLAQYTSKTCSNCGFTITSADYDRVLEKLKKTATGWMTTINGKELKVEGQITYYNRYKRQNVVKDLSVELDRLSEESVNNDISSWTKGRSGEALSLLKKRFSHRPVQEKFVCLNCEFETHADEQAALNIARSWLFLRSQEYKKYQTNKTTGNTDKRAFVETWQSFYRKKLKEVWKPAV

SEQ ID NO: 36200 - protein, 977 aa, synthetic construct
  REGION 1..977: note = engineered CasX variant
QEIKRINKIRRRLVKDSNTKKAGKTGPMKTLLVRVMTPDLRERLENLRKKPENIPQPISNTSRANLNKLLTDYTEMKKAILHVYWEEFQKDPVGLMSRVAQPASKKIDQNKLKPEMDEKGNLTTAGFACSQCGQPLFVYKLEQVSEKGKAYTNYFGRCNVAEHEKLILLAQLKPEKDSDEAVTYSLGKFGQRALDFYSIHVTKESTHPVKPLAQIAGNRYASPVGKALSDACMGTIASFLSKYQDIIIEHQKVVKGNQKRLESLRELAGKENLEYPSVTLPPQPHTKEGVDAYNEVIARVRTWVNLNLWQKLKLSRDDAKPLLRLKGFPSFPLVERQANEVDWWDMVCNVKKLINEKKEDGKVFWQNLAGYKRQEALRPYLSSEEDRKKGKKFARYQLGDLLLHLEKKHGEDWGKVYDEAWERIDKKVEGLSKHIKLEEERRSEDAQSKAALTDWLRAKASFVIEGLKEADKDEFCRCELKLQKWYGDLRGKPFAIEAENSILDISGFSKQYNCAFIWQKDGVKKLNLYLIINYFKGGKLRFKKIKPEAFEANRFYTVINKKSGEIVPMEVNFNFDDPNLIILPLAFGKRQGREFIWNDLLSLETGSLKLANGRVIEKTLYNRRTRQDEPALFVALTFERREVLDSSNIKPMNLIGVDRGENIPAVIALTDPEGCPLSRFKDSLGNPTHILRIGESYKEKQRTIQAKKEVEQRRAGGYSRKYASKAKNLADDMVRNTARDLLYYAVTQDAMLIFENLSRGFGRQGKRTFMAERQYTRMEDWLTAKLAYEGLPSKTYLSKTLAQYTSKTCSNCGFTITSADYDRVLEKLKKTATGWMTTINGKELKVEGQITYYNRYKRQNVVKDLSVELDRLSEESVNNDISSWTKGRSGEALSLLKKRFSHRPVQEKFVCLNCEFETHADEQAALNIARSWLFLRSQEYKKYQTNKTTGNTDKRAFVETWQSFYRKKLKEVWKPAV

SEQ ID NO: 36201 - protein, 979 aa, synthetic construct
  REGION 1..979: note = engineered CasX variant
QEIKRINKIRRRLVKDSNTKKAGKTGPMKTLLVRVMTPDLRERLENLRKKPENIPQPISNTSRANLNKLLTDYTEMKKAILHVYWEEFQKDPVGLMSRVAQPASKKIDQNKLKPEMDEKGNLTTAGFACSQCGQPLFVYKLEQVSEKGKAYTNYFGRCNVAEHEKLILLAQLKPEKDSDEAVTYSLGKFGQRALDFYSIHVTKESTHPVKPLAQIAGNRYASYPVGKALSDACMGTIASFLSKYQDIIIEHQKVVKGNQKRLESLRELAGKENLEYPSVTLPPQPHTKEGVDAYNEVIARVRTWVNLNLWQKLKLSRDDAKPLLRLKGFPSFPLVERQANEVDWWDMVCNVKKLINEKKEDGKVFWQNLAGYKRQEALRPYLSSEEDRKKGKKFARYQLGDLLLHLEKKHGEDWGKVYDEAWERIDKKVEGLSKHIKLEEERRSEDAQSKAALTDWLRAKASFVIEGLKEADKDEFCRCELKLQKWYGDLRGKPFAIEAENSILDISGFSKQYNCAFIWQKDGVKKLNLYLIINYFKGGKLRFKKIKPEAFEANRFYTVINKKSGEIVPMEVNFNFDDPNLIILPLAFGKRQGREFIWNDLLSLETGSLKLANGRVIEKTLYNRRTRQDEPALFVALTFERREVLDSSNIKPMNLIGVDRGENIPAVIALTDPEGCPLSRFKDSLGNPTHILRIGESYKEKQRTIQAKKEVEQRRAGGYSRKYASKAKNLADDMVRNTARDLLYYAVTQDAMLIFENLSRGFGRQGKRTFMAERQYTRMEDWLTAKLAYEGLPSKTYLSKTLAQYTSKTCSNCGFTITSADYDRVLEKLKKTATGWMTTINGKELKVEGQITYYNRYKRQNVVKDLSVELDRLSEESVNNDISSWTKGRSGEALSLLKKRFSHRPVQEKFVCLNCGFETHADEQAALNIARSWLFLRSQEYKKYQTNKTSTGNTDKRAFVETWQSFYRKKLKEVWKPAV

SEQ ID NO: 36202 - protein, 979 aa, synthetic construct
  REGION 1..979: note = engineered CasX variant
QEIKRINKIRRRLVKDSNTKKAGKTGPMKTLLVRVMTPDLRERLENLRKKPENIPQPISNTSRANLNKLLTDYTEMKKAILHVYWEEFQKDPVGLMSRVAQPASKKIDQNKLKPEMDEKGNLTTAGFACSQCGQPLFVYKLEQVSEKGKAYTNYFGRCNVAEHEKLILLAQLKPEKDSDEAVTYSLGKFGQRALDFYSIHVTKESTHPVKPLAQIAGNRYASHPVGKALSDACMGTIASFLSKYQDIIIEHQKVVKGNQKRLESLRELAGKENLEYPSVTLPPQPHTKEGVDAYNEVIARVRTWVNLNLWQKLKLSRDDAKPLLRLKGFPSFPLVERQANEVDWWDMVCNVKKLINEKKEDGKVFWQNLAGYKRQEALRPYLSSEEDRKKGKKFARYQLGDLLLHLEKKHGEDWGKVYDEAWERIDKKVEGLSKHIKLEEERRSEDAQSKAALTDWLRAKASFVIEGLKEADKDEFCRCELKLQKWYGDLRGKPFAIEAENSILDISGFSKQYNCAFIWQKDGVKKLNLYLIINYFKGGKLRFKKIKPEAFEANRFYTVINKKSGEIVPMEVNFNFDDPNLIILPLAFGKRQGREFIWNDLLSLETGSLKLANGRVIEKTLYNRRTRQDEPALFVALTFERREVLDSSNIKPMNLIGVDRGENIPAVIALTDPEGCPLSRFKDSLGNPTHILRIGESYKEKQRTIQAKKEVEQRRAGGYSRKYASKAKNLADDMVRNTARDLLYYAVTQDAMLIFENLSRGFGRQGKRTFMAERQYTRMEDWLTAKLAYEGLPSKTYLSKTLAQYTSKTCSNCGFTITSADYDRVLEKLKKTATGWMTTINGKELKVEGQITYYNRYKRQNVVKDLSVELDRLSEESVNNDISSWTKGRSGEALSLLKKRFSHRPVQEKFVCLNCGFETHADEQAALNIARSWLFLRSQEYKKYQTNKTSTGNTDKRAFVETWQSFYRKKLKEVWKPAV

SEQ ID NO: 36203 - protein, 979 aa, synthetic construct
  REGION 1..979: note = engineered CasX variant
QEIKRINKIRRRLVKDSNTKKAGKTGPMKTLLVRVMTPDLRERLENLRKKPENIPQPISNTSRANLNKLLTDYTEMKKAILHVYWEEFQKDPVGLMSRVAQPASKKIDQNKLKPEMDEKGNLTTAGFACSQCGQPLFVYKLEQVSEKGKAYTNYFGRCNVAEHEKLILLAQLKPEKDSDEAVTYSLGKFGQRALDFYSIHVTKESTHPVKPLAQIAGNRYASSPVGKALSDACMGTIASFLSKYQDIIIEHQKVVKGNQKRLESLRELAGKENLEYPSVTLPPQPHTKEGVDAYNEVIARVRTWVNLNLWQKLKLSRDDAKPLLRLKGFPSFPLVERQANEVDWWDMVCNVKKLINEKKEDGKVFWQNLAGYKRQEALRPYLSSEEDRKKGKKFARYQLGDLLLHLEKKHGEDWGKVYDEAWERIDKKVEGLSKHIKLEEERRSEDAQSKAALTDWLRAKASFVIEGLKEADKDEFCRCELKLQKWYGDLRGKPFAIEAENSILDISGFSKQYNCAFIWQKDGVKKLNLYLIINYFKGGKLRFKKIKPEAFEANRFYTVINKKSGEIVPMEVNFNFDDPNLIILPLAFGKRQGREFIWNDLLSLETGSLKLANGRVIEKTLYNRRTRQDEPALFVALTFERREVLDSSNIKPMNLIGVDRGENIPAVIALTDPEGCPLSRFKDSLGNPTHILRIGESYKEKQRTIQAKKEVEQRRAGGYSRKYASKAKNLADDMVRNTARDLLYYAVTQDAMLIFENLSRGFGRQGKRTFMAERQYTRMEDWLTAKLAYEGLPSKTYLSKTLAQYTSKTCSNCGFTITSADYDRVLEKLKKTATGWMTTINGKELKVEGQITYYNRYKRQNVVKDLSVELDRLSEESVNNDISSWTKGRSGEALSLLKKRFSHRPVQEKFVCLNCGFETHADEQAALNIARSWLFLRSQEYKKYQTNKTSTGNTDKRAFVETWQSFYRKKLKEVWKPAV

SEQ ID NO: 36204 - protein, 979 aa, synthetic construct
  REGION 1..979: note = engineered CasX variant
QEIKRINKIRRRLVKDSNTKKAGKTGPMKTLLVRVMTPDLRERLENLRKKPENIPQPISNTSRANLNKLLTDYTEMKKAILHVYWEEFQKDPVGLMSRVAQPASKKIDQNKLKPEMDEKGNLTTAGFACSQCGQPLFVYKLEQVSEKGKAYTNYFGRCNVAEHEKLILLAQLKPEKDSDEAVTYSLGKFGQRALDFYSIHVTKESTHPVKPLAQIAGNRYASTPVGKALSDACMGTIASFLSKYQDIIIEHQKVVKGNQKRLESLRELAGKENLEYPSVTLPPQPHTKEGVDAYNEVIARVRTWVNLNLWQKLKLSRDDAKPLLRLKGFPSFPLVERQANEVDWWDMVCNVKKLINEKKEDGKVFWQNLAGYKRQEALRPYLSSEEDRKKGKKFARYQLGDLLLHLEKKHGEDWGKVYDEAWERIDKKVEGLSKHIKLEEERRSEDAQSKAALTDWLRAKASFVIEGLKEADKDEFCRCELKLQKWYGDLRGKPFAIEAENSILDISGFSKQYNCAFIWQKDGVKKLNLYLIINYFKGGKLRFKKIKPEAFEANRFYTVINKKSGEIVPMEVNFNFDDPNLIILPLAFGKRQGREFIWNDLLSLETGSLKLANGRVIEKTLYNRRTRQDEPALFVALTFERREVLDSSNIKPMNLIGVDRGENIPAVIALTDPEGCPLSRFKDSLGNPTHILRIGESYKEKQRTIQAKKEVEQRRAGGYSRKYASKAKNLADDMVRNTARDLLYYAVTQDAMLIFENLSRGFGRQGKRTFMAERQYTRMEDWLTAKLAYEGLPSKTYLSKTLAQYTSKTCSNCGFTITSADYDRVLEKLKKTATGWMTTINGKELKVEGQITYYNRYKRQNVVKDLSVELDRLSEESVNNDISSWTKGRSGEALSLLKKRFSHRPVQEKFVCLNCGFETHADEQAALNIARSWLFLRSQEYKKYQTNKTSTGNTDKRAFVETWQSFYRKKLKEVWKPAV

SEQ ID NO: 36205 - protein, 979 aa, synthetic construct
  REGION 1..979: note = engineered CasX variant
QEIKRINKIRRRLVKDSNTKKAGKTGPMKTLLVRVMTPDLRERLENLRKKPENIPQPISNTSRANLNKLLTDYTEMKKAILHVYWEEFQKDPVGLMSRVAQPASKKIDQNKLKPEMDEKGNLTTAGFACSQCGQPLFVYKLEQVSEKGKAYTNYFGRCNVAEHEKLILLAQLKPEKDSDEAVTYSLGKFGQRALDFYSIHVTKESTHPVKPLAQIAGNRYASAPVGKALSDACMGTIASFLSKYQDIIIEHQKVVKGNQKRLESLRELAGKENLEYPSVTLPPQPHTKEGVDAYNEVIARVRTWVNLNLWQKLKLSRDDAKPLLRLKGFPSFPLVERQANEVDWWDMVCNVKKLINEKKEDGKVFWQNLAGYKRQEALRPYLSSEEDRKKGKKFARYQLGDLLLHLEKKHGEDWGKVYDEAWERIDKKVEGLSKHIKLEEERRSEDAQSKAALTDWLRAKASFVIEGLKEADKDEFCRCELKLQKWYGDLRGKPFAIEAENSILDISGFSKQYNCAFIWQKDGVKKLNLYLIINYFKGGKLRFKKIKPEAFEANRFYTVINKKSGEIVPMEVNFNFDDPNLIILPLAFGKRQGREFIWNDLLSLETGSLKLANGRVIEKTLYNRRTRQDEPALFVALTFERREVLDSSNIKPMNLIGVDRGENIPAVIALTDPEGCPLSRFKDSLGNPTHILRIGESYKEKQRTIQAKKEVEQRRAGGYSRKYASKAKNLADDMVRNTARDLLYYAVTQDAMLIFENLSRGFGRQGKRTFMAERQYTRMEDWLTAKLAYEGLPSKTYLSKTLAQYTSKTCSNCGFTITSADYDRVLEKLKKTATGWMTTINGKELKVEGQITYYNRYKRQNVVKDLSVELDRLSEESVNNDISSWTKGRSGEALSLLKKRFSHRPVQEKFVCLNCGFETHADEQAALNIARSWLFLRSQEYKKYQTNKTSTGNTDKRAFVETWQSFYRKKLKEVWKPAV

SEQ ID NO: 36206 - protein, 979 aa, synthetic construct
  REGION 1..979: note = engineered CasX variant
QEIKRINKIRRRLVKDSNTKKAGKTGPMKTLLVRVMTPDLRERLENLRKKPENIPQPISNTSRANLNKLLTDYTEMKKAILHVYWEEFQKDPVGLMSRVAQPASKKIDQNKLKPEMDEKGNLTTAGFACSQCGQPLFVYKLEQVSEKGKAYTNYFGRCNVAEHEKLILLAQLKPEKDSDEAVTYSLGKFGQRALDFYSIHVTKESTHPVKPLAQIAGNRYASVPVGKALSDACMGTIASFLSKYQDIIIEHQKVVKGNQKRLESLRELAGKENLEYPSVTLPPQPHTKEGVDAYNEVIARVRTWVNLNLWQKLKLSRDDAKPLLRLKGFPSFPLVERQANEVDWWDMVCNVKKLINEKKEDGKVFWQNLAGYKRQEALRPYLSSEEDRKKGKKFARYQLGDLLLHLEKKHGEDWGKVYDEAWERIDKKVEGLSKHIKLEEERRSEDAQSKAALTDWLRAKASFVIEGLKEADKDEFCRCELKLQKWYGDLRGKPFAIEAENSILDISGFSKQYNCAFIWQKDGVKKLNLYLIINYFKGGKLRFKKIKPEAFEANRFYTVINKKSGEIVPMEVNFNFDDPNLIILPLAFGKRQGREFIWNDLLSLETGSLKLANGRVIEKTLYNRRTRQDEPALFVALTFERREVLDSSNIKPMNLIGVDRGENIPAVIALTDPEGCPLSRFKDSLGNPTHILRIGESYKEKQRTIQAKKEVEQRRAGGYSRKYASKAKNLADDMVRNTARDLLYYAVTQDAMLIFENLSRGFGRQGKRTFMAERQYTRMEDWLTAKLAYEGLPSKTYLSKTLAQYTSKTCSNCGFTITSADYDRVLEKLKKTATGWMTTINGKELKVEGQITYYNRYKRQNVVKDLSVELDRLSEESVNNDISSWTKGRSGEALSLLKKRFSHRPVQEKFVCLNCGFETHADEQAALNIARSWLFLRSQEYKKYQTNKTSTGNTDKRAFVETWQSFYRKKLKEVWKPAV

SEQ ID NO: 36207 - protein, 979 aa, synthetic construct
  REGION 1..979: note = engineered CasX variant
QEIKRINKIRRRLVKDSNTKKAGKTGPMKTLLVRVMTPDLRERLENLRKKPENIPQPISNTSRANLNKLLTDYTEMKKAILHVYWEEFQKDPVGLMSRVAQPASKKIDQNKLKPEMDEKGNLTTAGFACSQCGQPLFVYKLEQVSEKGKAYTNYFGRCNVAEHEKLIKLAQLKPEKDSDEAVTYSLGKFGQRALDFYSIHVTKESTHPVKPLAQIAGNRYASGPVGKALSDACMGTIASFLSKYQDIIIEHQKVVKGNQKRLESLRELAGKENLEYPSVTLPPQPHTKEGVDAYNEVIARVRTWVNLNLWQKLKLSRDDAKPLLRLKGFPSFPLVERQANEVDWWDMVCNVKKLINEKKEDGKVFWQNLAGYKRQEALRPYLSSEEDRKKGKKFARYQLGDLLLHLEKKHGEDWGKVYDEAWERIDKKVEGLSKHIKLEEERRSEDAQSKAALTDWLRAKASFVIEGLKEADKDEFCRCELKLQKWYGDLRGKPFAIEAENSILDISGFSKQYNCAFIWQKDGVKKLNLYLIINYFKGGKLRFKKIKPEAFEANRFYTVINKKSGEIVPMEVNFNFDDPNLIILPLAFGKRQGREFIWNDLLSLETGSLKLANGRVIEKTLYNRRTRQDEPALFVALTFERREVLDSSNIKPMNLIGVDRGENIPAVIALTDPEGCPLSRFKDSLGNPTHILRIGESYKEKQRTIQAKKEVEQRRAGGYSRKYASKAKNLADDMVRNTARDLLYYAVTQDAMLIFENLSRGFGRQGKRTFMAERQYTRMEDWLTAKLAYEGLPSKTYLSKTLAQYTSKTCSNCGFTITSADYDRVLEKLKKTATGWMTTINGKELKVEGQITYYNRYKRQNVVKDLSVELDRLSEESVNNDISSWTKGRSGEALSLLKKRFSHRPVQEKFVCLNCGFETHADEQAALNIARSWLFLRSQEYKKYQTNKTSTGNTDKRAFVETWQSFYRKKLKEVWKPAV

SEQ ID NO: 36208 - protein, 978 aa, synthetic construct
  REGION 1..978: note = engineered CasX variant
QEIKRINKIRRRLVKDSNTKKAGKTGPMKTLLVRVMTPDLRERLENLRKKPENIPQPISNTSRANLNKLLTDYTEMKKAILHVYWEEFQKDPVGLMSRVAQPASKKIDQNKLKPEMDEKGNLTTAGFACSQCGQPLFVYKLEQVSEKGKAYTNYFGRCNVAEHEKLILLAQLKPEKDSDEAVTYSLGKFGQRALDFYSIHVTKESTHPVKPLAQIAGNRYASPVGKALSDACMGTIASFLSKYQDIIIEHQKVVKGNQKRLESLRELAGKENLEYPSVTLPPQPHTKEGVDAYNEVIARVRTWVNLNLWQKLKLSRDDAKPLLRLKGFPSFPLVERQANEVDWWDMVCNVKKLINEKKEDGKVFWQNLAGYKRQEALRPYLSSEEDRKKGKKFARYQLGDLLLHLEKKHGEDWGKVYDEAWERIDKKVEGLSKHIKLEEERRSEDAQSKAALTDWLRAKASFVIEGLKEADKDEFCRCELKLQKWYGDLRGKPFAIEAENSILDISGFSKQYNCAFIWQKDGVKKLNLYLIINYFKGGKLRFKKIKPEAFEANRFYTVINKKSGEIVPMEVNFNFDDPNLIILPLAFGKRQGREFIWNDLLSLETGSLKLANGRVIEKTLYNRRTRQDEPALFVALTFERREVLDSSNIKPMNLIGVDRGENIPAVIALTDPEGCPLSRFKDSLGNPTHILRIGESYKEKQRTIQAKKEVEQRRAGGYSRKYASKAKNLADDMVRNTARDLLYYAVTQDAMLIFENLSRGFGRQGKRTFMAERQYTRMEDWLTAKLAYEGLPSKTYLSKTLAQYTSKTCSNCGFTITSADYDRVLEKLKKTATGWMTTINGKELKVEGQITYYNRYKRQNVVKDLSVELDRLSEESVNNDISSWTKGRSGEALSLLKKRFSHRPVQEKFVCLNCGFETHADEQAALNIARSWLFLRSQEYKKYQTNKTSTGNTDKRAFVETWQSFYRKKLKEVWKPAV

SEQ ID NO: 36209 - protein, 979 aa, synthetic construct
  REGION 1..979: note = engineered CasX variant
QEIKRINKIRRRLVKDSNTKKAGKTGPMKTLLVRVMTPDLRERLENLRKKPENIPQPISNTSRANLNKLLTDYTEMKKAILHVYWEEFQKDPVGLMSRVAQPASKKIDQNKLKPEMDEKGNLTTAGFACSQCGQPLFVYKLEQVSEKGKAYTNYFGRCNVAEHEKLILLAQLKPEKDSDEAVTYSLGKFGQRALDFYSIHVTKESTHPVKPLAQIAGNRYASYPVGKALSDACMGTIASFLSKYQDIIIEHQKVVKGNQKRLESLRELAGKENLEYPSVTLPPQPHTKEGVDAYNEVIARVRTWVNLNLWQKLKLSRDDAKPLLRLKGFPSFPLVERQANEVDWWDMVCNVKKLINEKKEDGKVFWQNLAGYKRQEALRPYLSSEEDRKKGKKFARYQLGDLLLHLEKKHGEDWGKVYDEAWERIDKKVEGLSKHIKLEEERRSEDAQSKAALTDWLRAKASFVIEGLKEADKDEFCRCELKLQKWYGDLRGKPFAIEAENSILDISGFSKQYNCAFIWQKDGVKKLNLYLIINYFKGGKLRFKKIKPEAFEANRFYTVINKKSGEIVPMEVNFNFDDPNLIILPLAFGKRQGREFIWNDLLSLETGSLKLANGRVIEKTLYNRRTRQDEPALFVALTFERREVLDSSNIKPMNLIGVDRGENIPAVIALTDPEGCPLSRFKDSLGNPTHILRIGESYKEKQRTIQAKKEVEQRRAGGYSRKYASKAKNLADDMVRNTARDLLYYAVTQDAMLIFENLSRGFGRQGKRTFMAERQYTRMEDWLTAKLAYEGLPSKTYLSKTLAQYTSKTCSNCGFTITSADYDRVLEKLKKTATGWMTTINGKELKVEGQITYYNRYKRQNVVKDLSVELDRLSEESVNNDISSWTKGRSGEALSLLKKRFSHRPVQEKFVCLNCGFETHADEQAALNIARSWLFLRSQEYKKYQTNKTTGKNTDKRAFVETWQSFYRKKLKEVWKPAV

SEQ ID NO: 36210 - protein, 979 aa, synthetic construct
  REGION 1..979: note = engineered CasX variant
QEIKRINKIRRRLVKDSNTKKAGKTGPMKTLLVRVMTPDLRERLENLRKKPENIPQPISNTSRANLNKLLTDYTEMKKAILHVYWEEFQKDPVGLMSRVAQPASKKIDQNKLKPEMDEKGNLTTAGFACSQCGQPLFVYKLEQVSEKGKAYTNYFGRCNVAEHEKLILLAQLKPEKDSDEAVTYSLGKFGQRALDFYSIHVTKESTHPVKPLAQIAGNRYASHPVGKALSDACMGTIASFLSKYQDIIIEHQKVVKGNQKRLESLRELAGKENLEYPSVTLPPQPHTKEGVDAYNEVIARVRTWVNLNLWQKLKLSRDDAKPLLRLKGFPSFPLVERQANEVDWWDMVCNVKKLINEKKEDGKVFWQNLAGYKRQEALRPYLSSEEDRKKGKKFARYQLGDLLLHLEKKHGEDWGKVYDEAWERIDKKVEGLSKHIKLEEERRSEDAQSKAALTDWLRAKASFVIEGLKEADKDEFCRCELKLQKWYGDLRGKPFAIEAENSILDISGFSKQYNCAFIWQKDGVKKLNLYLIINYFKGGKLRFKKIKPEAFEANRFYTVINKKSGEIVPMEVNFNFDDPNLIILPLAFGKRQGREFIWNDLLSLETGSLKLANGRVIEKTLYNRRTRQDEPALFVALTFERREVLDSSNIKPMNLIGVDRGENIPAVIALTDPEGCPLSRFKDSLGNPTHILRIGESYKEKQRTIQAKKEVEQRRAGGYSRKYASKAKNLADDMVRNTARDLLYYAVTQDAMLIFENLSRGFGRQGKRTFMAERQYTRMEDWLTAKLAYEGLPSKTYLSKTLAQYTSKTCSNCGFTITSADYDRVLEKLKKTATGWMTTINGKELKVEGQITYYNRYKRQNVVKDLSVELDRLSEESVNNDISSWTKGRSGEALSLLKKRFSHRPVQEKFVCLNCGFETHADEQAALNIARSWLFLRSQEYKKYQTNKTTGKNTDKRAFVETWQSFYRKKLKEVWKPAV

SEQ ID NO: 36211 - protein, 979 aa, synthetic construct
  REGION 1..979: note = engineered CasX variant
QEIKRINKIRRRLVKDSNTKKAGKTGPMKTLLVRVMTPDLRERLENLRKKPENIPQPISNTSRANLNKLLTDYTEMKKAILHVYWEEFQKDPVGLMSRVAQPASKKIDQNKLKPEMDEKGNLTTAGFACSQCGQPLFVYKLEQVSEKGKAYTNYFGRCNVAEHEKLILLAQLKPEKDSDEAVTYSLGKFGQRALDFYSIHVTKESTHPVKPLAQIAGNRYASSPVGKALSDACMGTIASFLSKYQDIIIEHQKVVKGNQKRLESLRELAGKENLEYPSVTLPPQPHTKEGVDAYNEVIARVRTWVNLNLWQKLKLSRDDAKPLLRLKGFPSFPLVERQANEVDWWDMVCNVKKLINEKKEDGKVFWQNLAGYKRQEALRPYLSSEEDRKKGKKFARYQLGDLLLHLEKKHGEDWGKVYDEAWERIDKKVEGLSKHIKLEEERRSEDAQSKAALTDWLRAKASFVIEGLKEADKDEFCRCELKLQKWYGDLRGKPFAIEAENSILDISGFSKQYNCAFIWQKDGVKKLNLYLIINYFKGGKLRFKKIKPEAFEANRFYTVINKKSGEIVPMEVNFNFDDPNLIILPLAFGKRQGREFIWNDLLSLETGSLKLANGRVIEKTLYNRRTRQDEPALFVALTFERREVLDSSNIKPMNLIGVDRGENIPAVIALTDPEGCPLSRFKDSLGNPTHILRIGESYKEKQRTIQAKKEVEQRRAGGYSRKYASKAKNLADDMVRNTARDLLYYAVTQDAMLIFENLSRGFGRQGKRTFMAERQYTRMEDWLTAKLAYEGLPSKTYLSKTLAQYTSKTCSNCGFTITSADYDRVLEKLKKTATGWMTTINGKELKVEGQITYYNRYKRQNVVKDLSVELDRLSEESVNNDISSWTKGRSGEALSLLKKRFSHRPVQEKFVCLNCGFETHADEQAALNIARSWLFLRSQEYKKYQTNKTTGKNTDKRAFVETWQSFYRKKLKEVWKPAV

SEQ ID NO: 36212 - protein, 979 aa, synthetic construct
  REGION 1..979: note = engineered CasX variant
QEIKRINKIRRRLVKDSNTKKAGKTGPMKTLLVRVMTPDLRERLENLRKKPENIPQPISNTSRANLNKLLTDYTEMKKAILHVYWEEFQKDPVGLMSRVAQPASKKIDQNKLKPEMDEKGNLTTAGFACSQCGQPLFVYKLEQVSEKGKAYTNYFGRCNVAEHEKLILLAQLKPEKDSDEAVTYSLGKFGQRALDFYSIHVTKESTHPVKPLAQIAGNRYASTPVGKALSDACMGTIASFLSKYQDIIIEHQKVVKGNQKRLESLRELAGKENLEYPSVTLPPQPHTKEGVDAYNEVIARVRTWVNLNLWQKLKLSRDDAKPLLRLKGFPSFPLVERQANEVDWWDMVCNVKKLINEKKEDGKVFWQNLAGYKRQEALRPYLSSEEDRKKGKKFARYQLGDLLLHLEKKHGEDWGKVYDEAWERIDKKVEGLSKHIKLEEERRSEDAQSKAALTDWLRAKASFVIEGLKEADKDEFCRCELKLQKWYGDLRGKPFAIEAENSILDISGFSKQYNCAFIWQKDGVKKLNLYLIINYFKGGKLRFKKIKPEAFEANRFYTVINKKSGEIVPMEVNFNFDDPNLIILPLAFGKRQGREFIWNDLLSLETGSLKLANGRVIEKTLYNRRTRQDEPALFVALTFERREVLDSSNIKPMNLIGVDRGENIPAVIALTDPEGCPLSRFKDSLGNPTHILRIGESYKEKQRTIQAKKEVEQRRAGGYSRKYASKAKNLADDMVRNTARDLLYYAVTQDAMLIFENLSRGFGRQGKRTFMAERQYTRMEDWLTAKLAYEGLPSKTYLSKTLAQYTSKTCSNCGFTITSADYDRVLEKLKKTATGWMTTINGKELKVEGQITYYNRYKRQNVVKDLSVELDRLSEESVNNDISSWTKGRSGEALSLLKKRFSHRPVQEKFVCLNCGFETHADEQAALNIARSWLFLRSQEYKKYQTNKTTGKNTDKRAFVETWQSFYRKKLKEVWKPAV

SEQ ID NO: 36213 - protein, 979 aa, synthetic construct
  REGION 1..979: note = engineered CasX variant
QEIKRINKIRRRLVKDSNTKKAGKTGPMKTLLVRVMTPDLRERLENLRKKPENIPQPISNTSRANLNKLLTDYTEMKKAILHVYWEEFQKDPVGLMSRVAQPASKKIDQNKLKPEMDEKGNLTTAGFACSQCGQPLFVYKLEQVSEKGKAYTNYFGRCNVAEHEKLILLAQLKPEKDSDEAVTYSLGKFGQRALDFYSIHVTKESTHPVKPLAQIAGNRYASAPVGKALSDACMGTIASFLSKYQDIIIEHQKVVKGNQKRLESLRELAGKENLEYPSVTLPPQPHTKEGVDAYNEVIARVRTWVNLNLWQKLKLSRDDAKPLLRLKGFPSFPLVERQANEVDWWDMVCNVKKLINEKKEDGKVFWQNLAGYKRQEALRPYLSSEEDRKKGKKFARYQLGDLLLHLEKKHGEDWGKVYDEAWERIDKKVEGLSKHIKLEEERRSEDAQSKAALTDWLRAKASFVIEGLKEADKDEFCRCELKLQKWYGDLRGKPFAIEAENSILDISGFSKQYNCAFIWQKDGVKKLNLYLIINYFKGGKLRFKKIKPEAFEANRFYTVINKKSGEIVPMEVNFNFDDPNLIILPLAFGKRQGREFIWNDLLSLETGSLKLANGRVIEKTLYNRRTRQDEPALFVALTFERREVLDSSNIKPMNLIGVDRGENIPAVIALTDPEGCPLSRFKDSLGNPTHILRIGESYKEKQRTIQAKKEVEQRRAGGYSRKYASKAKNLADDMVRNTARDLLYYAVTQDAMLIFENLSRGFGRQGKRTFMAERQYTRMEDWLTAKLAYEGLPSKTYLSKTLAQYTSKTCSNCGFTITSADYDRVLEKLKKTATGWMTTINGKELKVEGQITYYNRYKRQNVVKDLSVELDRLSEESVNNDISSWTKGRSGEALSLLKKRFSHRPVQEKFVCLNCGFETHADEQAALNIARSWLFLRSQEYKKYQTNKTTGKNTDKRAFVETWQSFYRKKLKEVWKPAV

SEQ ID NO: 36214 - protein, 979 aa, synthetic construct
  REGION 1..979: note = engineered CasX variant
QEIKRINKIRRRLVKDSNTKKAGKTGPMKTLLVRVMTPDLRERLENLRKKPENIPQPISNTSRANLNKLLTDYTEMKKAILHVYWEEFQKDPVGLMSRVAQPASKKIDQNKLKPEMDEKGNLTTAGFACSQCGQPLFVYKLEQVSEKGKAYTNYFGRCNVAEHEKLILLAQLKPEKDSDEAVTYSLGKFGQRALDFYSIHVTKESTHPVKPLAQIAGNRYASVPVGKALSDACMGTIASFLSKYQDIIIEHQKVVKGNQKRLESLRELAGKENLEYPSVTLPPQPHTKEGVDAYNEVIARVRTWVNLNLWQKLKLSRDDAKPLLRLKGFPSFPLVERQANEVDWWDMVCNVKKLINEKKEDGKVFWQNLAGYKRQEALRPYLSSEEDRKKGKKFARYQLGDLLLHLEKKHGEDWGKVYDEAWERIDKKVEGLSKHIKLEEERRSEDAQSKAALTDWLRAKASFVIEGLKEADKDEFCRCELKLQKWYGDLRGKPFAIEAENSILDISGFSKQYNCAFIWQKDGVKKLNLYLIINYFKGGKLRFKKIKPEAFEANRFYTVINKKSGEIVPMEVNFNFDDPNLIILPLAFGKRQGREFIWNDLLSLETGSLKLANGRVIEKTLYNRRTRQDEPALFVALTFERREVLDSSNIKPMNLIGVDRGENIPAVIALTDPEGCPLSRFKDSLGNPTHILRIGESYKEKQRTIQAKKEVEQRRAGGYSRKYASKAKNLADDMVRNTARDLLYYAVTQDAMLIFENLSRGFGRQGKRTFMAERQYTRMEDWLTAKLAYEGLPSKTYLSKTLAQYTSKTCSNCGFTITSADYDRVLEKLKKTATGWMTTINGKELKVEGQITYYNRYKRQNVVKDLSVELDRLSEESVNNDISSWTKGRSGEALSLLKKRFSHRPVQEKFVCLNCGFETHADEQAALNIARSWLFLRSQEYKKYQTNKTTGKNTDKRAFVETWQSFYRKKLKEVWKPAV

SEQ ID NO: 36215 - protein, 979 aa, synthetic construct
  REGION 1..979: note = engineered CasX variant
QEIKRINKIRRRLVKDSNTKKAGKTGPMKTLLVRVMTPDLRERLENLRKKPENIPQPISNTSRANLNKLLTDYTEMKKAILHVYWEEFQKDPVGLMSRVAQPASKKIDQNKLKPEMDEKGNLTTAGFACSQCGQPLFVYKLEQVSEKGKAYTNYFGRCNVAEHEKLIKLAQLKPEKDSDEAVTYSLGKFGQRALDFYSIHVTKESTHPVKPLAQIAGNRYASGPVGKALSDACMGTIASFLSKYQDIIIEHQKVVKGNQKRLESLRELAGKENLEYPSVTLPPQPHTKEGVDAYNEVIARVRTWVNLNLWQKLKLSRDDAKPLLRLKGFPSFPLVERQANEVDWWDMVCNVKKLINEKKEDGKVFWQNLAGYKRQEALRPYLSSEEDRKKGKKFARYQLGDLLLHLEKKHGEDWGKVYDEAWERIDKKVEGLSKHIKLEEERRSEDAQSKAALTDWLRAKASFVIEGLKEADKDEFCRCELKLQKWYGDLRGKPFAIEAENSILDISGFSKQYNCAFIWQKDGVKKLNLYLIINYFKGGKLRFKKIKPEAFEANRFYTVINKKSGEIVPMEVNFNFDDPNLIILPLAFGKRQGREFIWNDLLSLETGSLKLANGRVIEKTLYNRRTRQDEPALFVALTFERREVLDSSNIKPMNLIGVDRGENIPAVIALTDPEGCPLSRFKDSLGNPTHILRIGESYKEKQRTIQAKKEVEQRRAGGYSRKYASKAKNLADDMVRNTARDLLYYAVTQDAMLIFENLSRGFGRQGKRTFMAERQYTRMEDWLTAKLAYEGLPSKTYLSKTLAQYTSKTCSNCGFTITSADYDRVLEKLKKTATGWMTTINGKELKVEGQITYYNRYKRQNVVKDLSVELDRLSEESVNNDISSWTKGRSGEALSLLKKRFSHRPVQEKFVCLNCGFETHADEQAALNIARSWLFLRSQEYKKYQTNKTTGKNTDKRAFVETWQSFYRKKLKEVWKPAV

SEQ ID NO: 36216 - protein, 978 aa, synthetic construct
  REGION 1..978: note = engineered CasX variant
QEIKRINKIRRRLVKDSNTKKAGKTGPMKTLLVRVMTPDLRERLENLRKKPENIPQPISNTSRANLNKLLTDYTEMKKAILHVYWEEFQKDPVGLMSRVAQPASKKIDQNKLKPEMDEKGNLTTAGFACSQCGQPLFVYKLEQVSEKGKAYTNYFGRCNVAEHEKLILLAQLKPEKDSDEAVTYSLGKFGQRALDFYSIHVTKESTHPVKPLAQIAGNRYASPVGKALSDACMGTIASFLSKYQDIIIEHQKVVKGNQKRLESLRELAGKENLEYPSVTLPPQPHTKEGVDAYNEVIARVRTWVNLNLWQKLKLSRDDAKPLLRLKGFPSFPLVERQANEVDWWDMVCNVKKLINEKKEDGKVFWQNLAGYKRQEALRPYLSSEEDRKKGKKFARYQLGDLLLHLEKKHGEDWGKVYDEAWERIDKKVEGLSKHIKLEEERRSEDAQSKAALTDWLRAKASFVIEGLKEADKDEFCRCELKLQKWYGDLRGKPFAIEAENSILDISGFSKQYNCAFIWQKDGVKKLNLYLIINYFKGGKLRFKKIKPEAFEANRFYTVINKKSGEIVPMEVNFNFDDPNLIILPLAFGKRQGREFIWNDLLSLETGSLKLANGRVIEKTLYNRRTRQDEPALFVALTFERREVLDSSNIKPMNLIGVDRGENIPAVIALTDPEGCPLSRFKDSLGNPTHILRIGESYKEKQRTIQAKKEVEQRRAGGYSRKYASKAKNLADDMVRNTARDLLYYAVTQDAMLIFENLSRGFGRQGKRTFMAERQYTRMEDWLTAKLAYEGLPSKTYLSKTLAQYTSKTCSNCGFTITSADYDRVLEKLKKTATGWMTTINGKELKVEGQITYYNRYKRQNVVKDLSVELDRLSEESVNNDISSWTKGRSGEALSLLKKRFSHRPVQEKFVCLNCGFETHADEQAALNIARSWLFLRSQEYKKYQTNKTTGKNTDKRAFVETWQSFYRKKLKEVWKPAV

SEQ ID NO: 36217 - protein, 978 aa, synthetic construct
  REGION 1..978: note = engineered CasX variant
QEIKRINKIRRRLVKDSNTKKAGKTGPMKTLLVRVMTPDLRERLENLRKKPENIPQPISNTSRANLNKLLTDYTEMKKAILHVYWEEFQKDPVGLMSRVAQPASKKIDQNKLKPEMDEKGNLTTAGFACSQCGQPLFVYKLEQVSEKGKAYTNYFGRCNVAEHEKLILLAQLKPEKDSDEAVTYSLGKFGQRALDFYSIHVTKESTHPVKPLAQIAGNRYASYPVGKALSDACMGTIASFLSKYQDIIIEHQKVVKGNQKRLESLRELAGKENLEYPSVTLPPQPHTKEGVDAYNEVIARVRTWVNLNLWQKLKLSRDDAKPLLRLKKFPSFPLVERQANEVDWWDMVCNVKKLINEKKEDGKVFWQNLAGYKRQEALRPYLSSEEDRKKGKKFARYQLGDLLLHLEKKHGEDWGKVYDEAWERIDKKVEGLSKHIKLEEERRSEDAQSKAALTDWLRAKASFVIEGLKEADKDEFCRCELKLQKWYGDLRGKPFAIEAENSILDISGFSKQYNCAFIWQKDGVKKLNLYLIINYFKGGKLRFKKIKPEAFEANRFYTVINKKSGEIVPMEVNFNFDDPNLIILPLAFGKRQGREFIWNDLLSLETGSLKLANGRVIEKTLYNRRTRQDEPALFVALTFERREVLDSSNIKPMNLIGVDRGENIPAVIALTDPEGCPLSRFKDSLGNPTHILRIGESYKEKQRTIQAKKEVEQRRAGGYSRKYASKAKNLADDMVRNTARDLLYYAVTQDAMLIFENLSRGFGRQGKRTFMAERQYTRMEDWLTAKLAYEGLPSKTYLSKTLAQYTSKTCSNCGFTITSADYDRVLEKLKKTATGWMTTINGKELKVEGQITYYNRYKRQNVVKDLSVELDRLSEESVNNDISSWTKGRSGEALSLLKKRFSHRPVQEKFVCLNCGFETHADEQAALNIARSWLFLRSQEYKKYQTNKTTGNTDKRAFVETWQSFYRKKLKEVWKPAV

SEQ ID NO: 36218 - protein, 978 aa, synthetic construct
  REGION 1..978: note = engineered CasX variant
QEIKRINKIRRRLVKDSNTKKAGKTGPMKTLLVRVMTPDLRERLENLRKKPENIPQPISNTSRANLNKLLTDYTEMKKAILHVYWEEFQKDPVGLMSRVAQPASKKIDQNKLKPEMDEKGNLTTAGFACSQCGQPLFVYKLEQVSEKGKAYTNYFGRCNVAEHEKLILLAQLKPEKDSDEAVTYSLGKFGQRALDFYSIHVTKESTHPVKPLAQIAGNRYASHPVGKALSDACMGTIASFLSKYQDIIIEHQKVVKGNQKRLESLRELAGKENLEYPSVTLPPQPHTKEGVDAYNEVIARVRTWVNLNLWQKLKLSRDDAKPLLRLKKFPSFPLVERQANEVDWWDMVCNVKKLINEKKEDGKVFWQNLAGYKRQEALRPYLSSEEDRKKGKKFARYQLGDLLLHLEKKHGEDWGKVYDEAWERIDKKVEGLSKHIKLEEERRSEDAQSKAALTDWLRAKASFVIEGLKEADKDEFCRCELKLQKWYGDLRGKPFAIEAENSILDISGFSKQYNCAFIWQKDGVKKLNLYLIINYFKGGKLRFKKIKPEAFEANRFYTVINKKSGEIVPMEVNFNFDDPNLIILPLAFGKRQGREFIWNDLLSLETGSLKLANGRVIEKTLYNRRTRQDEPALFVALTFERREVLDSSNIKPMNLIGVDRGENIPAVIALTDPEGCPLSRFKDSLGNPTHILRIGESYKEKQRTIQAKKEVEQRRAGGYSRKYASKAKNLADDMVRNTARDLLYYAVTQDAMLIFENLSRGFGRQGKRTFMAERQYTRMEDWLTAKLAYEGLPSKTYLSKTLAQYTSKTCSNCGFTITSADYDRVLEKLKKTATGWMTTINGKELKVEGQITYYNRYKRQNVVKDLSVELDRLSEESVNNDISSWTKGRSGEALSLLKKRFSHRPVQEKFVCLNCGFETHADEQAALNIARSWLFLRSQEYKKYQTNKTTGNTDKRAFVETWQSFYRKKLKEVWKPAV

SEQ ID NO: 36219 - protein, 978 aa, synthetic construct
  REGION 1..978: note = engineered CasX variant
QEIKRINKIRRRLVKDSNTKKAGKTGPMKTLLVRVMTPDLRERLENLRKKPENIPQPISNTSRANLNKLLTDYTEMKKAILHVYWEEFQKDPVGLMSRVAQPASKKIDQNKLKPEMDEKGNLTTAGFACSQCGQPLFVYKLEQVSEKGKAYTNYFGRCNVAEHEKLILLAQLKPEKDSDEAVTYSLGKFGQRALDFYSIHVTKESTHPVKPLAQIAGNRYASSPVGKALSDACMGTIASFLSKYQDIIIEHQKVVKGNQKRLESLRELAGKENLEYPSVTLPPQPHTKEGVDAYNEVIARVRTWVNLNLWQKLKLSRDDAKPLLRLKKFPSFPLVERQANEVDWWDMVCNVKKLINEKKEDGKVFWQNLAGYKRQEALRPYLSSEEDRKKGKKFARYQLGDLLLHLEKKHGEDWGKVYDEAWERIDKKVEGLSKHIKLEEERRSEDAQSKAALTDWLRAKASFVIEGLKEADKDEFCRCELKLQKWYGDLRGKPFAIEAENSILDISGFSKQYNCAFIWQKDGVKKLNLYLIINYFKGGKLRFKKIKPEAFEANRFYTVINKKSGEIVPMEVNFNFDDPNLIILPLAFGKRQGREFIWNDLLSLETGSLKLANGRVIEKTLYNRRTRQDEPALFVALTFERREVLDSSNIKPMNLIGVDRGENIPAVIALTDPEGCPLSRFKDSLGNPTHILRIGESYKEKQRTIQAKKEVEQRRAGGYSRKYASKAKNLADDMVRNTARDLLYYAVTQDAMLIFENLSRGFGRQGKRTFMAERQYTRMEDWLTAKLAYEGLPSKTYLSKTLAQYTSKTCSNCGFTITSADYDRVLEKLKKTATGWMTTINGKELKVEGQITYYNRYKRQNVVKDLSVELDRLSEESVNNDISSWTKGRSGEALSLLKKRFSHRPVQEKFVCLNCGFETHADEQAALNIARSWLFLRSQEYKKYQTNKTTGNTDKRAFVETWQSFYRKKLKEVWKPAV

SEQ ID NO: 36220 - protein, 978 aa, synthetic construct
  REGION 1..978: note = engineered CasX variant
QEIKRINKIRRRLVKDSNTKKAGKTGPMKTLLVRVMTPDLRERLENLRKKPENIPQPISNTSRANLNKLLTDYTEMKKAILHVYWEEFQKDPVGLMSRVAQPASKKIDQNKLKPEMDEKGNLTTAGFACSQCGQPLFVYKLEQVSEKGKAYTNYFGRCNVAEHEKLILLAQLKPEKDSDEAVTYSLGKFGQRALDFYSIHVTKESTHPVKPLAQIAGNRYASTPVGKALSDACMGTIASFLSKYQDIIIEHQKVVKGNQKRLESLRELAGKENLEYPSVTLPPQPHTKEGVDAYNEVIARVRTWVNLNLWQKLKLSRDDAKPLLRLKKFPSFPLVERQANEVDWWDMVCNVKKLINEKKEDGKVFWQNLAGYKRQEALRPYLSSEEDRKKGKKFARYQLGDLLLHLEKKHGEDWGKVYDEAWERIDKKVEGLSKHIKLEEERRSEDAQSKAALTDWLRAKASFVIEGLKEADKDEFCRCELKLQKWYGDLRGKPFAIEAENSILDISGFSKQYNCAFIWQKDGVKKLNLYLIINYFKGGKLRFKKIKPEAFEANRFYTVINKKSGEIVPMEVNFNFDDPNLIILPLAFGKRQGREFIWNDLLSLETGSLKLANGRVIEKTLYNRRTRQDEPALFVALTFERREVLDSSNIKPMNLIGVDRGENIPAVIALTDPEGCPLSRFKDSLGNPTHILRIGESYKEKQRTIQAKKEVEQRRAGGYSRKYASKAKNLADDMVRNTARDLLYYAVTQDAMLIFENLSRGFGRQGKRTFMAERQYTRMEDWLTAKLAYEGLPSKTYLSKTLAQYTSKTCSNCGFTITSADYDRVLEKLKKTATGWMTTINGKELKVEGQITYYNRYKRQNVVKDLSVELDRLSEESVNNDISSWTKGRSGEALSLLKKRFSHRPVQEKFVCLNCGFETHADEQAALNIARSWLFLRSQEYKKYQTNKTTGNTDKRAFVETWQSFYRKKLKEVWKPAV

SEQ ID NO: 36221 - protein, 978 aa, synthetic construct
  REGION 1..978: note = engineered CasX variant
QEIKRINKIRRRLVKDSNTKKAGKTGPMKTLLVRVMTPDLRERLENLRKKPENIPQPISNTSRANLNKLLTDYTEMKKAILHVYWEEFQKDPVGLMSRVAQPASKKIDQNKLKPEMDEKGNLTTAGFACSQCGQPLFVYKLEQVSEKGKAYTNYFGRCNVAEHEKLILLAQLKPEKDSDEAVTYSLGKFGQRALDFYSIHVTKESTHPVKPLAQIAGNRYASAPVGKALSDACMGTIASFLSKYQDIIIEHQKVVKGNQKRLESLRELAGKENLEYPSVTLPPQPHTKEGVDAYNEVIARVRTWVNLNLWQKLKLSRDDAKPLLRLKKFPSFPLVERQANEVDWWDMVCNVKKLINEKKEDGKVFWQNLAGYKRQEALRPYLSSEEDRKKGKKFARYQLGDLLLHLEKKHGEDWGKVYDEAWERIDKKVEGLSKHIKLEEERRSEDAQSKAALTDWLRAKASFVIEGLKEADKDEFCRCELKLQKWYGDLRGKPFAIEAENSILDISGFSKQYNCAFIWQKDGVKKLNLYLIINYFKGGKLRFKKIKPEAFEANRFYTVINKKSGEIVPMEVNFNFDDPNLIILPLAFGKRQGREFIWNDLLSLETGSLKLANGRVIEKTLYNRRTRQDEPALFVALTFERREVLDSSNIKPMNLIGVDRGENIPAVIALTDPEGCPLSRFKDSLGNPTHILRIGESYKEKQRTIQAKKEVEQRRAGGYSRKYASKAKNLADDMVRNTARDLLYYAVTQDAMLIFENLSRGFGRQGKRTFMAERQYTRMEDWLTAKLAYEGLPSKTYLSKTLAQYTSKTCSNCGFTITSADYDRVLEKLKKTATGWMTTINGKELKVEGQITYYNRYKRQNVVKDLSVELDRLSEESVNNDISSWTKGRSGEALSLLKKRFSHRPVQEKFVCLNCGFETHADEQAALNIARSWLFLRSQEYKKYQTNKTTGNTDKRAFVETWQSFYRKKLKEVWKPAV

SEQ ID NO: 36222 - protein, 978 aa, synthetic construct
  REGION 1..978: note = engineered CasX variant
QEIKRINKIRRRLVKDSNTKKAGKTGPMKTLLVRVMTPDLRERLENLRKKPENIPQPISNTSRANLNKLLTDYTEMKKAILHVYWEEFQKDPVGLMSRVAQPASKKIDQNKLKPEMDEKGNLTTAGFACSQCGQPLFVYKLEQVSEKGKAYTNYFGRCNVAEHEKLILLAQLKPEKDSDEAVTYSLGKFGQRALDFYSIHVTKESTHPVKPLAQIAGNRYASVPVGKALSDACMGTIASFLSKYQDIIIEHQKVVKGNQKRLESLRELAGKENLEYPSVTLPPQPHTKEGVDAYNEVIARVRTWVNLNLWQKLKLSRDDAKPLLRLKKFPSFPLVERQANEVDWWDMVCNVKKLINEKKEDGKVFWQNLAGYKRQEALRPYLSSEEDRKKGKKFARYQLGDLLLHLEKKHGEDWGKVYDEAWERIDKKVEGLSKHIKLEEERRSEDAQSKAALTDWLRAKASFVIEGLKEADKDEFCRCELKLQKWYGDLRGKPFAIEAENSILDISGFSKQYNCAFIWQKDGVKKLNLYLIINYFKGGKLRFKKIKPEAFEANRFYTVINKKSGEIVPMEVNFNFDDPNLIILPLAFGKRQGREFIWNDLLSLETGSLKLANGRVIEKTLYNRRTRQDEPALFVALTFERREVLDSSNIKPMNLIGVDRGENIPAVIALTDPEGCPLSRFKDSLGNPTHILRIGESYKEKQRTIQAKKEVEQRRAGGYSRKYASKAKNLADDMVRNTARDLLYYAVTQDAMLIFENLSRGFGRQGKRTFMAERQYTRMEDWLTAKLAYEGLPSKTYLSKTLAQYTSKTCSNCGFTITSADYDRVLEKLKKTATGWMTTINGKELKVEGQITYYNRYKRQNVVKDLSVELDRLSEESVNNDISSWTKGRSGEALSLLKKRFSHRPVQEKFVCLNCGFETHADEQAALNIARSWLFLRSQEYKKYQTNKTTGNTDKRAFVETWQSFYRKKLKEVWKPAV

SEQ ID NO: 36223 - protein, 978 aa, synthetic construct
  REGION 1..978: note = engineered CasX variant
QEIKRINKIRRRLVKDSNTKKAGKTGPMKTLLVRVMTPDLRERLENLRKKPENIPQPISNTSRANLNKLLTDYTEMKKAILHVYWEEFQKDPVGLMSRVAQPASKKIDQNKLKPEMDEKGNLTTAGFACSQCGQPLFVYKLEQVSEKGKAYTNYFGRCNVAEHEKLIKLAQLKPEKDSDEAVTYSLGKFGQRALDFYSIHVTKESTHPVKPLAQIAGNRYASGPVGKALSDACMGTIASFLSKYQDIIIEHQKVVKGNQKRLESLRELAGKENLEYPSVTLPPQPHTKEGVDAYNEVIARVRTWVNLNLWQKLKLSRDDAKPLLRLKKFPSFPLVERQANEVDWWDMVCNVKKLINEKKEDGKVFWQNLAGYKRQEALRPYLSSEEDRKKGKKFARYQLGDLLLHLEKKHGEDWGKVYDEAWERIDKKVEGLSKHIKLEEERRSEDAQSKAALTDWLRAKASFVIEGLKEADKDEFCRCELKLQKWYGDLRGKPFAIEAENSILDISGFSKQYNCAFIWQKDGVKKLNLYLIINYFKGGKLRFKKIKPEAFEANRFYTVINKKSGEIVPMEVNFNFDDPNLIILPLAFGKRQGREFIWNDLLSLETGSLKLANGRVIEKTLYNRRTRQDEPALFVALTFERREVLDSSNIKPMNLIGVDRGENIPAVIALTDPEGCPLSRFKDSLGNPTHILRIGESYKEKQRTIQAKKEVEQRRAGGYSRKYASKAKNLADDMVRNTARDLLYYAVTQDAMLIFENLSRGFGRQGKRTFMAERQYTRMEDWLTAKLAYEGLPSKTYLSKTLAQYTSKTCSNCGFTITSADYDRVLEKLKKTATGWMTTINGKELKVEGQITYYNRYKRQNVVKDLSVELDRLSEESVNNDISSWTKGRSGEALSLLKKRFSHRPVQEKFVCLNCGFETHADEQAALNIARSWLFLRSQEYKKYQTNKTTGNTDKRAFVETWQSFYRKKLKEVWKPAV

SEQ ID NO: 36224 - protein, 977 aa, synthetic construct
  REGION 1..977: note = engineered CasX variant
QEIKRINKIRRRLVKDSNTKKAGKTGPMKTLLVRVMTPDLRERLENLRKKPENIPQPISNTSRANLNKLLTDYTEMKKAILHVYWEEFQKDPVGLMSRVAQPASKKIDQNKLKPEMDEKGNLTTAGFACSQCGQPLFVYKLEQVSEKGKAYTNYFGRCNVAEHEKLILLAQLKPEKDSDEAVTYSLGKFGQRALDFYSIHVTKESTHPVKPLAQIAGNRYASPVGKALSDACMGTIASFLSKYQDIIIEHQKVVKGNQKRLESLRELAGKENLEYPSVTLPPQPHTKEGVDAYNEVIARVRTWVNLNLWQKLKLSRDDAKPLLRLKKFPSFPLVERQANEVDWWDMVCNVKKLINEKKEDGKVFWQNLAGYKRQEALRPYLSSEEDRKKGKKFARYQLGDLLLHLEKKHGEDWGKVYDEAWERIDKKVEGLSKHIKLEEERRSEDAQSKAALTDWLRAKASFVIEGLKEADKDEFCRCELKLQKWYGDLRGKPFAIEAENSILDISGFSKQYNCAFIWQKDGVKKLNLYLIINYFKGGKLRFKKIKPEAFEANRFYTVINKKSGEIVPMEVNFNFDDPNLIILPLAFGKRQGREFIWNDLLSLETGSLKLANGRVIEKTLYNRRTRQDEPALFVALTFERREVLDSSNIKPMNLIGVDRGENIPAVIALTDPEGCPLSRFKDSLGNPTHILRIGESYKEKQRTIQAKKEVEQRRAGGYSRKYASKAKNLADDMVRNTARDLLYYAVTQDAMLIFENLSRGFGRQGKRTFMAERQYTRMEDWLTAKLAYEGLPSKTYLSKTLAQYTSKTCSNCGFTITSADYDRVLEKLKKTATGWMTTINGKELKVEGQITYYNRYKRQNVVKDLSVELDRLSEESVNNDISSWTKGRSGEALSLLKKRFSHRPVQEKFVCLNCGFETHADEQAALNIARSWLFLRSQEYKKYQTNKTTGNTDKRAFVETWQSFYRKKLKEVWKPAV

SEQ ID NO: 36225 - protein, 978 aa, synthetic construct
  REGION 1..978: note = engineered CasX variant
QEIKRINKIRRRLVKDSNTKKAGKTGPMKTLLVRVMTPDLRERLENLRKKPENIPQPISNTSRANLNKLLTDYTEMKKAILHVYWEEFQKDPVGLMSRVAQPASKKIDQNKLKPEMDEKGNLTTAGFACSQCGQPLFVYKLEQVSEKGKAYTNYFGRCNVAEHEKLILLAQLKPEKDSDEAVTYSLGKFGQRALDFYSIHVTKESTHPVKPLAQIAGNRYASYPVGKALSDACMGTIASFLSKYQDIIIEHQKVVKGNQKRLESLRELAGKENLEYPSVTLPPQPHTKEGVDAYNEVIARVRTWVNLNLWQKLKLSRDDAKPLLRLKGFPSFPLVERQANEVDWWDMVCNVKKLINEKKEDGKVFWQNLAGYKRQEALRPYLSSEEDRKKGKKFARYQLGDLLLHLEKKHGEDWGKVYDEAWERIDKKVEGLSKHIKLEEERRSEDAQSKAALTDWLRAKASFVIEGLKEADKDEFCRCELKLQKWYGDLRGKPFAIEAENSILDISGFSKQYNCAFIWQKDGVKKLNLYLIINYFKGGKLRFKKIKPEAFEANRFYTVINKKSGEIVPMEVNFNFDDPNLIILPLAFGKRQGREFIWNDLLSLETGSLKLANGRVIEKTLYNRRTRQDEPALFVALTFERREVLDSSNIKPMNLIGVDRGENIPAVIALTDPEGCPLSRFKDSLGNPTHILRIGERYKEKQRTIQAKKEVEQRRAGGYSRKYASKAKNLADDMVRNTARDLLYYAVTQDAMLIFENLSRGFGRQGKRTFMAERQYTRMEDWLTAKLAYEGLPSKTYLSKTLAQYTSKTCSNCGFTITSADYDRVLEKLKKTATGWMTTINGKELKVEGQITYYNRYKRQNVVKDLSVELDRLSEESVNNDISSWTKGRSGEALSLLKKRFSHRPVQEKFVCLNCGFETHADEQAALNIARSWLFLRSQEYKKYQTNKTTGNTDKRAFVETWQSFYRKKLKEVWKPAV

SEQ ID NO: 36226 - protein, 978 aa, synthetic construct
  REGION 1..978: note = engineered CasX variant
QEIKRINKIRRRLVKDSNTKKAGKTGPMKTLLVRVMTPDLRERLENLRKKPENIPQPISNTSRANLNKLLTDYTEMKKAILHVYWEEFQKDPVGLMSRVAQPASKKIDQNKLKPEMDEKGNLTTAGFACSQCGQPLFVYKLEQVSEKGKAYTNYFGRCNVAEHEKLILLAQLKPEKDSDEAVTYSLGKFGQRALDFYSIHVTKESTHPVKPLAQIAGNRYASHPVGKALSDACMGTIASFLSKYQDIIIEHQKVVKGNQKRLESLRELAGKENLEYPSVTLPPQPHTKEGVDAYNEVIARVRTWVNLNLWQKLKLSRDDAKPLLRLKGFPSFPLVERQANEVDWWDMVCNVKKLINEKKEDGKVFWQNLAGYKRQEALRPYLSSEEDRKKGKKFARYQLGDLLLHLEKKHGEDWGKVYDEAWERIDKKVEGLSKHIKLEEERRSEDAQSKAALTDWLRAKASFVIEGLKEADKDEFCRCELKLQKWYGDLRGKPFAIEAENSILDISGFSKQYNCAFIWQKDGVKKLNLYLIINYFKGGKLRFKKIKPEAFEANRFYTVINKKSGEIVPMEVNFNFDDPNLIILPLAFGKRQGREFIWNDLLSLETGSLKLANGRVIEKTLYNRRTRQDEPALFVALTFERREVLDSSNIKPMNLIGVDRGENIPAVIALTDPEGCPLSRFKDSLGNPTHILRIGERYKEKQRTIQAKKEVEQRRAGGYSRKYASKAKNLADDMVRNTARDLLYYAVTQDAMLIFENLSRGFGRQGKRTFMAERQYTRMEDWLTAKLAYEGLPSKTYLSKTLAQYTSKTCSNCGFTITSADYDRVLEKLKKTATGWMTTINGKELKVEGQITYYNRYKRQNVVKDLSVELDRLSEESVNNDISSWTKGRSGEALSLLKKRFSHRPVQEKFVCLNCGFETHADEQAALNIARSWLFLRSQEYKKYQTNKTTGNTDKRAFVETWQSFYRKKLKEVWKPAV

SEQ ID NO: 36227 - protein, 978 aa, synthetic construct
  REGION 1..978: note = engineered CasX variant
QEIKRINKIRRRLVKDSNTKKAGKTGPMKTLLVRVMTPDLRERLENLRKKPENIPQPISNTSRANLNKLLTDYTEMKKAILHVYWEEFQKDPVGLMSRVAQPASKKIDQNKLKPEMDEKGNLTTAGFACSQCGQPLFVYKLEQVSEKGKAYTNYFGRCNVAEHEKLILLAQLKPEKDSDEAVTYSLGKFGQRALDFYSIHVTKESTHPVKPLAQIAGNRYASSPVGKALSDACMGTIASFLSKYQDIIIEHQKVVKGNQKRLESLRELAGKENLEYPSVTLPPQPHTKEGVDAYNEVIARVRTWVNLNLWQKLKLSRDDAKPLLRLKGFPSFPLVERQANEVDWWDMVCNVKKLINEKKEDGKVFWQNLAGYKRQEALRPYLSSEEDRKKGKKFARYQLGDLLLHLEKKHGEDWGKVYDEAWERIDKKVEGLSKHIKLEEERRSEDAQSKAALTDWLRAKASFVIEGLKEADKDEFCRCELKLQKWYGDLRGKPFAIEAENSILDISGFSKQYNCAFIWQKDGVKKLNLYLIINYFKGGKLRFKKIKPEAFEANRFYTVINKKSGEIVPMEVNFNFDDPNLIILPLAFGKRQGREFIWNDLLSLETGSLKLANGRVIEKTLYNRRTRQDEPALFVALTFERREVLDSSNIKPMNLIGVDRGENIPAVIALTDPEGCPLSRFKDSLGNPTHILRIGERYKEKQRTIQAKKEVEQRRAGGYSRKYASKAKNLADDMVRNTARDLLYYAVTQDAMLIFENLSRGFGRQGKRTFMAERQYTRMEDWLTAKLAYEGLPSKTYLSKTLAQYTSKTCSNCGFTITSADYDRVLEKLKKTATGWMTTINGKELKVEGQITYYNRYKRQNVVKDLSVELDRLSEESVNNDISSWTKGRSGEALSLLKKRFSHRPVQEKFVCLNCGFETHADEQAALNIARSWLFLRSQEYKKYQTNKTTGNTDKRAFVETWQSFYRKKLKEVWKPAV

SEQ ID NO: 36228 - protein, 978 aa, synthetic construct
  REGION 1..978: note = engineered CasX variant
QEIKRINKIRRRLVKDSNTKKAGKTGPMKTLLVRVMTPDLRERLENLRKKPENIPQPISNTSRANLNKLLTDYTEMKKAILHVYWEEFQKDPVGLMSRVAQPASKKIDQNKLKPEMDEKGNLTTAGFACSQCGQPLFVYKLEQVSEKGKAYTNYFGRCNVAEHEKLILLAQLKPEKDSDEAVTYSLGKFGQRALDFYSIHVTKESTHPVKPLAQIAGNRYASTPVGKALSDACMGTIASFLSKYQDIIIEHQKVVKGNQKRLESLRELAGKENLEYPSVTLPPQPHTKEGVDAYNEVIARVRTWVNLNLWQKLKLSRDDAKPLLRLKGFPSFPLVERQANEVDWWDMVCNVKKLINEKKEDGKVFWQNLAGYKRQEALRPYLSSEEDRKKGKKFARYQLGDLLLHLEKKHGEDWGKVYDEAWERIDKKVEGLSKHIKLEEERRSEDAQSKAALTDWLRAKASFVIEGLKEADKDEFCRCELKLQKWYGDLRGKPFAIEAENSILDISGFSKQYNCAFIWQKDGVKKLNLYLIINYFKGGKLRFKKIKPEAFEANRFYTVINKKSGEIVPMEVNFNFDDPNLIILPLAFGKRQGREFIWNDLLSLETGSLKLANGRVIEKTLYNRRTRQDEPALFVALTFERREVLDSSNIKPMNLIGVDRGENIPAVIALTDPEGCPLSRFKDSLGNPTHILRIGERYKEKQRTIQAKKEVEQRRAGGYSRKYASKAKNLADDMVRNTARDLLYYAVTQDAMLIFENLSRGFGRQGKRTFMAERQYTRMEDWLTAKLAYEGLPSKTYLSKTLAQYTSKTCSNCGFTITSADYDRVLEKLKKTATGWMTTINGKELKVEGQITYYNRYKRQNVVKDLSVELDRLSEESVNNDISSWTKGRSGEALSLLKKRFSHRPVQEKFVCLNCGFETHADEQAALNIARSWLFLRSQEYKKYQTNKTTGNTDKRAFVETWQSFYRKKLKEVWKPAV

SEQ ID NO: 36229 - protein, 978 aa, synthetic construct
  REGION 1..978: note = engineered CasX variant
QEIKRINKIRRRLVKDSNTKKAGKTGPMKTLLVRVMTPDLRERLENLRKKPENIPQPISNTSRANLNKLLTDYTEMKKAILHVYWEEFQKDPVGLMSRVAQPASKKIDQNKLKPEMDEKGNLTTAGFACSQCGQPLFVYKLEQVSEKGKAYTNYFGRCNVAEHEKLILLAQLKPEKDSDEAVTYSLGKFGQRALDFYSIHVTKESTHPVKPLAQIAGNRYASAPVGKALSDACMGTIASFLSKYQDIIIEHQKVVKGNQKRLESLRELAGKENLEYPSVTLPPQPHTKEGVDAYNEVIARVRTWVNLNLWQKLKLSRDDAKPLLRLKGFPSFPLVERQANEVDWWDMVCNVKKLINEKKEDGKVFWQNLAGYKRQEALRPYLSSEEDRKKGKKFARYQLGDLLLHLEKKHGEDWGKVYDEAWERIDKKVEGLSKHIKLEEERRSEDAQSKAALTDWLRAKASFVIEGLKEADKDEFCRCELKLQKWYGDLRGKPFAIEAENSILDISGFSKQYNCAFIWQKDGVKKLNLYLIINYFKGGKLRFKKIKPEAFEANRFYTVINKKSGEIVPMEVNFNFDDPNLIILPLAFGKRQGREFIWNDLLSLETGSLKLANGRVIEKTLYNRRTRQDEPALFVALTFERREVLDSSNIKPMNLIGVDRGENIPAVIALTDPEGCPLSRFKDSLGNPTHILRIGERYKEKQRTIQAKKEVEQRRAGGYSRKYASKAKNLADDMVRNTARDLLYYAVTQDAMLIFENLSRGFGRQGKRTFMAERQYTRMEDWLTAKLAYEGLPSKTYLSKTLAQYTSKTCSNCGFTITSADYDRVLEKLKKTATGWMTTINGKELKVEGQITYYNRYKRQNVVKDLSVELDRLSEESVNNDISSWTKGRSGEALSLLKKRFSHRPVQEKFVCLNCGFETHADEQAALNIARSWLFLRSQEYKKYQTNKTTGNTDKRAFVETWQSFYRKKLKEVWKPAV

SEQ ID NO: 36230 - protein, 978 aa, synthetic construct
  REGION 1..978: note = engineered CasX variant
QEIKRINKIRRRLVKDSNTKKAGKTGPMKTLLVRVMTPDLRERLENLRKKPENIPQPISNTSRANLNKLLTDYTEMKKAILHVYWEEFQKDPVGLMSRVAQPASKKIDQNKLKPEMDEKGNLTTAGFACSQCGQPLFVYKLEQVSEKGKAYTNYFGRCNVAEHEKLILLAQLKPEKDSDEAVTYSLGKFGQRALDFYSIHVTKESTHPVKPLAQIAGNRYASVPVGKALSDACMGTIASFLSKYQDIIIEHQKVVKGNQKRLESLRELAGKENLEYPSVTLPPQPHTKEGVDAYNEVIARVRTWVNLNLWQKLKLSRDDAKPLLRLKGFPSFPLVERQANEVDWWDMVCNVKKLINEKKEDGKVFWQNLAGYKRQEALRPYLSSEEDRKKGKKFARYQLGDLLLHLEKKHGEDWGKVYDEAWERIDKKVEGLSKHIKLEEERRSEDAQSKAALTDWLRAKASFVIEGLKEADKDEFCRCELKLQKWYGDLRGKPFAIEAENSILDISGFSKQYNCAFIWQKDGVKKLNLYLIINYFKGGKLRFKKIKPEAFEANRFYTVINKKSGEIVPMEVNFNFDDPNLIILPLAFGKRQGREFIWNDLLSLETGSLKLANGRVIEKTLYNRRTRQDEPALFVALTFERREVLDSSNIKPMNLIGVDRGENIPAVIALTDPEGCPLSRFKDSLGNPTHILRIGERYKEKQRTIQAKKEVEQRRAGGYSRKYASKAKNLADDMVRNTARDLLYYAVTQDAMLIFENLSRGFGRQGKRTFMAERQYTRMEDWLTAKLAYEGLPSKTYLSKTLAQYTSKTCSNCGFTITSADYDRVLEKLKKTATGWMTTINGKELKVEGQITYYNRYKRQNVVKDLSVELDRLSEESVNNDISSWTKGRSGEALSLLKKRFSHRPVQEKFVCLNCGFETHADEQAALNIARSWLFLRSQEYKKYQTNKTTGNTDKRAFVETWQSFYRKKLKEVWKPAV

SEQ ID NO: 36231 - protein, 978 aa, synthetic construct
  REGION 1..978: note = engineered CasX variant
QEIKRINKIRRRLVKDSNTKKAGKTGPMKTLLVRVMTPDLRERLENLRKKPENIPQPISNTSRANLNKLLTDYTEMKKAILHVYWEEFQKDPVGLMSRVAQPASKKIDQNKLKPEMDEKGNLTTAGFACSQCGQPLFVYKLEQVSEKGKAYTNYFGRCNVAEHEKLIKLAQLKPEKDSDEAVTYSLGKFGQRALDFYSIHVTKESTHPVKPLAQIAGNRYASGPVGKALSDACMGTIASFLSKYQDIIIEHQKVVKGNQKRLESLRELAGKENLEYPSVTLPPQPHTKEGVDAYNEVIARVRTWVNLNLWQKLKLSRDDAKPLLRLKGFPSFPLVERQANEVDWWDMVCNVKKLINEKKEDGKVFWQNLAGYKRQEALRPYLSSEEDRKKGKKFARYQLGDLLLHLEKKHGEDWGKVYDEAWERIDKKVEGLSKHIKLEEERRSEDAQSKAALTDWLRAKASFVIEGLKEADKDEFCRCELKLQKWYGDLRGKPFAIEAENSILDISGFSKQYNCAFIWQKDGVKKLNLYLIINYFKGGKLRFKKIKPEAFEANRFYTVINKKSGEIVPMEVNFNFDDPNLIILPLAFGKRQGREFIWNDLLSLETGSLKLANGRVIEKTLYNRRTRQDEPALFVALTFERREVLDSSNIKPMNLIGVDRGENIPAVIALTDPEGCPLSRFKDSLGNPTHILRIGERYKEKQRTIQAKKEVEQRRAGGYSRKYASKAKNLADDMVRNTARDLLYYAVTQDAMLIFENLSRGFGRQGKRTFMAERQYTRMEDWLTAKLAYEGLPSKTYLSKTLAQYTSKTCSNCGFTITSADYDRVLEKLKKTATGWMTTINGKELKVEGQITYYNRYKRQNVVKDLSVELDRLSEESVNNDISSWTKGRSGEALSLLKKRFSHRPVQEKFVCLNCGFETHADEQAALNIARSWLFLRSQEYKKYQTNKTTGNTDKRAFVETWQSFYRKKLKEVWKPAV

SEQ ID NO: 36232 - protein, 977 aa, synthetic construct
  REGION 1..977: note = engineered CasX variant
QEIKRINKIRRRLVKDSNTKKAGKTGPMKTLLVRVMTPDLRERLENLRKKPENIPQPISNTSRANLNKLLTDYTEMKKAILHVYWEEFQKDPVGLMSRVAQPASKKIDQNKLKPEMDEKGNLTTAGFACSQCGQPLFVYKLEQVSEKGKAYTNYFGRCNVAEHEKLILLAQLKPEKDSDEAVTYSLGKFGQRALDFYSIHVTKESTHPVKPLAQIAGNRYASPVGKALSDACMGTIASFLSKYQDIIIEHQKVVKGNQKRLESLRELAGKENLEYPSVTLPPQPHTKEGVDAYNEVIARVRTWVNLNLWQKLKLSRDDAKPLLRLKGFPSFPLVERQANEVDWWDMVCNVKKLINEKKEDGKVFWQNLAGYKRQEALRPYLSSEEDRKKGKKFARYQLGDLLLHLEKKHGEDWGKVYDEAWERIDKKVEGLSKHIKLEEERRSEDAQSKAALTDWLRAKASFVIEGLKEADKDEFCRCELKLQKWYGDLRGKPFAIEAENSILDISGFSKQYNCAFIWQKDGVKKLNLYLIINYFKGGKLRFKKIKPEAFEANRFYTVINKKSGEIVPMEVNFNFDDPNLIILPLAFGKRQGREFIWNDLLSLETGSLKLANGRVIEKTLYNRRTRQDEPALFVALTFERREVLDSSNIKPMNLIGVDRGENIPAVIALTDPEGCPLSRFKDSLGNPTHILRIGERYKEKQRTIQAKKEVEQRRAGGYSRKYASKAKNLADDMVRNTARDLLYYAVTQDAMLIFENLSRGFGRQGKRTFMAERQYTRMEDWLTAKLAYEGLPSKTYLSKTLAQYTSKTCSNCGFTITSADYDRVLEKLKKTATGWMTTINGKELKVEGQITYYNRYKRQNVVKDLSVELDRLSEESVNNDISSWTKGRSGEALSLLKKRFSHRPVQEKFVCLNCGFETHADEQAALNIARSWLFLRSQEYKKYQTNKTTGNTDKRAFVETWQSFYRKKLKEVWKPAV

SEQ ID NO: 36233 - protein, 978 aa, synthetic construct
  REGION 1..978: note = engineered CasX variant
QEIKRINKIRRRLVKDSNTKKAGKTGPMKTLLVRVMTPDLRERLENLRKKPENIPQPISNTSRANLNKLLTDYTEMKKAILHVYWEEFQKDPVGLMSRVAQPASKKIDQNKLKPEMDEKGNLTTAGFACSQCGQPLFVYKLEQVSEKGKAYTNYFGRCNVAEHEKLILLAQLKPEKDSDEAVTYSLGKFGQRALDFYSIHVTKESTHPVKPLAQIAGNRYASYPVGKALSDACMGTIASFLSKYQDIIIEHQKVVKGNQKRLESLRELAGKENLEYPSVTLPPQPHTKEGVDAYNEVIARVRTWVNLNLWQKLKLSRDDAKPLLRLKGFPSFPLVERQANEVDWWDMVCNVKKLINEKKEDGKVFWQNLAGYKRQEALRPYLSSEEDRKKGKKFARYQLGDLLLHLEKKHGEDWGKVYDEAWERIDKKVEGLSKHIKLEEERRSEDAQSKAALTDWLRAKASFVIEGLKEADKDEFCRCELKLQKWYGDLRGKPFAIEAENSILDISGFSKQYNCAFIWQKDGVKKLNLYLIINYFKGGKLRFKKIKPEAFEANRFYTVINKKSGEIVPMEVNFNFDDPNLIILPLAFGKRQGREFIWNDLLSLETGSLQLANGRVIEKTLYNRRTRQDEPALFVALTFERREVLDSSNIKPMNLIGVDRGENIPAVIALTDPEGCPLSRFKDSLGNPTHILRIGESYKEKQRTIQAKKEVEQRRAGGYSRKYASKAKNLADDMVRNTARDLLYYAVTQDAMLIFENLSRGFGRQGKRTFMAERQYTRMEDWLTAKLAYEGLPSKTYLSKTLAQYTSKTCSNCGFTITSADYDRVLEKLKKTATGWMTTINGKELKVEGQITYYNRYKRQNVVKDLSVELDRLSEESVNNDISSWTKGRSGEALSLLKKRFSHRPVQEKFVCLNCGFETHADEQAALNIARSWLFLRSQEYKKYQTNKTTGNTDKRAFVETWQSFYRKKLKEVWKPAV

SEQ ID NO: 36234 - protein, 978 aa, synthetic construct
  REGION 1..978: note = engineered CasX variant
QEIKRINKIRRRLVKDSNTKKAGKTGPMKTLLVRVMTPDLRERLENLRKKPENIPQPISNTSRANLNKLLTDYTEMKKAILHVYWEEFQKDPVGLMSRVAQPASKKIDQNKLKPEMDEKGNLTTAGFACSQCGQPLFVYKLEQVSEKGKAYTNYFGRCNVAEHEKLILLAQLKPEKDSDEAVTYSLGKFGQRALDFYSIHVTKESTHPVKPLAQIAGNRYASHPVGKALSDACMGTIASFLSKYQDIIIEHQKVVKGNQKRLESLRELAGKENLEYPSVTLPPQPHTKEGVDAYNEVIARVRTWVNLNLWQKLKLSRDDAKPLLRLKGFPSFPLVERQANEVDWWDMVCNVKKLINEKKEDGKVFWQNLAGYKRQEALRPYLSSEEDRKKGKKFARYQLGDLLLHLEKKHGEDWGKVYDEAWERIDKKVEGLSKHIKLEEERRSEDAQSKAALTDWLRAKASFVIEGLKEADKDEFCRCELKLQKWYGDLRGKPFAIEAENSILDISGFSKQYNCAFIWQKDGVKKLNLYLIINYFKGGKLRFKKIKPEAFEANRFYTVINKKSGEIVPMEVNFNFDDPNLIILPLAFGKRQGREFIWNDLLSLETGSLQLANGRVIEKTLYNRRTRQDEPALFVALTFERREVLDSSNIKPMNLIGVDRGENIPAVIALTDPEGCPLSRFKDSLGNPTHILRIGESYKEKQRTIQAKKEVEQRRAGGYSRKYASKAKNLADDMVRNTARDLLYYAVTQDAMLIFENLSRGFGRQGKRTFMAERQYTRMEDWLTAKLAYEGLPSKTYLSKTLAQYTSKTCSNCGFTITSADYDRVLEKLKKTATGWMTTINGKELKVEGQITYYNRYKRQNVVKDLSVELDRLSEESVNNDISSWTKGRSGEALSLLKKRFSHRPVQEKFVCLNCGFETHADEQAALNIARSWLFLRSQEYKKYQTNKTTGNTDKRAFVETWQSFYRKKLKEVWKPAV

SEQ ID NO: 36235 - protein, 978 aa, synthetic construct
  REGION 1..978: note = engineered CasX variant
QEIKRINKIRRRLVKDSNTKKAGKTGPMKTLLVRVMTPDLRERLENLRKKPENIPQPISNTSRANLNKLLTDYTEMKKAILHVYWEEFQKDPVGLMSRVAQPASKKIDQNKLKPEMDEKGNLTTAGFACSQCGQPLFVYKLEQVSEKGKAYTNYFGRCNVAEHEKLILLAQLKPEKDSDEAVTYSLGKFGQRALDFYSIHVTKESTHPVKPLAQIAGNRYASSPVGKALSDACMGTIASFLSKYQDIIIEHQKVVKGNQKRLESLRELAGKENLEYPSVTLPPQPHTKEGVDAYNEVIARVRTWVNLNLWQKLKLSRDDAKPLLRLKGFPSFPLVERQANEVDWWDMVCNVKKLINEKKEDGKVFWQNLAGYKRQEALRPYLSSEEDRKKGKKFARYQLGDLLLHLEKKHGEDWGKVYDEAWERIDKKVEGLSKHIKLEEERRSEDAQSKAALTDWLRAKASFVIEGLKEADKDEFCRCELKLQKWYGDLRGKPFAIEAENSILDISGFSKQYNCAFIWQKDGVKKLNLYLIINYFKGGKLRFKKIKPEAFEANRFYTVINKKSGEIVPMEVNFNFDDPNLIILPLAFGKRQGREFIWNDLLSLETGSLQLANGRVIEKTLYNRRTRQDEPALFVALTFERREVLDSSNIKPMNLIGVDRGENIPAVIALTDPEGCPLSRFKDSLGNPTHILRIGESYKEKQRTIQAKKEVEQRRAGGYSRKYASKAKNLADDMVRNTARDLLYYAVTQDAMLIFENLSRGFGRQGKRTFMAERQYTRMEDWLTAKLAYEGLPSKTYLSKTLAQYTSKTCSNCGFTITSADYDRVLEKLKKTATGWMTTINGKELKVEGQITYYNRYKRQNVVKDLSVELDRLSEESVNNDISSWTKGRSGEALSLLKKRFSHRPVQEKFVCLNCGFETHADEQAALNIARSWLFLRSQEYKKYQTNKTTGNTDKRAFVETWQSFYRKKLKEVWKPAV

SEQ ID NO: 36236 - protein, 978 aa, synthetic construct
  REGION 1..978: note = engineered CasX variant
QEIKRINKIRRRLVKDSNTKKAGKTGPMKTLLVRVMTPDLRERLENLRKKPENIPQPISNTSRANLNKLLTDYTEMKKAILHVYWEEFQKDPVGLMSRVAQPASKKIDQNKLKPEMDEKGNLTTAGFACSQCGQPLFVYKLEQVSEKGKAYTNYFGRCNVAEHEKLILLAQLKPEKDSDEAVTYSLGKFGQRALDFYSIHVTKESTHPVKPLAQIAGNRYASTPVGKALSDACMGTIASFLSKYQDIIIEHQKVVKGNQKRLESLRELAGKENLEYPSVTLPPQPHTKEGVDAYNEVIARVRTWVNLNLWQKLKLSRDDAKPLLRLKGFPSFPLVERQANEVDWWDMVCNVKKLINEKKEDGKVFWQNLAGYKRQEALRPYLSSEEDRKKGKKFARYQLGDLLLHLEKKHGEDWGKVYDEAWERIDKKVEGLSKHIKLEEERRSEDAQSKAALTDWLRAKASFVIEGLKEADKDEFCRCELKLQKWYGDLRGKPFAIEAENSILDISGFSKQYNCAFIWQKDGVKKLNLYLIINYFKGGKLRFKKIKPEAFEANRFYTVINKKSGEIVPMEVNFNFDDPNLIILPLAFGKRQGREFIWNDLLSLETGSLQLANGRVIEKTLYNRRTRQDEPALFVALTFERREVLDSSNIKPMNLIGVDRGENIPAVIALTDPEGCPLSRFKDSLGNPTHILRIGESYKEKQRTIQAKKEVEQRRAGGYSRKYASKAKNLADDMVRNTARDLLYYAVTQDAMLIFENLSRGFGRQGKRTFMAERQYTRMEDWLTAKLAYEGLPSKTYLSKTLAQYTSKTCSNCGFTITSADYDRVLEKLKKTATGWMTTINGKELKVEGQITYYNRYKRQNVVKDLSVELDRLSEESVNNDISSWTKGRSGEALSLLKKRFSHRPVQEKFVCLNCGFETHADEQAALNIARSWLFLRSQEYKKYQTNKTTGNTDKRAFVETWQSFYRKKLKEVWKPAV

SEQ ID NO: 36237 - protein, 978 aa, synthetic construct
  REGION 1..978: note = engineered CasX variant
QEIKRINKIRRRLVKDSNTKKAGKTGPMKTLLVRVMTPDLRERLENLRKKPENIPQPISNTSRANLNKLLTDYTEMKKAILHVYWEEFQKDPVGLMSRVAQPASKKIDQNKLKPEMDEKGNLTTAGFACSQCGQPLFVYKLEQVSEKGKAYTNYFGRCNVAEHEKLILLAQLKPEKDSDEAVTYSLGKFGQRALDFYSIHVTKESTHPVKPLAQIAGNRYASAPVGKALSDACMGTIASFLSKYQDIIIEHQKVVKGNQKRLESLRELAGKENLEYPSVTLPPQPHTKEGVDAYNEVIARVRTWVNLNLWQKLKLSRDDAKPLLRLKGFPSFPLVERQANEVDWWDMVCNVKKLINEKKEDGKVFWQNLAGYKRQEALRPYLSSEEDRKKGKKFARYQLGDLLLHLEKKHGEDWGKVYDEAWERIDKKVEGLSKHIKLEEERRSEDAQSKAALTDWLRAKASFVIEGLKEADKDEFCRCELKLQKWYGDLRGKPFAIEAENSILDISGFSKQYNCAFIWQKDGVKKLNLYLIINYFKGGKLRFKKIKPEAFEANRFYTVINKKSGEIVPMEVNFNFDDPNLIILPLAFGKRQGREFIWNDLLSLETGSLQLANGRVIEKTLYNRRTRQDEPALFVALTFERREVLDSSNIKPMNLIGVDRGENIPAVIALTDPEGCPLSRFKDSLGNPTHILRIGESYKEKQRTIQAKKEVEQRRAGGYSRKYASKAKNLADDMVRNTARDLLYYAVTQDAMLIFENLSRGFGRQGKRTFMAERQYTRMEDWLTAKLAYEGLPSKTYLSKTLAQYTSKTCSNCGFTITSADYDRVLEKLKKTATGWMTTINGKELKVEGQITYYNRYKRQNVVKDLSVELDRLSEESVNNDISSWTKGRSGEALSLLKKRFSHRPVQEKFVCLNCGFETHADEQAALNIARSWLFLRSQEYKKYQTNKTTGNTDKRAFVETWQSFYRKKLKEVWKPAV

SEQ ID NO: 36238 - protein, 978 aa, synthetic construct
  REGION 1..978: note = engineered CasX variant
QEIKRINKIRRRLVKDSNTKKAGKTGPMKTLLVRVMTPDLRERLENLRKKPENIPQPISNTSRANLNKLLTDYTEMKKAILHVYWEEFQKDPVGLMSRVAQPASKKIDQNKLKPEMDEKGNLTTAGFACSQCGQPLFVYKLEQVSEKGKAYTNYFGRCNVAEHEKLILLAQLKPEKDSDEAVTYSLGKFGQRALDFYSIHVTKESTHPVKPLAQIAGNRYASVPVGKALSDACMGTIASFLSKYQDIIIEHQKVVKGNQKRLESLRELAGKENLEYPSVTLPPQPHTKEGVDAYNEVIARVRTWVNLNLWQKLKLSRDDAKPLLRLKGFPSFPLVERQANEVDWWDMVCNVKKLINEKKEDGKVFWQNLAGYKRQEALRPYLSSEEDRKKGKKFARYQLGDLLLHLEKKHGEDWGKVYDEAWERIDKKVEGLSKHIKLEEERRSEDAQSKAALTDWLRAKASFVIEGLKEADKDEFCRCELKLQKWYGDLRGKPFAIEAENSILDISGFSKQYNCAFIWQKDGVKKLNLYLIINYFKGGKLRFKKIKPEAFEANRFYTVINKKSGEIVPMEVNFNFDDPNLIILPLAFGKRQGREFIWNDLLSLETGSLQLANGRVIEKTLYNRRTRQDEPALFVALTFERREVLDSSNIKPMNLIGVDRGENIPAVIALTDPEGCPLSRFKDSLGNPTHILRIGESYKEKQRTIQAKKEVEQRRAGGYSRKYASKAKNLADDMVRNTARDLLYYAVTQDAMLIFENLSRGFGRQGKRTFMAERQYTRMEDWLTAKLAYEGLPSKTYLSKTLAQYTSKTCSNCGFTITSADYDRVLEKLKKTATGWMTTINGKELKVEGQITYYNRYKRQNVVKDLSVELDRLSEESVNNDISSWTKGRSGEALSLLKKRFSHRPVQEKFVCLNCGFETHADEQAALNIARSWLFLRSQEYKKYQTNKTTGNTDKRAFVETWQSFYRKKLKEVWKPAV

SEQ ID NO: 36239 - protein, 978 aa, synthetic construct
  REGION 1..978: note = engineered CasX variant
QEIKRINKIRRRLVKDSNTKKAGKTGPMKTLLVRVMTPDLRERLENLRKKPENIPQPISNTSRANLNKLLTDYTEMKKAILHVYWEEFQKDPVGLMSRVAQPASKKIDQNKLKPEMDEKGNLTTAGFACSQCGQPLFVYKLEQVSEKGKAYTNYFGRCNVAEHEKLIKLAQLKPEKDSDEAVTYSLGKFGQRALDFYSIHVTKESTHPVKPLAQIAGNRYASGPVGKALSDACMGTIASFLSKYQDIIIEHQKVVKGNQKRLESLRELAGKENLEYPSVTLPPQPHTKEGVDAYNEVIARVRTWVNLNLWQKLKLSRDDAKPLLRLKGFPSFPLVERQANEVDWWDMVCNVKKLINEKKEDGKVFWQNLAGYKRQEALRPYLSSEEDRKKGKKFARYQLGDLLLHLEKKHGEDWGKVYDEAWERIDKKVEGLSKHIKLEEERRSEDAQSKAALTDWLRAKASFVIEGLKEADKDEFCRCELKLQKWYGDLRGKPFAIEAENSILDISGFSKQYNCAFIWQKDGVKKLNLYLIINYFKGGKLRFKKIKPEAFEANRFYTVINKKSGEIVPMEVNFNFDDPNLIILPLAFGKRQGREFIWNDLLSLETGSLQLANGRVIEKTLYNRRTRQDEPALFVALTFERREVLDSSNIKPMNLIGVDRGENIPAVIALTDPEGCPLSRFKDSLGNPTHILRIGESYKEKQRTIQAKKEVEQRRAGGYSRKYASKAKNLADDMVRNTARDLLYYAVTQDAMLIFENLSRGFGRQGKRTFMAERQYTRMEDWLTAKLAYEGLPSKTYLSKTLAQYTSKTCSNCGFTITSADYDRVLEKLKKTATGWMTTINGKELKVEGQITYYNRYKRQNVVKDLSVELDRLSEESVNNDISSWTKGRSGEALSLLKKRFSHRPVQEKFVCLNCGFETHADEQAALNIARSWLFLRSQEYKKYQTNKTTGNTDKRAFVETWQSFYRKKLKEVWKPAV

SEQ ID NO: 36240 - protein, 977 aa, synthetic construct
  REGION 1..977: note = engineered CasX variant
QEIKRINKIRRRLVKDSNTKKAGKTGPMKTLLVRVMTPDLRERLENLRKKPENIPQPISNTSRANLNKLLTDYTEMKKAILHVYWEEFQKDPVGLMSRVAQPASKKIDQNKLKPEMDEKGNLTTAGFACSQCGQPLFVYKLEQVSEKGKAYTNYFGRCNVAEHEKLILLAQLKPEKDSDEAVTYSLGKFGQRALDFYSIHVTKESTHPVKPLAQIAGNRYASPVGKALSDACMGTIASFLSKYQDIIIEHQKVVKGNQKRLESLRELAGKENLEYPSVTLPPQPHTKEGVDAYNEVIARVRTWVNLNLWQKLKLSRDDAKPLLRLKGFPSFPLVERQANEVDWWDMVCNVKKLINEKKEDGKVFWQNLAGYKRQEALRPYLSSEEDRKKGKKFARYQLGDLLLHLEKKHGEDWGKVYDEAWERIDKKVEGLSKHIKLEEERRSEDAQSKAALTDWLRAKASFVIEGLKEADKDEFCRCELKLQKWYGDLRGKPFAIEAENSILDISGFSKQYNCAFIWQKDGVKKLNLYLIINYFKGGKLRFKKIKPEAFEANRFYTVINKKSGEIVPMEVNFNFDDPNLIILPLAFGKRQGREFIWNDLLSLETGSLQLANGRVIEKTLYNRRTRQDEPALFVALTFERREVLDSSNIKPMNLIGVDRGENIPAVIALTDPEGCPLSRFKDSLGNPTHILRIGESYKEKQRTIQAKKEVEQRRAGGYSRKYASKAKNLADDMVRNTARDLLYYAVTQDAMLIFENLSRGFGRQGKRTFMAERQYTRMEDWLTAKLAYEGLPSKTYLSKTLAQYTSKTCSNCGFTITSADYDRVLEKLKKTATGWMTTINGKELKVEGQITYYNRYKRQNVVKDLSVELDRLSEESVNNDISSWTKGRSGEALSLLKKRFSHRPVQEKFVCLNCGFETHADEQAALNIARSWLFLRSQEYKKYQTNKTTGNTDKRAFVETWQSFYRKKLKEVWKPAV

SEQ ID NO: 36241 - protein, 979 aa, synthetic construct
  REGION 1..979: note = engineered CasX variant
QEIKRINKIRRRLVKDSNTKKAGKTGPMKTLLVRVMTPDLRERLENLRKKPENIPQPISNTSRANLNKLLTDYTEMKKAILHVYWEEFQKDPVGLMSRVAQPASKKIDQNKLKPEMDEKGNLTTAGFACSQCGQPLFVYKLEQVSEKGKAYTNYFGRCNVAEHEKLILLAQLKPEKDSDEAVTYSLGKFGQRALDFYSIHVTKESTHPVKPLAQIAGNRYASYPVGKALSDACMGTIASFLSKYQDIIIEHQKVVKGNQKRLESLRELAGKENLEYPSVTLPPQPHTKEGVDAYNEVIARVRWTWVNLNLWQKLKLSRDDAKPLLRLKGFPSFPLVERQANEVDWWDMVCNVKKLINEKKEDGKVFWQNLAGYKRQEALRPYLSSEEDRKKGKKFARYQLGDLLLHLEKKHGEDWGKVYDEAWERIDKKVEGLSKHIKLEEERRSEDAQSKAALTDWLRAKASFVIEGLKEADKDEFCRCELKLQKWYGDLRGKPFAIEAENSILDISGFSKQYNCAFIWQKDGVKKLNLYLIINYFKGGKLRFKKIKPEAFEANRFYTVINKKSGEIVPMEVNFNFDDPNLIILPLAFGKRQGREFIWNDLLSLETGSLKLANGRVIEKTLYNRRTRQDEPALFVALTFERREVLDSSNIKPMNLIGVDRGENIPAVIALTDPEGCPLSRFKDSLGNPTHILRIGESYKEKQRTIQAKKEVEQRRAGGYSRKYASKAKNLADDMVRNTARDLLYYAVTQDAMLIFENLSRGFGRQGKRTFMAERQYTRMEDWLTAKLAYEGLPSKTYLSKTLAQYTSKTCSNCGFTITSADYDRVLEKLKKTATGWMTTINGKELKVEGQITYYNRYKRQNVVKDLSVELDRLSEESVNNDISSWTKGRSGEALSLLKKRFSHRPVQEKFVCLNCGFETHADEQAALNIARSWLFLRSQEYKKYQTNKTTGNTDKRAFVETWQSFYRKKLKEVWKPAV

SEQ ID NO: 36242 - protein, 979 aa, synthetic construct
  REGION 1..979: note = engineered CasX variant
QEIKRINKIRRRLVKDSNTKKAGKTGPMKTLLVRVMTPDLRERLENLRKKPENIPQPISNTSRANLNKLLTDYTEMKKAILHVYWEEFQKDPVGLMSRVAQPASKKIDQNKLKPEMDEKGNLTTAGFACSQCGQPLFVYKLEQVSEKGKAYTNYFGRCNVAEHEKLILLAQLKPEKDSDEAVTYSLGKFGQRALDFYSIHVTKESTHPVKPLAQIAGNRYASHPVGKALSDACMGTIASFLSKYQDIIIEHQKVVKGNQKRLESLRELAGKENLEYPSVTLPPQPHTKEGVDAYNEVIARVRWTWVNLNLWQKLKLSRDDAKPLLRLKGFPSFPLVERQANEVDWWDMVCNVKKLINEKKEDGKVFWQNLAGYKRQEALRPYLSSEEDRKKGKKFARYQLGDLLLHLEKKHGEDWGKVYDEAWERIDKKVEGLSKHIKLEEERRSEDAQSKAALTDWLRAKASFVIEGLKEADKDEFCRCELKLQKWYGDLRGKPFAIEAENSILDISGFSKQYNCAFIWQKDGVKKLNLYLIINYFKGGKLRFKKIKPEAFEANRFYTVINKKSGEIVPMEVNFNFDDPNLIILPLAFGKRQGREFIWNDLLSLETGSLKLANGRVIEKTLYNRRTRQDEPALFVALTFERREVLDSSNIKPMNLIGVDRGENIPAVIALTDPEGCPLSRFKDSLGNPTHILRIGESYKEKQRTIQAKKEVEQRRAGGYSRKYASKAKNLADDMVRNTARDLLYYAVTQDAMLIFENLSRGFGRQGKRTFMAERQYTRMEDWLTAKLAYEGLPSKTYLSKTLAQYTSKTCSNCGFTITSADYDRVLEKLKKTATGWMTTINGKELKVEGQITYYNRYKRQNVVKDLSVELDRLSEESVNNDISSWTKGRSGEALSLLKKRFSHRPVQEKFVCLNCGFETHADEQAALNIARSWLFLRSQEYKKYQTNKTTGNTDKRAFVETWQSFYRKKLKEVWKPAV

SEQ ID NO: 36243 - protein, 979 aa, synthetic construct
  REGION 1..979: note = engineered CasX variant
QEIKRINKIRRRLVKDSNTKKAGKTGPMKTLLVRVMTPDLRERLENLRKKPENIPQPISNTSRANLNKLLTDYTEMKKAILHVYWEEFQKDPVGLMSRVAQPASKKIDQNKLKPEMDEKGNLTTAGFACSQCGQPLFVYKLEQVSEKGKAYTNYFGRCNVAEHEKLILLAQLKPEKDSDEAVTYSLGKFGQRALDFYSIHVTKESTHPVKPLAQIAGNRYASSPVGKALSDACMGTIASFLSKYQDIIIEHQKVVKGNQKRLESLRELAGKENLEYPSVTLPPQPHTKEGVDAYNEVIARVRWTWVNLNLWQKLKLSRDDAKPLLRLKGFPSFPLVERQANEVDWWDMVCNVKKLINEKKEDGKVFWQNLAGYKRQEALRPYLSSEEDRKKGKKFARYQLGDLLLHLEKKHGEDWGKVYDEAWERIDKKVEGLSKHIKLEEERRSEDAQSKAALTDWLRAKASFVIEGLKEADKDEFCRCELKLQKWYGDLRGKPFAIEAENSILDISGFSKQYNCAFIWQKDGVKKLNLYLIINYFKGGKLRFKKIKPEAFEANRFYTVINKKSGEIVPMEVNFNFDDPNLIILPLAFGKRQGREFIWNDLLSLETGSLKLANGRVIEKTLYNRRTRQDEPALFVALTFERREVLDSSNIKPMNLIGVDRGENIPAVIALTDPEGCPLSRFKDSLGNPTHILRIGESYKEKQRTIQAKKEVEQRRAGGYSRKYASKAKNLADDMVRNTARDLLYYAVTQDAMLIFENLSRGFGRQGKRTFMAERQYTRMEDWLTAKLAYEGLPSKTYLSKTLAQYTSKTCSNCGFTITSADYDRVLEKLKKTATGWMTTINGKELKVEGQITYYNRYKRQNVVKDLSVELDRLSEESVNNDISSWTKGRSGEALSLLKKRFSHRPVQEKFVCLNCGFETHADEQAALNIARSWLFLRSQEYKKYQTNKTTGNTDKRAFVETWQSFYRKKLKEVWKPAV

SEQ ID NO: 36244 - protein, 979 aa, synthetic construct
  REGION 1..979: note = engineered CasX variant
QEIKRINKIRRRLVKDSNTKKAGKTGPMKTLLVRVMTPDLRERLENLRKKPENIPQPISNTSRANLNKLLTDYTEMKKAILHVYWEEFQKDPVGLMSRVAQPASKKIDQNKLKPEMDEKGNLTTAGFACSQCGQPLFVYKLEQVSEKGKAYTNYFGRCNVAEHEKLILLAQLKPEKDSDEAVTYSLGKFGQRALDFYSIHVTKESTHPVKPLAQIAGNRYASTPVGKALSDACMGTIASFLSKYQDIIIEHQKVVKGNQKRLESLRELAGKENLEYPSVTLPPQPHTKEGVDAYNEVIARVRWTWVNLNLWQKLKLSRDDAKPLLRLKGFPSFPLVERQANEVDWWDMVCNVKKLINEKKEDGKVFWQNLAGYKRQEALRPYLSSEEDRKKGKKFARYQLGDLLLHLEKKHGEDWGKVYDEAWERIDKKVEGLSKHIKLEEERRSEDAQSKAALTDWLRAKASFVIEGLKEADKDEFCRCELKLQKWYGDLRGKPFAIEAENSILDISGFSKQYNCAFIWQKDGVKKLNLYLIINYFKGGKLRFKKIKPEAFEANRFYTVINKKSGEIVPMEVNFNFDDPNLIILPLAFGKRQGREFIWNDLLSLETGSLKLANGRVIEKTLYNRRTRQDEPALFVALTFERREVLDSSNIKPMNLIGVDRGENIPAVIALTDPEGCPLSRFKDSLGNPTHILRIGESYKEKQRTIQAKKEVEQRRAGGYSRKYASKAKNLADDMVRNTARDLLYYAVTQDAMLIFENLSRGFGRQGKRTFMAERQYTRMEDWLTAKLAYEGLPSKTYLSKTLAQYTSKTCSNCGFTITSADYDRVLEKLKKTATGWMTTINGKELKVEGQITYYNRYKRQNVVKDLSVELDRLSEESVNNDISSWTKGRSGEALSLLKKRFSHRPVQEKFVCLNCGFETHADEQAALNIARSWLFLRSQEYKKYQTNKTTGNTDKRAFVETWQSFYRKKLKEVWKPAV

SEQ ID NO: 36245 - protein, 979 aa, synthetic construct
  REGION 1..979: note = engineered CasX variant
QEIKRINKIRRRLVKDSNTKKAGKTGPMKTLLVRVMTPDLRERLENLRKKPENIPQPISNTSRANLNKLLTDYTEMKKAILHVYWEEFQKDPVGLMSRVAQPASKKIDQNKLKPEMDEKGNLTTAGFACSQCGQPLFVYKLEQVSEKGKAYTNYFGRCNVAEHEKLILLAQLKPEKDSDEAVTYSLGKFGQRALDFYSIHVTKESTHPVKPLAQIAGNRYASAPVGKALSDACMGTIASFLSKYQDIIIEHQKVVKGNQKRLESLRELAGKENLEYPSVTLPPQPHTKEGVDAYNEVIARVRWTWVNLNLWQKLKLSRDDAKPLLRLKGFPSFPLVERQANEVDWWDMVCNVKKLINEKKEDGKVFWQNLAGYKRQEALRPYLSSEEDRKKGKKFARYQLGDLLLHLEKKHGEDWGKVYDEAWERIDKKVEGLSKHIKLEEERRSEDAQSKAALTDWLRAKASFVIEGLKEADKDEFCRCELKLQKWYGDLRGKPFAIEAENSILDISGFSKQYNCAFIWQKDGVKKLNLYLIINYFKGGKLRFKKIKPEAFEANRFYTVINKKSGEIVPMEVNFNFDDPNLIILPLAFGKRQGREFIWNDLLSLETGSLKLANGRVIEKTLYNRRTRQDEPALFVALTFERREVLDSSNIKPMNLIGVDRGENIPAVIALTDPEGCPLSRFKDSLGNPTHILRIGESYKEKQRTIQAKKEVEQRRAGGYSRKYASKAKNLADDMVRNTARDLLYYAVTQDAMLIFENLSRGFGRQGKRTFMAERQYTRMEDWLTAKLAYEGLPSKTYLSKTLAQYTSKTCSNCGFTITSADYDRVLEKLKKTATGWMTTINGKELKVEGQITYYNRYKRQNVVKDLSVELDRLSEESVNNDISSWTKGRSGEALSLLKKRFSHRPVQEKFVCLNCGFETHADEQAALNIARSWLFLRSQEYKKYQTNKTTGNTDKRAFVETWQSFYRKKLKEVWKPAV

SEQ ID NO: 36246 - protein, 979 aa, synthetic construct
  REGION 1..979: note = engineered CasX variant
QEIKRINKIRRRLVKDSNTKKAGKTGPMKTLLVRVMTPDLRERLENLRKKPENIPQPISNTSRANLNKLLTDYTEMKKAILHVYWEEFQKDPVGLMSRVAQPASKKIDQNKLKPEMDEKGNLTTAGFACSQCGQPLFVYKLEQVSEKGKAYTNYFGRCNVAEHEKLILLAQLKPEKDSDEAVTYSLGKFGQRALDFYSIHVTKESTHPVKPLAQIAGNRYASVPVGKALSDACMGTIASFLSKYQDIIIEHQKVVKGNQKRLESLRELAGKENLEYPSVTLPPQPHTKEGVDAYNEVIARVRWTWVNLNLWQKLKLSRDDAKPLLRLKGFPSFPLVERQANEVDWWDMVCNVKKLINEKKEDGKVFWQNLAGYKRQEALRPYLSSEEDRKKGKKFARYQLGDLLLHLEKKHGEDWGKVYDEAWERIDKKVEGLSKHIKLEEERRSEDAQSKAALTDWLRAKASFVIEGLKEADKDEFCRCELKLQKWYGDLRGKPFAIEAENSILDISGFSKQYNCAFIWQKDGVKKLNLYLIINYFKGGKLRFKKIKPEAFEANRFYTVINKKSGEIVPMEVNFNFDDPNLIILPLAFGKRQGREFIWNDLLSLETGSLKLANGRVIEKTLYNRRTRQDEPALFVALTFERREVLDSSNIKPMNLIGVDRGENIPAVIALTDPEGCPLSRFKDSLGNPTHILRIGESYKEKQRTIQAKKEVEQRRAGGYSRKYASKAKNLADDMVRNTARDLLYYAVTQDAMLIFENLSRGFGRQGKRTFMAERQYTRMEDWLTAKLAYEGLPSKTYLSKTLAQYTSKTCSNCGFTITSADYDRVLEKLKKTATGWMTTINGKELKVEGQITYYNRYKRQNVVKDLSVELDRLSEESVNNDISSWTKGRSGEALSLLKKRFSHRPVQEKFVCLNCGFETHADEQAALNIARSWLFLRSQEYKKYQTNKTTGNTDKRAFVETWQSFYRKKLKEVWKPAV

SEQ ID NO: 36247 - protein, 979 aa, synthetic construct
  REGION 1..979: note = engineered CasX variant
QEIKRINKIRRRLVKDSNTKKAGKTGPMKTLLVRVMTPDLRERLENLRKKPENIPQPISNTSRANLNKLLTDYTEMKKAILHVYWEEFQKDPVGLMSRVAQPASKKIDQNKLKPEMDEKGNLTTAGFACSQCGQPLFVYKLEQVSEKGKAYTNYFGRCNVAEHEKLIKLAQLKPEKDSDEAVTYSLGKFGQRALDFYSIHVTKESTHPVKPLAQIAGNRYASGPVGKALSDACMGTIASFLSKYQDIIIEHQKVVKGNQKRLESLRELAGKENLEYPSVTLPPQPHTKEGVDAYNEVIARVRWTWVNLNLWQKLKLSRDDAKPLLRLKGFPSFPLVERQANEVDWWDMVCNVKKLINEKKEDGKVFWQNLAGYKRQEALRPYLSSEEDRKKGKKFARYQLGDLLLHLEKKHGEDWGKVYDEAWERIDKKVEGLSKHIKLEEERRSEDAQSKAALTDWLRAKASFVIEGLKEADKDEFCRCELKLQKWYGDLRGKPFAIEAENSILDISGFSKQYNCAFIWQKDGVKKLNLYLIINYFKGGKLRFKKIKPEAFEANRFYTVINKKSGEIVPMEVNFNFDDPNLIILPLAFGKRQGREFIWNDLLSLETGSLKLANGRVIEKTLYNRRTRQDEPALFVALTFERREVLDSSNIKPMNLIGVDRGENIPAVIALTDPEGCPLSRFKDSLGNPTHILRIGESYKEKQRTIQAKKEVEQRRAGGYSRKYASKAKNLADDMVRNTARDLLYYAVTQDAMLIFENLSRGFGRQGKRTFMAERQYTRMEDWLTAKLAYEGLPSKTYLSKTLAQYTSKTCSNCGFTITSADYDRVLEKLKKTATGWMTTINGKELKVEGQITYYNRYKRQNVVKDLSVELDRLSEESVNNDISSWTKGRSGEALSLLKKRFSHRPVQEKFVCLNCGFETHADEQAALNIARSWLFLRSQEYKKYQTNKTTGNTDKRAFVETWQSFYRKKLKEVWKPAV

SEQ ID NO: 36248 - protein, 978 aa, synthetic construct
  REGION 1..978: note = engineered CasX variant
QEIKRINKIRRRLVKDSNTKKAGKTGPMKTLLVRVMTPDLRERLENLRKKPENIPQPISNTSRANLNKLLTDYTEMKKAILHVYWEEFQKDPVGLMSRVAQPASKKIDQNKLKPEMDEKGNLTTAGFACSQCGQPLFVYKLEQVSEKGKAYTNYFGRCNVAEHEKLILLAQLKPEKDSDEAVTYSLGKFGQRALDFYSIHVTKESTHPVKPLAQIAGNRYASPVGKALSDACMGTIASFLSKYQDIIIEHQKVVKGNQKRLESLRELAGKENLEYPSVTLPPQPHTKEGVDAYNEVIARVRWTWVNLNLWQKLKLSRDDAKPLLRLKGFPSFPLVERQANEVDWWDMVCNVKKLINEKKEDGKVFWQNLAGYKRQEALRPYLSSEEDRKKGKKFARYQLGDLLLHLEKKHGEDWGKVYDEAWERIDKKVEGLSKHIKLEEERRSEDAQSKAALTDWLRAKASFVIEGLKEADKDEFCRCELKLQKWYGDLRGKPFAIEAENSILDISGFSKQYNCAFIWQKDGVKKLNLYLIINYFKGGKLRFKKIKPEAFEANRFYTVINKKSGEIVPMEVNFNFDDPNLIILPLAFGKRQGREFIWNDLLSLETGSLKLANGRVIEKTLYNRRTRQDEPALFVALTFERREVLDSSNIKPMNLIGVDRGENIPAVIALTDPEGCPLSRFKDSLGNPTHILRIGESYKEKQRTIQAKKEVEQRRAGGYSRKYASKAKNLADDMVRNTARDLLYYAVTQDAMLIFENLSRGFGRQGKRTFMAERQYTRMEDWLTAKLAYEGLPSKTYLSKTLAQYTSKTCSNCGFTITSADYDRVLEKLKKTATGWMTTINGKELKVEGQITYYNRYKRQNVVKDLSVELDRLSEESVNNDISSWTKGRSGEALSLLKKRFSHRPVQEKFVCLNCGFETHADEQAALNIARSWLFLRSQEYKKYQTNKTTGNTDKRAFVETWQSFYRKKLKEVWKPAV

SEQ ID NO: 36249 - protein, 979 aa, synthetic construct
  REGION 1..979: note = engineered CasX variant
QEIKRINKIRRRLVKDSNTKKAGKTGPMKTLLVRVMTPDLRERLENLRKKPENIPQPISNTSRANLNKLLTDYTEMKKAILHVYWEEFQKDPVGLMSRVAQPASKKIDQNKLKPEMDEKGNLTTAGFACSQCGQPLFVYKLEQVSEKGKAYTNYFGRCNVAEHEKLILLAQLKPEKDSDEAVTYSLGKFGQRALDFYSIHVTKESTHPVKPLAQIAGNRYASYPVGKALSDACMGTIASFLSKYQDIIIEHQKVVKGNQKRLESLRELAGKENLEYPSVTLPPQPHTKEGVDAYNEVIARVRWWVNLNLWQKLKLSRDDAKPLLRLKGFPSFPLVERQQANEVDWWDMVCNVKKLINEKKEDGKVFWQNLAGYKRQEALRPYLSSEEDRKKGKKFARYQLGDLLLHLEKKHGEDWGKVYDEAWERIDKKVEGLSKHIKLEEERRSEDAQSKAALTDWLRAKASFVIEGLKEADKDEFCRCELKLQKWYGDLRGKPFAIEAENSILDISGFSKQYNCAFIWQKDGVKKLNLYLIINYFKGGKLRFKKIKPEAFEANRFYTVINKKSGEIVPMEVNFNFDDPNLIILPLAFGKRQGREFIWNDLLSLETGSLKLANGRVIEKTLYNRRTRQDEPALFVALTFERREVLDSSNIKPMNLIGVDRGENIPAVIALTDPEGCPLSRFKDSLGNPTHILRIGESYKEKQRTIQAKKEVEQRRAGGYSRKYASKAKNLADDMVRNTARDLLYYAVTQDAMLIFENLSRGFGRQGKRTFMAERQYTRMEDWLTAKLAYEGLPSKTYLSKTLAQYTSKTCSNCGFTITSADYDRVLEKLKKTATGWMTTINGKELKVEGQITYYNRYKRQNVVKDLSVELDRLSEESVNNDISSWTKGRSGEALSLLKKRFSHRPVQEKFVCLNCGFETHADEQAALNIARSWLFLRSQEYKKYQTNKTTGNTDKRAFVETWQSFYRKKLKEVWKPAV

SEQ ID NO: 36250 - protein, 979 aa, synthetic construct
  REGION 1..979: note = engineered CasX variant
QEIKRINKIRRRLVKDSNTKKAGKTGPMKTLLVRVMTPDLRERLENLRKKPENIPQPISNTSRANLNKLLTDYTEMKKAILHVYWEEFQKDPVGLMSRVAQPASKKIDQNKLKPEMDEKGNLTTAGFACSQCGQPLFVYKLEQVSEKGKAYTNYFGRCNVAEHEKLILLAQLKPEKDSDEAVTYSLGKFGQRALDFYSIHVTKESTHPVKPLAQIAGNRYASHPVGKALSDACMGTIASFLSKYQDIIIEHQKVVKGNQKRLESLRELAGKENLEYPSVTLPPQPHTKEGVDAYNEVIARVRWWVNLNLWQKLKLSRDDAKPLLRLKGFPSFPLVERQQANEVDWWDMVCNVKKLINEKKEDGKVFWQNLAGYKRQEALRPYLSSEEDRKKGKKFARYQLGDLLLHLEKKHGEDWGKVYDEAWERIDKKVEGLSKHIKLEEERRSEDAQSKAALTDWLRAKASFVIEGLKEADKDEFCRCELKLQKWYGDLRGKPFAIEAENSILDISGFSKQYNCAFIWQKDGVKKLNLYLIINYFKGGKLRFKKIKPEAFEANRFYTVINKKSGEIVPMEVNFNFDDPNLIILPLAFGKRQGREFIWNDLLSLETGSLKLANGRVIEKTLYNRRTRQDEPALFVALTFERREVLDSSNIKPMNLIGVDRGENIPAVIALTDPEGCPLSRFKDSLGNPTHILRIGESYKEKQRTIQAKKEVEQRRAGGYSRKYASKAKNLADDMVRNTARDLLYYAVTQDAMLIFENLSRGFGRQGKRTFMAERQYTRMEDWLTAKLAYEGLPSKTYLSKTLAQYTSKTCSNCGFTITSADYDRVLEKLKKTATGWMTTINGKELKVEGQITYYNRYKRQNVVKDLSVELDRLSEESVNNDISSWTKGRSGEALSLLKKRFSHRPVQEKFVCLNCGFETHADEQAALNIARSWLFLRSQEYKKYQTNKTTGNTDKRAFVETWQSFYRKKLKEVWKPAV

SEQ ID NO: 36251 - protein, 979 aa, synthetic construct
  REGION 1..979: note = engineered CasX variant
QEIKRINKIRRRLVKDSNTKKAGKTGPMKTLLVRVMTPDLRERLENLRKKPENIPQPISNTSRANLNKLLTDYTEMKKAILHVYWEEFQKDPVGLMSRVAQPASKKIDQNKLKPEMDEKGNLTTAGFACSQCGQPLFVYKLEQVSEKGKAYTNYFGRCNVAEHEKLILLAQLKPEKDSDEAVTYSLGKFGQRALDFYSIHVTKESTHPVKPLAQIAGNRYASSPVGKALSDACMGTIASFLSKYQDIIIEHQKVVKGNQKRLESLRELAGKENLEYPSVTLPPQPHTKEGVDAYNEVIARVRWWVNLNLWQKLKLSRDDAKPLLRLKGFPSFPLVERQQANEVDWWDMVCNVKKLINEKKEDGKVFWQNLAGYKRQEALRPYLSSEEDRKKGKKFARYQLGDLLLHLEKKHGEDWGKVYDEAWERIDKKVEGLSKHIKLEEERRSEDAQSKAALTDWLRAKASFVIEGLKEADKDEFCRCELKLQKWYGDLRGKPFAIEAENSILDISGFSKQYNCAFIWQKDGVKKLNLYLIINYFKGGKLRFKKIKPEAFEANRFYTVINKKSGEIVPMEVNFNFDDPNLIILPLAFGKRQGREFIWNDLLSLETGSLKLANGRVIEKTLYNRRTRQDEPALFVALTFERREVLDSSNIKPMNLIGVDRGENIPAVIALTDPEGCPLSRFKDSLGNPTHILRIGESYKEKQRTIQAKKEVEQRRAGGYSRKYASKAKNLADDMVRNTARDLLYYAVTQDAMLIFENLSRGFGRQGKRTFMAERQYTRMEDWLTAKLAYEGLPSKTYLSKTLAQYTSKTCSNCGFTITSADYDRVLEKLKKTATGWMTTINGKELKVEGQITYYNRYKRQNVVKDLSVELDRLSEESVNNDISSWTKGRSGEALSLLKKRFSHRPVQEKFVCLNCGFETHADEQAALNIARSWLFLRSQEYKKYQTNKTTGNTDKRAFVETWQSFYRKKLKEVWKPAV

SEQ ID NO: 36252 - protein, 979 aa, synthetic construct
  REGION 1..979: note = engineered CasX variant
QEIKRINKIRRRLVKDSNTKKAGKTGPMKTLLVRVMTPDLRERLENLRKKPENIPQPISNTSRANLNKLLTDYTEMKKAILHVYWEEFQKDPVGLMSRVAQPASKKIDQNKLKPEMDEKGNLTTAGFACSQCGQPLFVYKLEQVSEKGKAYTNYFGRCNVAEHEKLILLAQLKPEKDSDEAVTYSLGKFGQRALDFYSIHVTKESTHPVKPLAQIAGNRYASTPVGKALSDACMGTIASFLSKYQDIIIEHQKVVKGNQKRLESLRELAGKENLEYPSVTLPPQPHTKEGVDAYNEVIARVRWWVNLNLWQKLKLSRDDAKPLLRLKGFPSFPLVERQQANEVDWWDMVCNVKKLINEKKEDGKVFWQNLAGYKRQEALRPYLSSEEDRKKGKKFARYQLGDLLLHLEKKHGEDWGKVYDEAWERIDKKVEGLSKHIKLEEERRSEDAQSKAALTDWLRAKASFVIEGLKEADKDEFCRCELKLQKWYGDLRGKPFAIEAENSILDISGFSKQYNCAFIWQKDGVKKLNLYLIINYFKGGKLRFKKIKPEAFEANRFYTVINKKSGEIVPMEVNFNFDDPNLIILPLAFGKRQGREFIWNDLLSLETGSLKLANGRVIEKTLYNRRTRQDEPALFVALTFERREVLDSSNIKPMNLIGVDRGENIPAVIALTDPEGCPLSRFKDSLGNPTHILRIGESYKEKQRTIQAKKEVEQRRAGGYSRKYASKAKNLADDMVRNTARDLLYYAVTQDAMLIFENLSRGFGRQGKRTFMAERQYTRMEDWLTAKLAYEGLPSKTYLSKTLAQYTSKTCSNCGFTITSADYDRVLEKLKKTATGWMTTINGKELKVEGQITYYNRYKRQNVVKDLSVELDRLSEESVNNDISSWTKGRSGEALSLLKKRFSHRPVQEKFVCLNCGFETHADEQAALNIARSWLFLRSQEYKKYQTNKTTGNTDKRAFVETWQSFYRKKLKEVWKPAV

SEQ ID NO: 36253 - protein, 979 aa, synthetic construct
  REGION 1..979: note = engineered CasX variant
QEIKRINKIRRRLVKDSNTKKAGKTGPMKTLLVRVMTPDLRERLENLRKKPENIPQPISNTSRANLNKLLTDYTEMKKAILHVYWEEFQKDPVGLMSRVAQPASKKIDQNKLKPEMDEKGNLTTAGFACSQCGQPLFVYKLEQVSEKGKAYTNYFGRCNVAEHEKLILLAQLKPEKDSDEAVTYSLGKFGQRALDFYSIHVTKESTHPVKPLAQIAGNRYASAPVGKALSDACMGTIASFLSKYQDIIIEHQKVVKGNQKRLESLRELAGKENLEYPSVTLPPQPHTKEGVDAYNEVIARVRWWVNLNLWQKLKLSRDDAKPLLRLKGFPSFPLVERQQANEVDWWDMVCNVKKLINEKKEDGKVFWQNLAGYKRQEALRPYLSSEEDRKKGKKFARYQLGDLLLHLEKKHGEDWGKVYDEAWERIDKKVEGLSKHIKLEEERRSEDAQSKAALTDWLRAKASFVIEGLKEADKDEFCRCELKLQKWYGDLRGKPFAIEAENSILDISGFSKQYNCAFIWQKDGVKKLNLYLIINYFKGGKLRFKKIKPEAFEANRFYTVINKKSGEIVPMEVNFNFDDPNLIILPLAFGKRQGREFIWNDLLSLETGSLKLANGRVIEKTLYNRRTRQDEPALFVALTFERREVLDSSNIKPMNLIGVDRGENIPAVIALTDPEGCPLSRFKDSLGNPTHILRIGESYKEKQRTIQAKKEVEQRRAGGYSRKYASKAKNLADDMVRNTARDLLYYAVTQDAMLIFENLSRGFGRQGKRTFMAERQYTRMEDWLTAKLAYEGLPSKTYLSKTLAQYTSKTCSNCGFTITSADYDRVLEKLKKTATGWMTTINGKELKVEGQITYYNRYKRQNVVKDLSVELDRLSEESVNNDISSWTKGRSGEALSLLKKRFSHRPVQEKFVCLNCGFETHADEQAALNIARSWLFLRSQEYKKYQTNKTTGNTDKRAFVETWQSFYRKKLKEVWKPAV

SEQ ID NO: 36254 - protein, 979 aa, synthetic construct
  REGION 1..979: note = engineered CasX variant
QEIKRINKIRRRLVKDSNTKKAGKTGPMKTLLVRVMTPDLRERLENLRKKPENIPQPISNTSRANLNKLLTDYTEMKKAILHVYWEEFQKDPVGLMSRVAQPASKKIDQNKLKPEMDEKGNLTTAGFACSQCGQPLFVYKLEQVSEKGKAYTNYFGRCNVAEHEKLILLAQLKPEKDSDEAVTYSLGKFGQRALDFYSIHVTKESTHPVKPLAQIAGNRYASVPVGKALSDACMGTIASFLSKYQDIIIEHQKVVKGNQKRLESLRELAGKENLEYPSVTLPPQPHTKEGVDAYNEVIARVRWWVNLNLWQKLKLSRDDAKPLLRLKGFPSFPLVERQQANEVDWWDMVCNVKKLINEKKEDGKVFWQNLAGYKRQEALRPYLSSEEDRKKGKKFARYQLGDLLLHLEKKHGEDWGKVYDEAWERIDKKVEGLSKHIKLEEERRSEDAQSKAALTDWLRAKASFVIEGLKEADKDEFCRCELKLQKWYGDLRGKPFAIEAENSILDISGFSKQYNCAFIWQKDGVKKLNLYLIINYFKGGKLRFKKIKPEAFEANRFYTVINKKSGEIVPMEVNFNFDDPNLIILPLAFGKRQGREFIWNDLLSLETGSLKLANGRVIEKTLYNRRTRQDEPALFVALTFERREVLDSSNIKPMNLIGVDRGENIPAVIALTDPEGCPLSRFKDSLGNPTHILRIGESYKEKQRTIQAKKEVEQRRAGGYSRKYASKAKNLADDMVRNTARDLLYYAVTQDAMLIFENLSRGFGRQGKRTFMAERQYTRMEDWLTAKLAYEGLPSKTYLSKTLAQYTSKTCSNCGFTITSADYDRVLEKLKKTATGWMTTINGKELKVEGQITYYNRYKRQNVVKDLSVELDRLSEESVNNDISSWTKGRSGEALSLLKKRFSHRPVQEKFVCLNCGFETHADEQAALNIARSWLFLRSQEYKKYQTNKTTGNTDKRAFVETWQSFYRKKLKEVWKPAV

SEQ ID NO: 36255 - protein, 979 aa, synthetic construct
  REGION 1..979: note = engineered CasX variant
QEIKRINKIRRRLVKDSNTKKAGKTGPMKTLLVRVMTPDLRERLENLRKKPENIPQPISNTSRANLNKLLTDYTEMKKAILHVYWEEFQKDPVGLMSRVAQPASKKIDQNKLKPEMDEKGNLTTAGFACSQCGQPLFVYKLEQVSEKGKAYTNYFGRCNVAEHEKLIKLAQLKPEKDSDEAVTYSLGKFGQRALDFYSIHVTKESTHPVKPLAQIAGNRYASGPVGKALSDACMGTIASFLSKYQDIIIEHQKVVKGNQKRLESLRELAGKENLEYPSVTLPPQPHTKEGVDAYNEVIARVRWWVNLNLWQKLKLSRDDAKPLLRLKGFPSFPLVERQQANEVDWWDMVCNVKKLINEKKEDGKVFWQNLAGYKRQEALRPYLSSEEDRKKGKKFARYQLGDLLLHLEKKHGEDWGKVYDEAWERIDKKVEGLSKHIKLEEERRSEDAQSKAALTDWLRAKASFVIEGLKEADKDEFCRCELKLQKWYGDLRGKPFAIEAENSILDISGFSKQYNCAFIWQKDGVKKLNLYLIINYFKGGKLRFKKIKPEAFEANRFYTVINKKSGEIVPMEVNFNFDDPNLIILPLAFGKRQGREFIWNDLLSLETGSLKLANGRVIEKTLYNRRTRQDEPALFVALTFERREVLDSSNIKPMNLIGVDRGENIPAVIALTDPEGCPLSRFKDSLGNPTHILRIGESYKEKQRTIQAKKEVEQRRAGGYSRKYASKAKNLADDMVRNTARDLLYYAVTQDAMLIFENLSRGFGRQGKRTFMAERQYTRMEDWLTAKLAYEGLPSKTYLSKTLAQYTSKTCSNCGFTITSADYDRVLEKLKKTATGWMTTINGKELKVEGQITYYNRYKRQNVVKDLSVELDRLSEESVNNDISSWTKGRSGEALSLLKKRFSHRPVQEKFVCLNCGFETHADEQAALNIARSWLFLRSQEYKKYQTNKTTGNTDKRAFVETWQSFYRKKLKEVWKPAV

SEQ ID NO: 36256 - protein, 978 aa, synthetic construct
  REGION 1..978: note = engineered CasX variant
QEIKRINKIRRRLVKDSNTKKAGKTGPMKTLLVRVMTPDLRERLENLRKKPENIPQPISNTSRANLNKLLTDYTEMKKAILHVYWEEFQKDPVGLMSRVAQPASKKIDQNKLKPEMDEKGNLTTAGFACSQCGQPLFVYKLEQVSEKGKAYTNYFGRCNVAEHEKLILLAQLKPEKDSDEAVTYSLGKFGQRALDFYSIHVTKESTHPVKPLAQIAGNRYASPVGKALSDACMGTIASFLSKYQDIIIEHQKVVKGNQKRLESLRELAGKENLEYPSVTLPPQPHTKEGVDAYNEVIARVRWWVNLNLWQKLKLSRDDAKPLLRLKGFPSFPLVERQQANEVDWWDMVCNVKKLINEKKEDGKVFWQNLAGYKRQEALRPYLSSEEDRKKGKKFARYQLGDLLLHLEKKHGEDWGKVYDEAWERIDKKVEGLSKHIKLEEERRSEDAQSKAALTDWLRAKASFVIEGLKEADKDEFCRCELKLQKWYGDLRGKPFAIEAENSILDISGFSKQYNCAFIWQKDGVKKLNLYLIINYFKGGKLRFKKIKPEAFEANRFYTVINKKSGEIVPMEVNFNFDDPNLIILPLAFGKRQGREFIWNDLLSLETGSLKLANGRVIEKTLYNRRTRQDEPALFVALTFERREVLDSSNIKPMNLIGVDRGENIPAVIALTDPEGCPLSRFKDSLGNPTHILRIGESYKEKQRTIQAKKEVEQRRAGGYSRKYASKAKNLADDMVRNTARDLLYYAVTQDAMLIFENLSRGFGRQGKRTFMAERQYTRMEDWLTAKLAYEGLPSKTYLSKTLAQYTSKTCSNCGFTITSADYDRVLEKLKKTATGWMTTINGKELKVEGQITYYNRYKRQNVVKDLSVELDRLSEESVNNDISSWTKGRSGEALSLLKKRFSHRPVQEKFVCLNCGFETHADEQAALNIARSWLFLRSQEYKKYQTNKTTGNTDKRAFVETWQSFYRKKLKEVWKPAV

SEQ ID NO: 36257 - protein, 979 aa, synthetic construct
  REGION 1..979: note = engineered CasX variant
QEIKRINKIRRRLVKDSNTKKAGKTGPMKTLLVRVMTPDLRERLENLRKKPENIPQPISNTSRANLNKLLTDYTEMKKAILHVYWEEFQKDPVGLMSRVAQPASKKIDQNKLKPEMDEKGNLTTAGFACSQCGQPLFVYKLEQVSEKGKAYTNYFGRCNVAEHEKLILLAQLKPEKDSDEAVTYSLGKFGQRALDFYSIHVTKESTHPVKPLAQIAGNRYASYPVGKALSDACMGTIASFLSKYQDIIIEHQKVVKGNQKRLESLRELAGKENLEYPSVTLPPQPHTKEGVDAYNEVIARVRWWVNLNLWQKLKLSRDDAKPLLRLKGFPSFPLVERQANAEVDWWDMVCNVKKLINEKKEDGKVFWQNLAGYKRQEALRPYLSSEEDRKKGKKFARYQLGDLLLHLEKKHGEDWGKVYDEAWERIDKKVEGLSKHIKLEEERRSEDAQSKAALTDWLRAKASFVIEGLKEADKDEFCRCELKLQKWYGDLRGKPFAIEAENSILDISGFSKQYNCAFIWQKDGVKKLNLYLIINYFKGGKLRFKKIKPEAFEANRFYTVINKKSGEIVPMEVNFNFDDPNLIILPLAFGKRQGREFIWNDLLSLETGSLKLANGRVIEKTLYNRRTRQDEPALFVALTFERREVLDSSNIKPMNLIGVDRGENIPAVIALTDPEGCPLSRFKDSLGNPTHILRIGESYKEKQRTIQAKKEVEQRRAGGYSRKYASKAKNLADDMVRNTARDLLYYAVTQDAMLIFENLSRGFGRQGKRTFMAERQYTRMEDWLTAKLAYEGLPSKTYLSKTLAQYTSKTCSNCGFTITSADYDRVLEKLKKTATGWMTTINGKELKVEGQITYYNRYKRQNVVKDLSVELDRLSEESVNNDISSWTKGRSGEALSLLKKRFSHRPVQEKFVCLNCGFETHADEQAALNIARSWLFLRSQEYKKYQTNKTTGNTDKRAFVETWQSFYRKKLKEVWKPAV

SEQ ID NO: 36258 - protein, 979 aa, synthetic construct
  REGION 1..979: note = engineered CasX variant
QEIKRINKIRRRLVKDSNTKKAGKTGPMKTLLVRVMTPDLRERLENLRKKPENIPQPISNTSRANLNKLLTDYTEMKKAILHVYWEEFQKDPVGLMSRVAQPASKKIDQNKLKPEMDEKGNLTTAGFACSQCGQPLFVYKLEQVSEKGKAYTNYFGRCNVAEHEKLILLAQLKPEKDSDEAVTYSLGKFGQRALDFYSIHVTKESTHPVKPLAQIAGNRYASHPVGKALSDACMGTIASFLSKYQDIIIEHQKVVKGNQKRLESLRELAGKENLEYPSVTLPPQPHTKEGVDAYNEVIARVRWWVNLNLWQKLKLSRDDAKPLLRLKGFPSFPLVERQANAEVDWWDMVCNVKKLINEKKEDGKVFWQNLAGYKRQEALRPYLSSEEDRKKGKKFARYQLGDLLLHLEKKHGEDWGKVYDEAWERIDKKVEGLSKHIKLEEERRSEDAQSKAALTDWLRAKASFVIEGLKEADKDEFCRCELKLQKWYGDLRGKPFAIEAENSILDISGFSKQYNCAFIWQKDGVKKLNLYLIINYFKGGKLRFKKIKPEAFEANRFYTVINKKSGEIVPMEVNFNFDDPNLIILPLAFGKRQGREFIWNDLLSLETGSLKLANGRVIEKTLYNRRTRQDEPALFVALTFERREVLDSSNIKPMNLIGVDRGENIPAVIALTDPEGCPLSRFKDSLGNPTHILRIGESYKEKQRTIQAKKEVEQRRAGGYSRKYASKAKNLADDMVRNTARDLLYYAVTQDAMLIFENLSRGFGRQGKRTFMAERQYTRMEDWLTAKLAYEGLPSKTYLSKTLAQYTSKTCSNCGFTITSADYDRVLEKLKKTATGWMTTINGKELKVEGQITYYNRYKRQNVVKDLSVELDRLSEESVNNDISSWTKGRSGEALSLLKKRFSHRPVQEKFVCLNCGFETHADEQAALNIARSWLFLRSQEYKKYQTNKTTGNTDKRAFVETWQSFYRKKLKEVWKPAV

SEQ ID NO: 36259 - protein, 979 aa, synthetic construct
  REGION 1..979: note = engineered CasX variant
QEIKRINKIRRRLVKDSNTKKAGKTGPMKTLLVRVMTPDLRERLENLRKKPENIPQPISNTSRANLNKLLTDYTEMKKAILHVYWEEFQKDPVGLMSRVAQPASKKIDQNKLKPEMDEKGNLTTAGFACSQCGQPLFVYKLEQVSEKGKAYTNYFGRCNVAEHEKLILLAQLKPEKDSDEAVTYSLGKFGQRALDFYSIHVTKESTHPVKPLAQIAGNRYASSPVGKALSDACMGTIASFLSKYQDIIIEHQKVVKGNQKRLESLRELAGKENLEYPSVTLPPQPHTKEGVDAYNEVIARVRWWVNLNLWQKLKLSRDDAKPLLRLKGFPSFPLVERQANAEVDWWDMVCNVKKLINEKKEDGKVFWQNLAGYKRQEALRPYLSSEEDRKKGKKFARYQLGDLLLHLEKKHGEDWGKVYDEAWERIDKKVEGLSKHIKLEEERRSEDAQSKAALTDWLRAKASFVIEGLKEADKDEFCRCELKLQKWYGDLRGKPFAIEAENSILDISGFSKQYNCAFIWQKDGVKKLNLYLIINYFKGGKLRFKKIKPEAFEANRFYTVINKKSGEIVPMEVNFNFDDPNLIILPLAFGKRQGREFIWNDLLSLETGSLKLANGRVIEKTLYNRRTRQDEPALFVALTFERREVLDSSNIKPMNLIGVDRGENIPAVIALTDPEGCPLSRFKDSLGNPTHILRIGESYKEKQRTIQAKKEVEQRRAGGYSRKYASKAKNLADDMVRNTARDLLYYAVTQDAMLIFENLSRGFGRQGKRTFMAERQYTRMEDWLTAKLAYEGLPSKTYLSKTLAQYTSKTCSNCGFTITSADYDRVLEKLKKTATGWMTTINGKELKVEGQITYYNRYKRQNVVKDLSVELDRLSEESVNNDISSWTKGRSGEALSLLKKRFSHRPVQEKFVCLNCGFETHADEQAALNIARSWLFLRSQEYKKYQTNKTTGNTDKRAFVETWQSFYRKKLKEVWKPAV

SEQ ID NO: 36260 - protein, 979 aa, synthetic construct
  REGION 1..979: note = engineered CasX variant
QEIKRINKIRRRLVKDSNTKKAGKTGPMKTLLVRVMTPDLRERLENLRKKPENIPQPISNTSRANLNKLLTDYTEMKKAILHVYWEEFQKDPVGLMSRVAQPASKKIDQNKLKPEMDEKGNLTTAGFACSQCGQPLFVYKLEQVSEKGKAYTNYFGRCNVAEHEKLILLAQLKPEKDSDEAVTYSLGKFGQRALDFYSIHVTKESTHPVKPLAQIAGNRYASTPVGKALSDACMGTIASFLSKYQDIIIEHQKVVKGNQKRLESLRELAGKENLEYPSVTLPPQPHTKEGVDAYNEVIARVRWWVNLNLWQKLKLSRDDAKPLLRLKGFPSFPLVERQANAEVDWWDMVCNVKKLINEKKEDGKVFWQNLAGYKRQEALRPYLSSEEDRKKGKKFARYQLGDLLLHLEKKHGEDWGKVYDEAWERIDKKVEGLSKHIKLEEERRSEDAQSKAALTDWLRAKASFVIEGLKEADKDEFCRCELKLQKWYGDLRGKPFAIEAENSILDISGFSKQYNCAFIWQKDGVKKLNLYLIINYFKGGKLRFKKIKPEAFEANRFYTVINKKSGEIVPMEVNFNFDDPNLIILPLAFGKRQGREFIWNDLLSLETGSLKLANGRVIEKTLYNRRTRQDEPALFVALTFERREVLDSSNIKPMNLIGVDRGENIPAVIALTDPEGCPLSRFKDSLGNPTHILRIGESYKEKQRTIQAKKEVEQRRAGGYSRKYASKAKNLADDMVRNTARDLLYYAVTQDAMLIFENLSRGFGRQGKRTFMAERQYTRMEDWLTAKLAYEGLPSKTYLSKTLAQYTSKTCSNCGFTITSADYDRVLEKLKKTATGWMTTINGKELKVEGQITYYNRYKRQNVVKDLSVELDRLSEESVNNDISSWTKGRSGEALSLLKKRFSHRPVQEKFVCLNCGFETHADEQAALNIARSWLFLRSQEYKKYQTNKTTGNTDKRAFVETWQSFYRKKLKEVWKPAV

SEQ ID NO: 36261 - protein, 979 aa, synthetic construct
  REGION 1..979: note = engineered CasX variant
QEIKRINKIRRRLVKDSNTKKAGKTGPMKTLLVRVMTPDLRERLENLRKKPENIPQPISNTSRANLNKLLTDYTEMKKAILHVYWEEFQKDPVGLMSRVAQPASKKIDQNKLKPEMDEKGNLTTAGFACSQCGQPLFVYKLEQVSEKGKAYTNYFGRCNVAEHEKLILLAQLKPEKDSDEAVTYSLGKFGQRALDFYSIHVTKESTHPVKPLAQIAGNRYASAPVGKALSDACMGTIASFLSKYQDIIIEHQKVVKGNQKRLESLRELAGKENLEYPSVTLPPQPHTKEGVDAYNEVIARVRWWVNLNLWQKLKLSRDDAKPLLRLKGFPSFPLVERQANAEVDWWDMVCNVKKLINEKKEDGKVFWQNLAGYKRQEALRPYLSSEEDRKKGKKFARYQLGDLLLHLEKKHGEDWGKVYDEAWERIDKKVEGLSKHIKLEEERRSEDAQSKAALTDWLRAKASFVIEGLKEADKDEFCRCELKLQKWYGDLRGKPFAIEAENSILDISGFSKQYNCAFIWQKDGVKKLNLYLIINYFKGGKLRFKKIKPEAFEANRFYTVINKKSGEIVPMEVNFNFDDPNLIILPLAFGKRQGREFIWNDLLSLETGSLKLANGRVIEKTLYNRRTRQDEPALFVALTFERREVLDSSNIKPMNLIGVDRGENIPAVIALTDPEGCPLSRFKDSLGNPTHILRIGESYKEKQRTIQAKKEVEQRRAGGYSRKYASKAKNLADDMVRNTARDLLYYAVTQDAMLIFENLSRGFGRQGKRTFMAERQYTRMEDWLTAKLAYEGLPSKTYLSKTLAQYTSKTCSNCGFTITSADYDRVLEKLKKTATGWMTTINGKELKVEGQITYYNRYKRQNVVKDLSVELDRLSEESVNNDISSWTKGRSGEALSLLKKRFSHRPVQEKFVCLNCGFETHADEQAALNIARSWLFLRSQEYKKYQTNKTTGNTDKRAFVETWQSFYRKKLKEVWKPAV

SEQ ID NO: 36262 - protein, 979 aa, synthetic construct
  REGION 1..979: note = engineered CasX variant
QEIKRINKIRRRLVKDSNTKKAGKTGPMKTLLVRVMTPDLRERLENLRKKPENIPQPISNTSRANLNKLLTDYTEMKKAILHVYWEEFQKDPVGLMSRVAQPASKKIDQNKLKPEMDEKGNLTTAGFACSQCGQPLFVYKLEQVSEKGKAYTNYFGRCNVAEHEKLILLAQLKPEKDSDEAVTYSLGKFGQRALDFYSIHVTKESTHPVKPLAQIAGNRYASVPVGKALSDACMGTIASFLSKYQDIIIEHQKVVKGNQKRLESLRELAGKENLEYPSVTLPPQPHTKEGVDAYNEVIARVRWWVNLNLWQKLKLSRDDAKPLLRLKGFPSFPLVERQANAEVDWWDMVCNVKKLINEKKEDGKVFWQNLAGYKRQEALRPYLSSEEDRKKGKKFARYQLGDLLLHLEKKHGEDWGKVYDEAWERIDKKVEGLSKHIKLEEERRSEDAQSKAALTDWLRAKASFVIEGLKEADKDEFCRCELKLQKWYGDLRGKPFAIEAENSILDISGFSKQYNCAFIWQKDGVKKLNLYLIINYFKGGKLRFKKIKPEAFEANRFYTVINKKSGEIVPMEVNFNFDDPNLIILPLAFGKRQGREFIWNDLLSLETGSLKLANGRVIEKTLYNRRTRQDEPALFVALTFERREVLDSSNIKPMNLIGVDRGENIPAVIALTDPEGCPLSRFKDSLGNPTHILRIGESYKEKQRTIQAKKEVEQRRAGGYSRKYASKAKNLADDMVRNTARDLLYYAVTQDAMLIFENLSRGFGRQGKRTFMAERQYTRMEDWLTAKLAYEGLPSKTYLSKTLAQYTSKTCSNCGFTITSADYDRVLEKLKKTATGWMTTINGKELKVEGQITYYNRYKRQNVVKDLSVELDRLSEESVNNDISSWTKGRSGEALSLLKKRFSHRPVQEKFVCLNCGFETHADEQAALNIARSWLFLRSQEYKKYQTNKTTGNTDKRAFVETWQSFYRKKLKEVWKPAV

SEQ ID NO: 36263 - protein, 979 aa, synthetic construct
  REGION 1..979: note = engineered CasX variant
QEIKRINKIRRRLVKDSNTKKAGKTGPMKTLLVRVMTPDLRERLENLRKKPENIPQPISNTSRANLNKLLTDYTEMKKAILHVYWEEFQKDPVGLMSRVAQPASKKIDQNKLKPEMDEKGNLTTAGFACSQCGQPLFVYKLEQVSEKGKAYTNYFGRCNVAEHEKLIKLAQLKPEKDSDEAVTYSLGKFGQRALDFYSIHVTKESTHPVKPLAQIAGNRYASGPVGKALSDACMGTIASFLSKYQDIIIEHQKVVKGNQKRLESLRELAGKENLEYPSVTLPPQPHTKEGVDAYNEVIARVRWWVNLNLWQKLKLSRDDAKPLLRLKGFPSFPLVERQANAEVDWWDMVCNVKKLINEKKEDGKVFWQNLAGYKRQEALRPYLSSEEDRKKGKKFARYQLGDLLLHLEKKHGEDWGKVYDEAWERIDKKVEGLSKHIKLEEERRSEDAQSKAALTDWLRAKASFVIEGLKEADKDEFCRCELKLQKWYGDLRGKPFAIEAENSILDISGFSKQYNCAFIWQKDGVKKLNLYLIINYFKGGKLRFKKIKPEAFEANRFYTVINKKSGEIVPMEVNFNFDDPNLIILPLAFGKRQGREFIWNDLLSLETGSLKLANGRVIEKTLYNRRTRQDEPALFVALTFERREVLDSSNIKPMNLIGVDRGENIPAVIALTDPEGCPLSRFKDSLGNPTHILRIGESYKEKQRTIQAKKEVEQRRAGGYSRKYASKAKNLADDMVRNTARDLLYYAVTQDAMLIFENLSRGFGRQGKRTFMAERQYTRMEDWLTAKLAYEGLPSKTYLSKTLAQYTSKTCSNCGFTITSADYDRVLEKLKKTATGWMTTINGKELKVEGQITYYNRYKRQNVVKDLSVELDRLSEESVNNDISSWTKGRSGEALSLLKKRFSHRPVQEKFVCLNCGFETHADEQAALNIARSWLFLRSQEYKKYQTNKTTGNTDKRAFVETWQSFYRKKLKEVWKPAV

SEQ ID NO: 36264 - protein, 978 aa, synthetic construct
  REGION 1..978: note = engineered CasX variant
QEIKRINKIRRRLVKDSNTKKAGKTGPMKTLLVRVMTPDLRERLENLRKKPENIPQPISNTSRANLNKLLTDYTEMKKAILHVYWEEFQKDPVGLMSRVAQPASKKIDQNKLKPEMDEKGNLTTAGFACSQCGQPLFVYKLEQVSEKGKAYTNYFGRCNVAEHEKLILLAQLKPEKDSDEAVTYSLGKFGQRALDFYSIHVTKESTHPVKPLAQIAGNRYASPVGKALSDACMGTIASFLSKYQDIIIEHQKVVKGNQKRLESLRELAGKENLEYPSVTLPPQPHTKEGVDAYNEVIARVRWWVNLNLWQKLKLSRDDAKPLLRLKGFPSFPLVERQANAEVDWWDMVCNVKKLINEKKEDGKVFWQNLAGYKRQEALRPYLSSEEDRKKGKKFARYQLGDLLLHLEKKHGEDWGKVYDEAWERIDKKVEGLSKHIKLEEERRSEDAQSKAALTDWLRAKASFVIEGLKEADKDEFCRCELKLQKWYGDLRGKPFAIEAENSILDISGFSKQYNCAFIWQKDGVKKLNLYLIINYFKGGKLRFKKIKPEAFEANRFYTVINKKSGEIVPMEVNFNFDDPNLIILPLAFGKRQGREFIWNDLLSLETGSLKLANGRVIEKTLYNRRTRQDEPALFVALTFERREVLDSSNIKPMNLIGVDRGENIPAVIALTDPEGCPLSRFKDSLGNPTHILRIGESYKEKQRTIQAKKEVEQRRAGGYSRKYASKAKNLADDMVRNTARDLLYYAVTQDAMLIFENLSRGFGRQGKRTFMAERQYTRMEDWLTAKLAYEGLPSKTYLSKTLAQYTSKTCSNCGFTITSADYDRVLEKLKKTATGWMTTINGKELKVEGQITYYNRYKRQNVVKDLSVELDRLSEESVNNDISSWTKGRSGEALSLLKKRFSHRPVQEKFVCLNCGFETHADEQAALNIARSWLFLRSQEYKKYQTNKTTGNTDKRAFVETWQSFYRKKLKEVWKPAV

SEQ ID NO: 36265 - protein, 978 aa, synthetic construct
  REGION 1..978: note = engineered CasX variant
QEIKRINKIRRRLVKDSNTKKAGKTGPMKTLLVRVMTPDLRERLENLRKKPENIPQPISNTSRANLNKLLTDYTEMKKAILHVYWEEFQKDPVGLMSRVAQPASKKIDQNKLKPEMDEKGNLTTAGFACSQCGQPLFVYKLEQVSEKGKAYTNYFGRCNVAEHEKLILLAQLKPEKDSDEAVTYSLGKFGQRALDFYSIHVTKESTHPVKPLAQIAGNRYASYPVGKALSDACMGTIASFLSKYQDIIIEHQKVVKGNQKRLESLRELAGKENLEYPSVTLPPQPHTKEGVDAYNEVIARVRWWVNLNLWQKLKLSRDDAKPLLRLKGFPSFPLVERQANEVDWWDMVCNVKKLINEKKEDGKVFWQNLAGYKRQEALRPYLSSEEDRKKGKKFARTQLGDLLLHLEKKHGEDWGKVYDEAWERIDKKVEGLSKHIKLEEERRSEDAQSKAALTDWLRAKASFVIEGLKEADKDEFCRCELKLQKWYGDLRGKPFAIEAENSILDISGFSKQYNCAFIWQKDGVKKLNLYLIINYFKGGKLRFKKIKPEAFEANRFYTVINKKSGEIVPMEVNFNFDDPNLIILPLAFGKRQGREFIWNDLLSLETGSLKLANGRVIEKTLYNRRTRQDEPALFVALTFERREVLDSSNIKPMNLIGVDRGENIPAVIALTDPEGCPLSRFKDSLGNPTHILRIGESYKEKQRTIQAKKEVEQRRAGGYSRKYASKAKNLADDMVRNTARDLLYYAVTQDAMLIFENLSRGFGRQGKRTFMAERQYTRMEDWLTAKLAYEGLPSKTYLSKTLAQYTSKTCSNCGFTITSADYDRVLEKLKKTATGWMTTINGKELKVEGQITYYNRYKRQNVVKDLSVELDRLSEESVNNDISSWTKGRSGEALSLLKKRFSHRPVQEKFVCLNCGFETHADEQAALNIARSWLFLRSQEYKKYQTNKTTGNTDKRAFVETWQSFYRKKLKEVWKPAV

SEQ ID NO: 36266 - protein, 978 aa, synthetic construct
  REGION 1..978: note = engineered CasX variant
QEIKRINKIRRRLVKDSNTKKAGKTGPMKTLLVRVMTPDLRERLENLRKKPENIPQPISNTSRANLNKLLTDYTEMKKAILHVYWEEFQKDPVGLMSRVAQPASKKIDQNKLKPEMDEKGNLTTAGFACSQCGQPLFVYKLEQVSEKGKAYTNYFGRCNVAEHEKLILLAQLKPEKDSDEAVTYSLGKFGQRALDFYSIHVTKESTHPVKPLAQIAGNRYASHPVGKALSDACMGTIASFLSKYQDIIIEHQKVVKGNQKRLESLRELAGKENLEYPSVTLPPQPHTKEGVDAYNEVIARVRWWVNLNLWQKLKLSRDDAKPLLRLKGFPSFPLVERQANEVDWWDMVCNVKKLINEKKEDGKVFWQNLAGYKRQEALRPYLSSEEDRKKGKKFARTQLGDLLLHLEKKHGEDWGKVYDEAWERIDKKVEGLSKHIKLEEERRSEDAQSKAALTDWLRAKASFVIEGLKEADKDEFCRCELKLQKWYGDLRGKPFAIEAENSILDISGFSKQYNCAFIWQKDGVKKLNLYLIINYFKGGKLRFKKIKPEAFEANRFYTVINKKSGEIVPMEVNFNFDDPNLIILPLAFGKRQGREFIWNDLLSLETGSLKLANGRVIEKTLYNRRTRQDEPALFVALTFERREVLDSSNIKPMNLIGVDRGENIPAVIALTDPEGCPLSRFKDSLGNPTHILRIGESYKEKQRTIQAKKEVEQRRAGGYSRKYASKAKNLADDMVRNTARDLLYYAVTQDAMLIFENLSRGFGRQGKRTFMAERQYTRMEDWLTAKLAYEGLPSKTYLSKTLAQYTSKTCSNCGFTITSADYDRVLEKLKKTATGWMTTINGKELKVEGQITYYNRYKRQNVVKDLSVELDRLSEESVNNDISSWTKGRSGEALSLLKKRFSHRPVQEKFVCLNCGFETHADEQAALNIARSWLFLRSQEYKKYQTNKTTGNTDKRAFVETWQSFYRKKLKEVWKPAV

SEQ ID NO: 36267 - protein, 978 aa, synthetic construct
  REGION 1..978: note = engineered CasX variant
QEIKRINKIRRRLVKDSNTKKAGKTGPMKTLLVRVMTPDLRERLENLRKKPENIPQPISNTSRANLNKLLTDYTEMKKAILHVYWEEFQKDPVGLMSRVAQPASKKIDQNKLKPEMDEKGNLTTAGFACSQCGQPLFVYKLEQVSEKGKAYTNYFGRCNVAEHEKLILLAQLKPEKDSDEAVTYSLGKFGQRALDFYSIHVTKESTHPVKPLAQIAGNRYASSPVGKALSDACMGTIASFLSKYQDIIIEHQKVVKGNQKRLESLRELAGKENLEYPSVTLPPQPHTKEGVDAYNEVIARVRWWVNLNLWQKLKLSRDDAKPLLRLKGFPSFPLVERQANEVDWWDMVCNVKKLINEKKEDGKVFWQNLAGYKRQEALRPYLSSEEDRKKGKKFARTQLGDLLLHLEKKHGEDWGKVYDEAWERIDKKVEGLSKHIKLEEERRSEDAQSKAALTDWLRAKASFVIEGLKEADKDEFCRCELKLQKWYGDLRGKPFAIEAENSILDISGFSKQYNCAFIWQKDGVKKLNLYLIINYFKGGKLRFKKIKPEAFEANRFYTVINKKSGEIVPMEVNFNFDDPNLIILPLAFGKRQGREFIWNDLLSLETGSLKLANGRVIEKTLYNRRTRQDEPALFVALTFERREVLDSSNIKPMNLIGVDRGENIPAVIALTDPEGCPLSRFKDSLGNPTHILRIGESYKEKQRTIQAKKEVEQRRAGGYSRKYASKAKNLADDMVRNTARDLLYYAVTQDAMLIFENLSRGFGRQGKRTFMAERQYTRMEDWLTAKLAYEGLPSKTYLSKTLAQYTSKTCSNCGFTITSADYDRVLEKLKKTATGWMTTINGKELKVEGQITYYNRYKRQNVVKDLSVELDRLSEESVNNDISSWTKGRSGEALSLLKKRFSHRPVQEKFVCLNCGFETHADEQAALNIARSWLFLRSQEYKKYQTNKTTGNTDKRAFVETWQSFYRKKLKEVWKPAV

SEQ ID NO: 36268 - protein, 978 aa, synthetic construct
  REGION 1..978: note = engineered CasX variant
QEIKRINKIRRRLVKDSNTKKAGKTGPMKTLLVRVMTPDLRERLENLRKKPENIPQPISNTSRANLNKLLTDYTEMKKAILHVYWEEFQKDPVGLMSRVAQPASKKIDQNKLKPEMDEKGNLTTAGFACSQCGQPLFVYKLEQVSEKGKAYTNYFGRCNVAEHEKLILLAQLKPEKDSDEAVTYSLGKFGQRALDFYSIHVTKESTHPVKPLAQIAGNRYASTPVGKALSDACMGTIASFLSKYQDIIIEHQKVVKGNQKRLESLRELAGKENLEYPSVTLPPQPHTKEGVDAYNEVIARVRWWVNLNLWQKLKLSRDDAKPLLRLKGFPSFPLVERQANEVDWWDMVCNVKKLINEKKEDGKVFWQNLAGYKRQEALRPYLSSEEDRKKGKKFARTQLGDLLLHLEKKHGEDWGKVYDEAWERIDKKVEGLSKHIKLEEERRSEDAQSKAALTDWLRAKASFVIEGLKEADKDEFCRCELKLQKWYGDLRGKPFAIEAENSILDISGFSKQYNCAFIWQKDGVKKLNLYLIINYFKGGKLRFKKIKPEAFEANRFYTVINKKSGEIVPMEVNFNFDDPNLIILPLAFGKRQGREFIWNDLLSLETGSLKLANGRVIEKTLYNRRTRQDEPALFVALTFERREVLDSSNIKPMNLIGVDRGENIPAVIALTDPEGCPLSRFKDSLGNPTHILRIGESYKEKQRTIQAKKEVEQRRAGGYSRKYASKAKNLADDMVRNTARDLLYYAVTQDAMLIFENLSRGFGRQGKRTFMAERQYTRMEDWLTAKLAYEGLPSKTYLSKTLAQYTSKTCSNCGFTITSADYDRVLEKLKKTATGWMTTINGKELKVEGQITYYNRYKRQNVVKDLSVELDRLSEESVNNDISSWTKGRSGEALSLLKKRFSHRPVQEKFVCLNCGFETHADEQAALNIARSWLFLRSQEYKKYQTNKTTGNTDKRAFVETWQSFYRKKLKEVWKPAV

SEQ ID NO: 36269 - protein, 978 aa, synthetic construct
  REGION 1..978: note = engineered CasX variant
QEIKRINKIRRRLVKDSNTKKAGKTGPMKTLLVRVMTPDLRERLENLRKKPENIPQPISNTSRANLNKLLTDYTEMKKAILHVYWEEFQKDPVGLMSRVAQPASKKIDQNKLKPEMDEKGNLTTAGFACSQCGQPLFVYKLEQVSEKGKAYTNYFGRCNVAEHEKLILLAQLKPEKDSDEAVTYSLGKFGQRALDFYSIHVTKESTHPVKPLAQIAGNRYASAPVGKALSDACMGTIASFLSKYQDIIIEHQKVVKGNQKRLESLRELAGKENLEYPSVTLPPQPHTKEGVDAYNEVIARVRWWVNLNLWQKLKLSRDDAKPLLRLKGFPSFPLVERQANEVDWWDMVCNVKKLINEKKEDGKVFWQNLAGYKRQEALRPYLSSEEDRKKGKKFARTQLGDLLLHLEKKHGEDWGKVYDEAWERIDKKVEGLSKHIKLEEERRSEDAQSKAALTDWLRAKASFVIEGLKEADKDEFCRCELKLQKWYGDLRGKPFAIEAENSILDISGFSKQYNCAFIWQKDGVKKLNLYLIINYFKGGKLRFKKIKPEAFEANRFYTVINKKSGEIVPMEVNFNFDDPNLIILPLAFGKRQGREFIWNDLLSLETGSLKLANGRVIEKTLYNRRTRQDEPALFVALTFERREVLDSSNIKPMNLIGVDRGENIPAVIALTDPEGCPLSRFKDSLGNPTHILRIGESYKEKQRTIQAKKEVEQRRAGGYSRKYASKAKNLADDMVRNTARDLLYYAVTQDAMLIFENLSRGFGRQGKRTFMAERQYTRMEDWLTAKLAYEGLPSKTYLSKTLAQYTSKTCSNCGFTITSADYDRVLEKLKKTATGWMTTINGKELKVEGQITYYNRYKRQNVVKDLSVELDRLSEESVNNDISSWTKGRSGEALSLLKKRFSHRPVQEKFVCLNCGFETHADEQAALNIARSWLFLRSQEYKKYQTNKTTGNTDKRAFVETWQSFYRKKLKEVWKPAV

SEQ ID NO: 36270 - protein, 978 aa, synthetic construct
  REGION 1..978: note = engineered CasX variant
QEIKRINKIRRRLVKDSNTKKAGKTGPMKTLLVRVMTPDLRERLENLRKKPENIPQPISNTSRANLNKLLTDYTEMKKAILHVYWEEFQKDPVGLMSRVAQPASKKIDQNKLKPEMDEKGNLTTAGFACSQCGQPLFVYKLEQVSEKGKAYTNYFGRCNVAEHEKLILLAQLKPEKDSDEAVTYSLGKFGQRALDFYSIHVTKESTHPVKPLAQIAGNRYASVPVGKALSDACMGTIASFLSKYQDIIIEHQKVVKGNQKRLESLRELAGKENLEYPSVTLPPQPHTKEGVDAYNEVIARVRWWVNLNLWQKLKLSRDDAKPLLRLKGFPSFPLVERQANEVDWWDMVCNVKKLINEKKEDGKVFWQNLAGYKRQEALRPYLSSEEDRKKGKKFARTQLGDLLLHLEKKHGEDWGKVYDEAWERIDKKVEGLSKHIKLEEERRSEDAQSKAALTDWLRAKASFVIEGLKEADKDEFCRCELKLQKWYGDLRGKPFAIEAENSILDISGFSKQYNCAFIWQKDGVKKLNLYLIINYFKGGKLRFKKIKPEAFEANRFYTVINKKSGEIVPMEVNFNFDDPNLIILPLAFGKRQGREFIWNDLLSLETGSLKLANGRVIEKTLYNRRTRQDEPALFVALTFERREVLDSSNIKPMNLIGVDRGENIPAVIALTDPEGCPLSRFKDSLGNPTHILRIGESYKEKQRTIQAKKEVEQRRAGGYSRKYASKAKNLADDMVRNTARDLLYYAVTQDAMLIFENLSRGFGRQGKRTFMAERQYTRMEDWLTAKLAYEGLPSKTYLSKTLAQYTSKTCSNCGFTITSADYDRVLEKLKKTATGWMTTINGKELKVEGQITYYNRYKRQNVVKDLSVELDRLSEESVNNDISSWTKGRSGEALSLLKKRFSHRPVQEKFVCLNCGFETHADEQAALNIARSWLFLRSQEYKKYQTNKTTGNTDKRAFVETWQSFYRKKLKEVWKPAV

SEQ ID NO: 36271 - protein, 978 aa, synthetic construct
  REGION 1..978: note = engineered CasX variant
QEIKRINKIRRRLVKDSNTKKAGKTGPMKTLLVRVMTPDLRERLENLRKKPENIPQPISNTSRANLNKLLTDYTEMKKAILHVYWEEFQKDPVGLMSRVAQPASKKIDQNKLKPEMDEKGNLTTAGFACSQCGQPLFVYKLEQVSEKGKAYTNYFGRCNVAEHEKLIKLAQLKPEKDSDEAVTYSLGKFGQRALDFYSIHVTKESTHPVKPLAQIAGNRYASGPVGKALSDACMGTIASFLSKYQDIIIEHQKVVKGNQKRLESLRELAGKENLEYPSVTLPPQPHTKEGVDAYNEVIARVRWWVNLNLWQKLKLSRDDAKPLLRLKGFPSFPLVERQANEVDWWDMVCNVKKLINEKKEDGKVFWQNLAGYKRQEALRPYLSSEEDRKKGKKFARTQLGDLLLHLEKKHGEDWGKVYDEAWERIDKKVEGLSKHIKLEEERRSEDAQSKAALTDWLRAKASFVIEGLKEADKDEFCRCELKLQKWYGDLRGKPFAIEAENSILDISGFSKQYNCAFIWQKDGVKKLNLYLIINYFKGGKLRFKKIKPEAFEANRFYTVINKKSGEIVPMEVNFNFDDPNLIILPLAFGKRQGREFIWNDLLSLETGSLKLANGRVIEKTLYNRRTRQDEPALFVALTFERREVLDSSNIKPMNLIGVDRGENIPAVIALTDPEGCPLSRFKDSLGNPTHILRIGESYKEKQRTIQAKKEVEQRRAGGYSRKYASKAKNLADDMVRNTARDLLYYAVTQDAMLIFENLSRGFGRQGKRTFMAERQYTRMEDWLTAKLAYEGLPSKTYLSKTLAQYTSKTCSNCGFTITSADYDRVLEKLKKTATGWMTTINGKELKVEGQITYYNRYKRQNVVKDLSVELDRLSEESVNNDISSWTKGRSGEALSLLKKRFSHRPVQEKFVCLNCGFETHADEQAALNIARSWLFLRSQEYKKYQTNKTTGNTDKRAFVETWQSFYRKKLKEVWKPAV

SEQ ID NO: 36272 - protein, 977 aa, synthetic construct
  REGION 1..977: note = engineered CasX variant
QEIKRINKIRRRLVKDSNTKKAGKTGPMKTLLVRVMTPDLRERLENLRKKPENIPQPISNTSRANLNKLLTDYTEMKKAILHVYWEEFQKDPVGLMSRVAQPASKKIDQNKLKPEMDEKGNLTTAGFACSQCGQPLFVYKLEQVSEKGKAYTNYFGRCNVAEHEKLILLAQLKPEKDSDEAVTYSLGKFGQRALDFYSIHVTKESTHPVKPLAQIAGNRYASPVGKALSDACMGTIASFLSKYQDIIIEHQKVVKGNQKRLESLRELAGKENLEYPSVTLPPQPHTKEGVDAYNEVIARVRWWVNLNLWQKLKLSRDDAKPLLRLKGFPSFPLVERQANEVDWWDMVCNVKKLINEKKEDGKVFWQNLAGYKRQEALRPYLSSEEDRKKGKKFARTQLGDLLLHLEKKHGEDWGKVYDEAWERIDKKVEGLSKHIKLEEERRSEDAQSKAALTDWLRAKASFVIEGLKEADKDEFCRCELKLQKWYGDLRGKPFAIEAENSILDISGFSKQYNCAFIWQKDGVKKLNLYLIINYFKGGKLRFKKIKPEAFEANRFYTVINKKSGEIVPMEVNFNFDDPNLIILPLAFGKRQGREFIWNDLLSLETGSLKLANGRVIEKTLYNRRTRQDEPALFVALTFERREVLDSSNIKPMNLIGVDRGENIPAVIALTDPEGCPLSRFKDSLGNPTHILRIGESYKEKQRTIQAKKEVEQRRAGGYSRKYASKAKNLADDMVRNTARDLLYYAVTQDAMLIFENLSRGFGRQGKRTFMAERQYTRMEDWLTAKLAYEGLPSKTYLSKTLAQYTSKTCSNCGFTITSADYDRVLEKLKKTATGWMTTINGKELKVEGQITYYNRYKRQNVVKDLSVELDRLSEESVNNDISSWTKGRSGEALSLLKKRFSHRPVQEKFVCLNCGFETHADEQAALNIARSWLFLRSQEYKKYQTNKTTGNTDKRAFVETWQSFYRKKLKEVWKPAV

SEQ ID NO: 36273 - protein, 979 aa, synthetic construct
  REGION 1..979: note = engineered CasX variant
QEIKRINKIRRRLVKDSNTKKAGKTGPMKTLLVRVMTPDLRERLENLRKKPENIPQPISNTSRANLNKLLTDYTEMKKAILHVYWEEFQKDPVGLMSRVAQPASKKIDQNKLKPEMDEKGNLTTAGFACSQCGQPLFVYKLEQVSEKGKAYTNYFGRCNVAEHEKLILLAQLKPEKDSDEAVTYSLGKFGQRALDFYSIHVTKESTHPVKPLAQIAGNRYASYPVGKALSDACMGTIASFLSKYQDIIIEHQKVVKGNQKRLESLRELAGKENLEYPSVTLPPQPHTKEGVDAYNEVIARVRWWVNLNLWQKLKLSRDDAKPLLRLKGFPSFPLVERQANEVDWWDMVCNVKKLINEKKEDGKVFWQNLAGYKRQEALRPYLSSEEDRKKGKKFARYQLGDLLLHLEKKHEGEDWGKVYDEAWERIDKKVEGLSKHIKLEEERRSEDAQSKAALTDWLRAKASFVIEGLKEADKDEFCRCELKLQKWYGDLRGKPFAIEAENSILDISGFSKQYNCAFIWQKDGVKKLNLYLIINYFKGGKLRFKKIKPEAFEANRFYTVINKKSGEIVPMEVNFNFDDPNLIILPLAFGKRQGREFIWNDLLSLETGSLKLANGRVIEKTLYNRRTRQDEPALFVALTFERREVLDSSNIKPMNLIGVDRGENIPAVIALTDPEGCPLSRFKDSLGNPTHILRIGESYKEKQRTIQAKKEVEQRRAGGYSRKYASKAKNLADDMVRNTARDLLYYAVTQDAMLIFENLSRGFGRQGKRTFMAERQYTRMEDWLTAKLAYEGLPSKTYLSKTLAQYTSKTCSNCGFTITSADYDRVLEKLKKTATGWMTTINGKELKVEGQITYYNRYKRQNVVKDLSVELDRLSEESVNNDISSWTKGRSGEALSLLKKRFSHRPVQEKFVCLNCGFETHADEQAALNIARSWLFLRSQEYKKYQTNKTTGNTDKRAFVETWQSFYRKKLKEVWKPAV

SEQ ID NO: 36274 - protein, 979 aa, synthetic construct
  REGION 1..979: note = engineered CasX variant
QEIKRINKIRRRLVKDSNTKKAGKTGPMKTLLVRVMTPDLRERLENLRKKPENIPQPISNTSRANLNKLLTDYTEMKKAILHVYWEEFQKDPVGLMSRVAQPASKKIDQNKLKPEMDEKGNLTTAGFACSQCGQPLFVYKLEQVSEKGKAYTNYFGRCNVAEHEKLILLAQLKPEKDSDEAVTYSLGKFGQRALDFYSIHVTKESTHPVKPLAQIAGNRYASHPVGKALSDACMGTIASFLSKYQDIIIEHQKVVKGNQKRLESLRELAGKENLEYPSVTLPPQPHTKEGVDAYNEVIARVRWWVNLNLWQKLKLSRDDAKPLLRLKGFPSFPLVERQANEVDWWDMVCNVKKLINEKKEDGKVFWQNLAGYKRQEALRPYLSSEEDRKKGKKFARYQLGDLLLHLEKKHEGEDWGKVYDEAWERIDKKVEGLSKHIKLEEERRSEDAQSKAALTDWLRAKASFVIEGLKEADKDEFCRCELKLQKWYGDLRGKPFAIEAENSILDISGFSKQYNCAFIWQKDGVKKLNLYLIINYFKGGKLRFKKIKPEAFEANRFYTVINKKSGEIVPMEVNFNFDDPNLIILPLAFGKRQGREFIWNDLLSLETGSLKLANGRVIEKTLYNRRTRQDEPALFVALTFERREVLDSSNIKPMNLIGVDRGENIPAVIALTDPEGCPLSRFKDSLGNPTHILRIGESYKEKQRTIQAKKEVEQRRAGGYSRKYASKAKNLADDMVRNTARDLLYYAVTQDAMLIFENLSRGFGRQGKRTFMAERQYTRMEDWLTAKLAYEGLPSKTYLSKTLAQYTSKTCSNCGFTITSADYDRVLEKLKKTATGWMTTINGKELKVEGQITYYNRYKRQNVVKDLSVELDRLSEESVNNDISSWTKGRSGEALSLLKKRFSHRPVQEKFVCLNCGFETHADEQAALNIARSWLFLRSQEYKKYQTNKTTGNTDKRAFVETWQSFYRKKLKEVWKPAV

SEQ ID NO: 36275 - protein, 979 aa, synthetic construct
  REGION 1..979: note = engineered CasX variant
QEIKRINKIRRRLVKDSNTKKAGKTGPMKTLLVRVMTPDLRERLENLRKKPENIPQPISNTSRANLNKLLTDYTEMKKAILHVYWEEFQKDPVGLMSRVAQPASKKIDQNKLKPEMDEKGNLTTAGFACSQCGQPLFVYKLEQVSEKGKAYTNYFGRCNVAEHEKLILLAQLKPEKDSDEAVTYSLGKFGQRALDFYSIHVTKESTHPVKPLAQIAGNRYASSPVGKALSDACMGTIASFLSKYQDIIIEHQKVVKGNQKRLESLRELAGKENLEYPSVTLPPQPHTKEGVDAYNEVIARVRWWVNLNLWQKLKLSRDDAKPLLRLKGFPSFPLVERQANEVDWWDMVCNVKKLINEKKEDGKVFWQNLAGYKRQEALRPYLSSEEDRKKGKKFARYQLGDLLLHLEKKHEGEDWGKVYDEAWERIDKKVEGLSKHIKLEEERRSEDAQSKAALTDWLRAKASFVIEGLKEADKDEFCRCELKLQKWYGDLRGKPFAIEAENSILDISGFSKQYNCAFIWQKDGVKKLNLYLIINYFKGGKLRFKKIKPEAFEANRFYTVINKKSGEIVPMEVNFNFDDPNLIILPLAFGKRQGREFIWNDLLSLETGSLKLANGRVIEKTLYNRRTRQDEPALFVALTFERREVLDSSNIKPMNLIGVDRGENIPAVIALTDPEGCPLSRFKDSLGNPTHILRIGESYKEKQRTIQAKKEVEQRRAGGYSRKYASKAKNLADDMVRNTARDLLYYAVTQDAMLIFENLSRGFGRQGKRTFMAERQYTRMEDWLTAKLAYEGLPSKTYLSKTLAQYTSKTCSNCGFTITSADYDRVLEKLKKTATGWMTTINGKELKVEGQITYYNRYKRQNVVKDLSVELDRLSEESVNNDISSWTKGRSGEALSLLKKRFSHRPVQEKFVCLNCGFETHADEQAALNIARSWLFLRSQEYKKYQTNKTTGNTDKRAFVETWQSFYRKKLKEVWKPAV

SEQ ID NO: 36276 - protein, 979 aa, synthetic construct
  REGION 1..979: note = engineered CasX variant
QEIKRINKIRRRLVKDSNTKKAGKTGPMKTLLVRVMTPDLRERLENLRKKPENIPQPISNTSRANLNKLLTDYTEMKKAILHVYWEEFQKDPVGLMSRVAQPASKKIDQNKLKPEMDEKGNLTTAGFACSQCGQPLFVYKLEQVSEKGKAYTNYFGRCNVAEHEKLILLAQLKPEKDSDEAVTYSLGKFGQRALDFYSIHVTKESTHPVKPLAQIAGNRYASTPVGKALSDACMGTIASFLSKYQDIIIEHQKVVKGNQKRLESLRELAGKENLEYPSVTLPPQPHTKEGVDAYNEVIARVRWWVNLNLWQKLKLSRDDAKPLLRLKGFPSFPLVERQANEVDWWDMVCNVKKLINEKKEDGKVFWQNLAGYKRQEALRPYLSSEEDRKKGKKFARYQLGDLLLHLEKKHEGEDWGKVYDEAWERIDKKVEGLSKHIKLEEERRSEDAQSKAALTDWLRAKASFVIEGLKEADKDEFCRCELKLQKWYGDLRGKPFAIEAENSILDISGFSKQYNCAFIWQKDGVKKLNLYLIINYFKGGKLRFKKIKPEAFEANRFYTVINKKSGEIVPMEVNFNFDDPNLIILPLAFGKRQGREFIWNDLLSLETGSLKLANGRVIEKTLYNRRTRQDEPALFVALTFERREVLDSSNIKPMNLIGVDRGENIPAVIALTDPEGCPLSRFKDSLGNPTHILRIGESYKEKQRTIQAKKEVEQRRAGGYSRKYASKAKNLADDMVRNTARDLLYYAVTQDAMLIFENLSRGFGRQGKRTFMAERQYTRMEDWLTAKLAYEGLPSKTYLSKTLAQYTSKTCSNCGFTITSADYDRVLEKLKKTATGWMTTINGKELKVEGQITYYNRYKRQNVVKDLSVELDRLSEESVNNDISSWTKGRSGEALSLLKKRFSHRPVQEKFVCLNCGFETHADEQAALNIARSWLFLRSQEYKKYQTNKTTGNTDKRAFVETWQSFYRKKLKEVWKPAV

SEQ ID NO: 36277 - protein, 979 aa, synthetic construct
  REGION 1..979: note = engineered CasX variant
QEIKRINKIRRRLVKDSNTKKAGKTGPMKTLLVRVMTPDLRERLENLRKKPENIPQPISNTSRANLNKLLTDYTEMKKAILHVYWEEFQKDPVGLMSRVAQPASKKIDQNKLKPEMDEKGNLTTAGFACSQCGQPLFVYKLEQVSEKGKAYTNYFGRCNVAEHEKLILLAQLKPEKDSDEAVTYSLGKFGQRALDFYSIHVTKESTHPVKPLAQIAGNRYASAPVGKALSDACMGTIASFLSKYQDIIIEHQKVVKGNQKRLESLRELAGKENLEYPSVTLPPQPHTKEGVDAYNEVIARVRWWVNLNLWQKLKLSRDDAKPLLRLKGFPSFPLVERQANEVDWWDMVCNVKKLINEKKEDGKVFWQNLAGYKRQEALRPYLSSEEDRKKGKKFARYQLGDLLLHLEKKHEGEDWGKVYDEAWERIDKKVEGLSKHIKLEEERRSEDAQSKAALTDWLRAKASFVIEGLKEADKDEFCRCELKLQKWYGDLRGKPFAIEAENSILDISGFSKQYNCAFIWQKDGVKKLNLYLIINYFKGGKLRFKKIKPEAFEANRFYTVINKKSGEIVPMEVNFNFDDPNLIILPLAFGKRQGREFIWNDLLSLETGSLKLANGRVIEKTLYNRRTRQDEPALFVALTFERREVLDSSNIKPMNLIGVDRGENIPAVIALTDPEGCPLSRFKDSLGNPTHILRIGESYKEKQRTIQAKKEVEQRRAGGYSRKYASKAKNLADDMVRNTARDLLYYAVTQDAMLIFENLSRGFGRQGKRTFMAERQYTRMEDWLTAKLAYEGLPSKTYLSKTLAQYTSKTCSNCGFTITSADYDRVLEKLKKTATGWMTTINGKELKVEGQITYYNRYKRQNVVKDLSVELDRLSEESVNNDISSWTKGRSGEALSLLKKRFSHRPVQEKFVCLNCGFETHADEQAALNIARSWLFLRSQEYKKYQTNKTTGNTDKRAFVETWQSFYRKKLKEVWKPAV

SEQ ID NO: 36278 - protein, 979 aa, synthetic construct
  REGION 1..979: note = engineered CasX variant
QEIKRINKIRRRLVKDSNTKKAGKTGPMKTLLVRVMTPDLRERLENLRKKPENIPQPISNTSRANLNKLLTDYTEMKKAILHVYWEEFQKDPVGLMSRVAQPASKKIDQNKLKPEMDEKGNLTTAGFACSQCGQPLFVYKLEQVSEKGKAYTNYFGRCNVAEHEKLILLAQLKPEKDSDEAVTYSLGKFGQRALDFYSIHVTKESTHPVKPLAQIAGNRYASVPVGKALSDACMGTIASFLSKYQDIIIEHQKVVKGNQKRLESLRELAGKENLEYPSVTLPPQPHTKEGVDAYNEVIARVRWWVNLNLWQKLKLSRDDAKPLLRLKGFPSFPLVERQANEVDWWDMVCNVKKLINEKKEDGKVFWQNLAGYKRQEALRPYLSSEEDRKKGKKFARYQLGDLLLHLEKKHEGEDWGKVYDEAWERIDKKVEGLSKHIKLEEERRSEDAQSKAALTDWLRAKASFVIEGLKEADKDEFCRCELKLQKWYGDLRGKPFAIEAENSILDISGFSKQYNCAFIWQKDGVKKLNLYLIINYFKGGKLRFKKIKPEAFEANRFYTVINKKSGEIVPMEVNFNFDDPNLIILPLAFGKRQGREFIWNDLLSLETGSLKLANGRVIEKTLYNRRTRQDEPALFVALTFERREVLDSSNIKPMNLIGVDRGENIPAVIALTDPEGCPLSRFKDSLGNPTHILRIGESYKEKQRTIQAKKEVEQRRAGGYSRKYASKAKNLADDMVRNTARDLLYYAVTQDAMLIFENLSRGFGRQGKRTFMAERQYTRMEDWLTAKLAYEGLPSKTYLSKTLAQYTSKTCSNCGFTITSADYDRVLEKLKKTATGWMTTINGKELKVEGQITYYNRYKRQNVVKDLSVELDRLSEESVNNDISSWTKGRSGEALSLLKKRFSHRPVQEKFVCLNCGFETHADEQAALNIARSWLFLRSQEYKKYQTNKTTGNTDKRAFVETWQSFYRKKLKEVWKPAV

SEQ ID NO: 36279 - protein, 979 aa, synthetic construct
  REGION 1..979: note = engineered CasX variant
QEIKRINKIRRRLVKDSNTKKAGKTGPMKTLLVRVMTPDLRERLENLRKKPENIPQPISNTSRANLNKLLTDYTEMKKAILHVYWEEFQKDPVGLMSRVAQPASKKIDQNKLKPEMDEKGNLTTAGFACSQCGQPLFVYKLEQVSEKGKAYTNYFGRCNVAEHEKLIKLAQLKPEKDSDEAVTYSLGKFGQRALDFYSIHVTKESTHPVKPLAQIAGNRYASGPVGKALSDACMGTIASFLSKYQDIIIEHQKVVKGNQKRLESLRELAGKENLEYPSVTLPPQPHTKEGVDAYNEVIARVRWWVNLNLWQKLKLSRDDAKPLLRLKGFPSFPLVERQANEVDWWDMVCNVKKLINEKKEDGKVFWQNLAGYKRQEALRPYLSSEEDRKKGKKFARYQLGDLLLHLEKKHEGEDWGKVYDEAWERIDKKVEGLSKHIKLEEERRSEDAQSKAALTDWLRAKASFVIEGLKEADKDEFCRCELKLQKWYGDLRGKPFAIEAENSILDISGFSKQYNCAFIWQKDGVKKLNLYLIINYFKGGKLRFKKIKPEAFEANRFYTVINKKSGEIVPMEVNFNFDDPNLIILPLAFGKRQGREFIWNDLLSLETGSLKLANGRVIEKTLYNRRTRQDEPALFVALTFERREVLDSSNIKPMNLIGVDRGENIPAVIALTDPEGCPLSRFKDSLGNPTHILRIGESYKEKQRTIQAKKEVEQRRAGGYSRKYASKAKNLADDMVRNTARDLLYYAVTQDAMLIFENLSRGFGRQGKRTFMAERQYTRMEDWLTAKLAYEGLPSKTYLSKTLAQYTSKTCSNCGFTITSADYDRVLEKLKKTATGWMTTINGKELKVEGQITYYNRYKRQNVVKDLSVELDRLSEESVNNDISSWTKGRSGEALSLLKKRFSHRPVQEKFVCLNCGFETHADEQAALNIARSWLFLRSQEYKKYQTNKTTGNTDKRAFVETWQSFYRKKLKEVWKPAV

SEQ ID NO: 36280 - protein, 978 aa, synthetic construct
  REGION 1..978: note = engineered CasX variant
QEIKRINKIRRRLVKDSNTKKAGKTGPMKTLLVRVMTPDLRERLENLRKKPENIPQPISNTSRANLNKLLTDYTEMKKAILHVYWEEFQKDPVGLMSRVAQPASKKIDQNKLKPEMDEKGNLTTAGFACSQCGQPLFVYKLEQVSEKGKAYTNYFGRCNVAEHEKLILLAQLKPEKDSDEAVTYSLGKFGQRALDFYSIHVTKESTHPVKPLAQIAGNRYASPVGKALSDACMGTIASFLSKYQDIIIEHQKVVKGNQKRLESLRELAGKENLEYPSVTLPPQPHTKEGVDAYNEVIARVRWWVNLNLWQKLKLSRDDAKPLLRLKGFPSFPLVERQANEVDWWDMVCNVKKLINEKKEDGKVFWQNLAGYKRQEALRPYLSSEEDRKKGKKFARYQLGDLLLHLEKKHEGEDWGKVYDEAWERIDKKVEGLSKHIKLEEERRSEDAQSKAALTDWLRAKASFVIEGLKEADKDEFCRCELKLQKWYGDLRGKPFAIEAENSILDISGFSKQYNCAFIWQKDGVKKLNLYLIINYFKGGKLRFKKIKPEAFEANRFYTVINKKSGEIVPMEVNFNFDDPNLIILPLAFGKRQGREFIWNDLLSLETGSLKLANGRVIEKTLYNRRTRQDEPALFVALTFERREVLDSSNIKPMNLIGVDRGENIPAVIALTDPEGCPLSRFKDSLGNPTHILRIGESYKEKQRTIQAKKEVEQRRAGGYSRKYASKAKNLADDMVRNTARDLLYYAVTQDAMLIFENLSRGFGRQGKRTFMAERQYTRMEDWLTAKLAYEGLPSKTYLSKTLAQYTSKTCSNCGFTITSADYDRVLEKLKKTATGWMTTINGKELKVEGQITYYNRYKRQNVVKDLSVELDRLSEESVNNDISSWTKGRSGEALSLLKKRFSHRPVQEKFVCLNCGFETHADEQAALNIARSWLFLRSQEYKKYQTNKTTGNTDKRAFVETWQSFYRKKLKEVWKPAV

SEQ ID NO: 36281 - protein, 978 aa, synthetic construct
  REGION 1..978: note = engineered CasX variant
QEIKRINKIRRRLVKDSNTKKAGKTGPMKTLLVRVMTPDLRERLENLRKKPENIPQPISNTSRANLNKLLTDYTEMKKAILHVYWEEFQKDPVGLMSRVAQPASKKIDQNKLKPEMDEKGNLTTAGFACSQCGQPLFVYKLEQVSEKGKAYTNYFGRCNVAEHEKLILLAQLKPEKDSDEAVTYSLGKFGQRALDFYSIHVTKESTHPVKPLAQIAGNRYASYPVGKALSDACMGTIASFLSKYQDIIIEHQKVVKGNQKRLESLRELAGKENLEYPSVTLPPQPHTKEGVDAYNEVIARVRWWVNLNLWQKLKLSRDDAKPLLRLKGFPSFPLVERQANEVDWWDMVCNVKKLINEKKEDGKVFWQNLAGYKRQEALRPYLSSEEDRKKGKKFARYQLGDLLLHLEKKHGEDWGKVYDEAWERIDKKVEGLSKHIKLEEERRSEDAQSKAALTDWLRAKASFVIEGLKEADKDEFCRCDLKLQKWYGDLRGKPFAIEAENSILDISGFSKQYNCAFIWQKDGVKKLNLYLIINYFKGGKLRFKKIKPEAFEANRFYTVINKKSGEIVPMEVNFNFDDPNLIILPLAFGKRQGREFIWNDLLSLETGSLKLANGRVIEKTLYNRRTRQDEPALFVALTFERREVLDSSNIKPMNLIGVDRGENIPAVIALTDPEGCPLSRFKDSLGNPTHILRIGESYKEKQRTIQAKKEVEQRRAGGYSRKYASKAKNLADDMVRNTARDLLYYAVTQDAMLIFENLSRGFGRQGKRTFMAERQYTRMEDWLTAKLAYEGLPSKTYLSKTLAQYTSKTCSNCGFTITSADYDRVLEKLKKTATGWMTTINGKELKVEGQITYYNRYKRQNVVKDLSVELDRLSEESVNNDISSWTKGRSGEALSLLKKRFSHRPVQEKFVCLNCGFETHADEQAALNIARSWLFLRSQEYKKYQTNKTTGNTDKRAFVETWQSFYRKKLKEVWKPAV

SEQ ID NO: 36282 - protein, 978 aa, synthetic construct
  REGION 1..978: note = engineered CasX variant
QEIKRINKIRRRLVKDSNTKKAGKTGPMKTLLVRVMTPDLRERLENLRKKPENIPQPISNTSRANLNKLLTDYTEMKKAILHVYWEEFQKDPVGLMSRVAQPASKKIDQNKLKPEMDEKGNLTTAGFACSQCGQPLFVYKLEQVSEKGKAYTNYFGRCNVAEHEKLILLAQLKPEKDSDEAVTYSLGKFGQRALDFYSIHVTKESTHPVKPLAQIAGNRYASHPVGKALSDACMGTIASFLSKYQDIIIEHQKVVKGNQKRLESLRELAGKENLEYPSVTLPPQPHTKEGVDAYNEVIARVRWWVNLNLWQKLKLSRDDAKPLLRLKGFPSFPLVERQANEVDWWDMVCNVKKLINEKKEDGKVFWQNLAGYKRQEALRPYLSSEEDRKKGKKFARYQLGDLLLHLEKKHGEDWGKVYDEAWERIDKKVEGLSKHIKLEEERRSEDAQSKAALTDWLRAKASFVIEGLKEADKDEFCRCDLKLQKWYGDLRGKPFAIEAENSILDISGFSKQYNCAFIWQKDGVKKLNLYLIINYFKGGKLRFKKIKPEAFEANRFYTVINKKSGEIVPMEVNFNFDDPNLIILPLAFGKRQGREFIWNDLLSLETGSLKLANGRVIEKTLYNRRTRQDEPALFVALTFERREVLDSSNIKPMNLIGVDRGENIPAVIALTDPEGCPLSRFKDSLGNPTHILRIGESYKEKQRTIQAKKEVEQRRAGGYSRKYASKAKNLADDMVRNTARDLLYYAVTQDAMLIFENLSRGFGRQGKRTFMAERQYTRMEDWLTAKLAYEGLPSKTYLSKTLAQYTSKTCSNCGFTITSADYDRVLEKLKKTATGWMTTINGKELKVEGQITYYNRYKRQNVVKDLSVELDRLSEESVNNDISSWTKGRSGEALSLLKKRFSHRPVQEKFVCLNCGFETHADEQAALNIARSWLFLRSQEYKKYQTNKTTGNTDKRAFVETWQSFYRKKLKEVWKPAV

SEQ ID NO: 36283 - protein, 978 aa, synthetic construct
  REGION 1..978: note = engineered CasX variant
QEIKRINKIRRRLVKDSNTKKAGKTGPMKTLLVRVMTPDLRERLENLRKKPENIPQPISNTSRANLNKLLTDYTEMKKAILHVYWEEFQKDPVGLMSRVAQPASKKIDQNKLKPEMDEKGNLTTAGFACSQCGQPLFVYKLEQVSEKGKAYTNYFGRCNVAEHEKLILLAQLKPEKDSDEAVTYSLGKFGQRALDFYSIHVTKESTHPVKPLAQIAGNRYASSPVGKALSDACMGTIASFLSKYQDIIIEHQKVVKGNQKRLESLRELAGKENLEYPSVTLPPQPHTKEGVDAYNEVIARVRWWVNLNLWQKLKLSRDDAKPLLRLKGFPSFPLVERQANEVDWWDMVCNVKKLINEKKEDGKVFWQNLAGYKRQEALRPYLSSEEDRKKGKKFARYQLGDLLLHLEKKHGEDWGKVYDEAWERIDKKVEGLSKHIKLEEERRSEDAQSKAALTDWLRAKASFVIEGLKEADKDEFCRCDLKLQKWYGDLRGKPFAIEAENSILDISGFSKQYNCAFIWQKDGVKKLNLYLIINYFKGGKLRFKKIKPEAFEANRFYTVINKKSGEIVPMEVNFNFDDPNLIILPLAFGKRQGREFIWNDLLSLETGSLKLANGRVIEKTLYNRRTRQDEPALFVALTFERREVLDSSNIKPMNLIGVDRGENIPAVIALTDPEGCPLSRFKDSLGNPTHILRIGESYKEKQRTIQAKKEVEQRRAGGYSRKYASKAKNLADDMVRNTARDLLYYAVTQDAMLIFENLSRGFGRQGKRTFMAERQYTRMEDWLTAKLAYEGLPSKTYLSKTLAQYTSKTCSNCGFTITSADYDRVLEKLKKTATGWMTTINGKELKVEGQITYYNRYKRQNVVKDLSVELDRLSEESVNNDISSWTKGRSGEALSLLKKRFSHRPVQEKFVCLNCGFETHADEQAALNIARSWLFLRSQEYKKYQTNKTTGNTDKRAFVETWQSFYRKKLKEVWKPAV

SEQ ID NO: 36284 - protein, 978 aa, synthetic construct
  REGION 1..978: note = engineered CasX variant
QEIKRINKIRRRLVKDSNTKKAGKTGPMKTLLVRVMTPDLRERLENLRKKPENIPQPISNTSRANLNKLLTDYTEMKKAILHVYWEEFQKDPVGLMSRVAQPASKKIDQNKLKPEMDEKGNLTTAGFACSQCGQPLFVYKLEQVSEKGKAYTNYFGRCNVAEHEKLILLAQLKPEKDSDEAVTYSLGKFGQRALDFYSIHVTKESTHPVKPLAQIAGNRYASTPVGKALSDACMGTIASFLSKYQDIIIEHQKVVKGNQKRLESLRELAGKENLEYPSVTLPPQPHTKEGVDAYNEVIARVRWWVNLNLWQKLKLSRDDAKPLLRLKGFPSFPLVERQANEVDWWDMVCNVKKLINEKKEDGKVFWQNLAGYKRQEALRPYLSSEEDRKKGKKFARYQLGDLLLHLEKKHGEDWGKVYDEAWERIDKKVEGLSKHIKLEEERRSEDAQSKAALTDWLRAKASFVIEGLKEADKDEFCRCDLKLQKWYGDLRGKPFAIEAENSILDISGFSKQYNCAFIWQKDGVKKLNLYLIINYFKGGKLRFKKIKPEAFEANRFYTVINKKSGEIVPMEVNFNFDDPNLIILPLAFGKRQGREFIWNDLLSLETGSLKLANGRVIEKTLYNRRTRQDEPALFVALTFERREVLDSSNIKPMNLIGVDRGENIPAVIALTDPEGCPLSRFKDSLGNPTHILRIGESYKEKQRTIQAKKEVEQRRAGGYSRKYASKAKNLADDMVRNTARDLLYYAVTQDAMLIFENLSRGFGRQGKRTFMAERQYTRMEDWLTAKLAYEGLPSKTYLSKTLAQYTSKTCSNCGFTITSADYDRVLEKLKKTATGWMTTINGKELKVEGQITYYNRYKRQNVVKDLSVELDRLSEESVNNDISSWTKGRSGEALSLLKKRFSHRPVQEKFVCLNCGFETHADEQAALNIARSWLFLRSQEYKKYQTNKTTGNTDKRAFVETWQSFYRKKLKEVWKPAV

SEQ ID NO: 36285 - protein, 978 aa, synthetic construct
  REGION 1..978: note = engineered CasX variant
QEIKRINKIRRRLVKDSNTKKAGKTGPMKTLLVRVMTPDLRERLENLRKKPENIPQPISNTSRANLNKLLTDYTEMKKAILHVYWEEFQKDPVGLMSRVAQPASKKIDQNKLKPEMDEKGNLTTAGFACSQCGQPLFVYKLEQVSEKGKAYTNYFGRCNVAEHEKLILLAQLKPEKDSDEAVTYSLGKFGQRALDFYSIHVTKESTHPVKPLAQIAGNRYASAPVGKALSDACMGTIASFLSKYQDIIIEHQKVVKGNQKRLESLRELAGKENLEYPSVTLPPQPHTKEGVDAYNEVIARVRWWVNLNLWQKLKLSRDDAKPLLRLKGFPSFPLVERQANEVDWWDMVCNVKKLINEKKEDGKVFWQNLAGYKRQEALRPYLSSEEDRKKGKKFARYQLGDLLLHLEKKHGEDWGKVYDEAWERIDKKVEGLSKHIKLEEERRSEDAQSKAALTDWLRAKASFVIEGLKEADKDEFCRCDLKLQKWYGDLRGKPFAIEAENSILDISGFSKQYNCAFIWQKDGVKKLNLYLIINYFKGGKLRFKKIKPEAFEANRFYTVINKKSGEIVPMEVNFNFDDPNLIILPLAFGKRQGREFIWNDLLSLETGSLKLANGRVIEKTLYNRRTRQDEPALFVALTFERREVLDSSNIKPMNLIGVDRGENIPAVIALTDPEGCPLSRFKDSLGNPTHILRIGESYKEKQRTIQAKKEVEQRRAGGYSRKYASKAKNLADDMVRNTARDLLYYAVTQDAMLIFENLSRGFGRQGKRTFMAERQYTRMEDWLTAKLAYEGLPSKTYLSKTLAQYTSKTCSNCGFTITSADYDRVLEKLKKTATGWMTTINGKELKVEGQITYYNRYKRQNVVKDLSVELDRLSEESVNNDISSWTKGRSGEALSLLKKRFSHRPVQEKFVCLNCGFETHADEQAALNIARSWLFLRSQEYKKYQTNKTTGNTDKRAFVETWQSFYRKKLKEVWKPAV

SEQ ID NO: 36286 - protein, 978 aa, synthetic construct
  REGION 1..978: note = engineered CasX variant
QEIKRINKIRRRLVKDSNTKKAGKTGPMKTLLVRVMTPDLRERLENLRKKPENIPQPISNTSRANLNKLLTDYTEMKKAILHVYWEEFQKDPVGLMSRVAQPASKKIDQNKLKPEMDEKGNLTTAGFACSQCGQPLFVYKLEQVSEKGKAYTNYFGRCNVAEHEKLILLAQLKPEKDSDEAVTYSLGKFGQRALDFYSIHVTKESTHPVKPLAQIAGNRYASVPVGKALSDACMGTIASFLSKYQDIIIEHQKVVKGNQKRLESLRELAGKENLEYPSVTLPPQPHTKEGVDAYNEVIARVRWWVNLNLWQKLKLSRDDAKPLLRLKGFPSFPLVERQANEVDWWDMVCNVKKLINEKKEDGKVFWQNLAGYKRQEALRPYLSSEEDRKKGKKFARYQLGDLLLHLEKKHGEDWGKVYDEAWERIDKKVEGLSKHIKLEEERRSEDAQSKAALTDWLRAKASFVIEGLKEADKDEFCRCDLKLQKWYGDLRGKPFAIEAENSILDISGFSKQYNCAFIWQKDGVKKLNLYLIINYFKGGKLRFKKIKPEAFEANRFYTVINKKSGEIVPMEVNFNFDDPNLIILPLAFGKRQGREFIWNDLLSLETGSLKLANGRVIEKTLYNRRTRQDEPALFVALTFERREVLDSSNIKPMNLIGVDRGENIPAVIALTDPEGCPLSRFKDSLGNPTHILRIGESYKEKQRTIQAKKEVEQRRAGGYSRKYASKAKNLADDMVRNTARDLLYYAVTQDAMLIFENLSRGFGRQGKRTFMAERQYTRMEDWLTAKLAYEGLPSKTYLSKTLAQYTSKTCSNCGFTITSADYDRVLEKLKKTATGWMTTINGKELKVEGQITYYNRYKRQNVVKDLSVELDRLSEESVNNDISSWTKGRSGEALSLLKKRFSHRPVQEKFVCLNCGFETHADEQAALNIARSWLFLRSQEYKKYQTNKTTGNTDKRAFVETWQSFYRKKLKEVWKPAV

SEQ ID NO: 36287 - protein, 978 aa, synthetic construct
  REGION 1..978: note = engineered CasX variant
QEIKRINKIRRRLVKDSNTKKAGKTGPMKTLLVRVMTPDLRERLENLRKKPENIPQPISNTSRANLNKLLTDYTEMKKAILHVYWEEFQKDPVGLMSRVAQPASKKIDQNKLKPEMDEKGNLTTAGFACSQCGQPLFVYKLEQVSEKGKAYTNYFGRCNVAEHEKLIKLAQLKPEKDSDEAVTYSLGKFGQRALDFYSIHVTKESTHPVKPLAQIAGNRYASGPVGKALSDACMGTIASFLSKYQDIIIEHQKVVKGNQKRLESLRELAGKENLEYPSVTLPPQPHTKEGVDAYNEVIARVRWWVNLNLWQKLKLSRDDAKPLLRLKGFPSFPLVERQANEVDWWDMVCNVKKLINEKKEDGKVFWQNLAGYKRQEALRPYLSSEEDRKKGKKFARYQLGDLLLHLEKKHGEDWGKVYDEAWERIDKKVEGLSKHIKLEEERRSEDAQSKAALTDWLRAKASFVIEGLKEADKDEFCRCDLKLQKWYGDLRGKPFAIEAENSILDISGFSKQYNCAFIWQKDGVKKLNLYLIINYFKGGKLRFKKIKPEAFEANRFYTVINKKSGEIVPMEVNFNFDDPNLIILPLAFGKRQGREFIWNDLLSLETGSLKLANGRVIEKTLYNRRTRQDEPALFVALTFERREVLDSSNIKPMNLIGVDRGENIPAVIALTDPEGCPLSRFKDSLGNPTHILRIGESYKEKQRTIQAKKEVEQRRAGGYSRKYASKAKNLADDMVRNTARDLLYYAVTQDAMLIFENLSRGFGRQGKRTFMAERQYTRMEDWLTAKLAYEGLPSKTYLSKTLAQYTSKTCSNCGFTITSADYDRVLEKLKKTATGWMTTINGKELKVEGQITYYNRYKRQNVVKDLSVELDRLSEESVNNDISSWTKGRSGEALSLLKKRFSHRPVQEKFVCLNCGFETHADEQAALNIARSWLFLRSQEYKKYQTNKTTGNTDKRAFVETWQSFYRKKLKEVWKPAV

SEQ ID NO: 36288 - protein, 977 aa, synthetic construct
  REGION 1..977: note = engineered CasX variant
QEIKRINKIRRRLVKDSNTKKAGKTGPMKTLLVRVMTPDLRERLENLRKKPENIPQPISNTSRANLNKLLTDYTEMKKAILHVYWEEFQKDPVGLMSRVAQPASKKIDQNKLKPEMDEKGNLTTAGFACSQCGQPLFVYKLEQVSEKGKAYTNYFGRCNVAEHEKLILLAQLKPEKDSDEAVTYSLGKFGQRALDFYSIHVTKESTHPVKPLAQIAGNRYASPVGKALSDACMGTIASFLSKYQDIIIEHQKVVKGNQKRLESLRELAGKENLEYPSVTLPPQPHTKEGVDAYNEVIARVRWWVNLNLWQKLKLSRDDAKPLLRLKGFPSFPLVERQANEVDWWDMVCNVKKLINEKKEDGKVFWQNLAGYKRQEALRPYLSSEEDRKKGKKFARYQLGDLLLHLEKKHGEDWGKVYDEAWERIDKKVEGLSKHIKLEEERRSEDAQSKAALTDWLRAKASFVIEGLKEADKDEFCRCDLKLQKWYGDLRGKPFAIEAENSILDISGFSKQYNCAFIWQKDGVKKLNLYLIINYFKGGKLRFKKIKPEAFEANRFYTVINKKSGEIVPMEVNFNFDDPNLIILPLAFGKRQGREFIWNDLLSLETGSLKLANGRVIEKTLYNRRTRQDEPALFVALTFERREVLDSSNIKPMNLIGVDRGENIPAVIALTDPEGCPLSRFKDSLGNPTHILRIGESYKEKQRTIQAKKEVEQRRAGGYSRKYASKAKNLADDMVRNTARDLLYYAVTQDAMLIFENLSRGFGRQGKRTFMAERQYTRMEDWLTAKLAYEGLPSKTYLSKTLAQYTSKTCSNCGFTITSADYDRVLEKLKKTATGWMTTINGKELKVEGQITYYNRYKRQNVVKDLSVELDRLSEESVNNDISSWTKGRSGEALSLLKKRFSHRPVQEKFVCLNCGFETHADEQAALNIARSWLFLRSQEYKKYQTNKTTGNTDKRAFVETWQSFYRKKLKEVWKPAV

SEQ ID NO: 36289 - protein, 978 aa, synthetic construct
  REGION 1..978: note = engineered CasX variant
QEIKRINKIRRRLVKDSNTKKAGKTGPMKTLLVRVMTPDLRERLENLRKKPENIPQPISNTSRANLNKLLTDYTEMKKAILHVYWEEFQKDPVGLMSRVAQPASKKIDQNKLKPEMDEKGNLTTAGFACSQCGQPLFVYKLEQVSEKGKAYTNYFGRCNVAEHEKLILLAQLKPEKDSDEAVTYSLGKFGQRALDFYSIHVTKESTHPVKPLAQIAGNRYASYPVGKALSDACMGTIASFLSKYQDIIIEHQKVVKGNQKRLESLRELAGKENLEYPSVTLPPQPHTKEGVDAYNEVIARVRWWVNLNLWQKLKLSRDDAKPLLRLKGFPSFPLVERQANEVDWWDMVCNVKKLINEKKEDGKVFWQNLAGYKRQEALRPYLSSEEDRKKGKKFARYQLGDLLLHLEKKHGEDWGKVYDEAWERIDKKVEGLSKHIKLEEERRSEDAQSKAALTDWLRAKASFVIEGLKEADKDEFCRCELKLQKWYGDLRGKPFAIEAENSILDISGFSKQYNCAFIWQKDGVKKLNLYLIINYFKGGKLRFKKIKPEAFEANRFYTVINKKSGEIVPMEVNFNFDDPNLIILPLAFGKRFGREFIWNDLLSLETGSLKLANGRVIEKTLYNRRTRQDEPALFVALTFERREVLDSSNIKPMNLIGVDRGENIPAVIALTDPEGCPLSRFKDSLGNPTHILRIGESYKEKQRTIQAKKEVEQRRAGGYSRKYASKAKNLADDMVRNTARDLLYYAVTQDAMLIFENLSRGFGRQGKRTFMAERQYTRMEDWLTAKLAYEGLPSKTYLSKTLAQYTSKTCSNCGFTITSADYDRVLEKLKKTATGWMTTINGKELKVEGQITYYNRYKRQNVVKDLSVELDRLSEESVNNDISSWTKGRSGEALSLLKKRFSHRPVQEKFVCLNCGFETHADEQAALNIARSWLFLRSQEYKKYQTNKTTGNTDKRAFVETWQSFYRKKLKEVWKPAV

SEQ ID NO: 36290 - protein, 978 aa, synthetic construct
  REGION 1..978: note = engineered CasX variant
QEIKRINKIRRRLVKDSNTKKAGKTGPMKTLLVRVMTPDLRERLENLRKKPENIPQPISNTSRANLNKLLTDYTEMKKAILHVYWEEFQKDPVGLMSRVAQPASKKIDQNKLKPEMDEKGNLTTAGFACSQCGQPLFVYKLEQVSEKGKAYTNYFGRCNVAEHEKLILLAQLKPEKDSDEAVTYSLGKFGQRALDFYSIHVTKESTHPVKPLAQIAGNRYASHPVGKALSDACMGTIASFLSKYQDIIIEHQKVVKGNQKRLESLRELAGKENLEYPSVTLPPQPHTKEGVDAYNEVIARVRWWVNLNLWQKLKLSRDDAKPLLRLKGFPSFPLVERQANEVDWWDMVCNVKKLINEKKEDGKVFWQNLAGYKRQEALRPYLSSEEDRKKGKKFARYQLGDLLLHLEKKHGEDWGKVYDEAWERIDKKVEGLSKHIKLEEERRSEDAQSKAALTDWLRAKASFVIEGLKEADKDEFCRCELKLQKWYGDLRGKPFAIEAENSILDISGFSKQYNCAFIWQKDGVKKLNLYLIINYFKGGKLRFKKIKPEAFEANRFYTVINKKSGEIVPMEVNFNFDDPNLIILPLAFGKRFGREFIWNDLLSLETGSLKLANGRVIEKTLYNRRTRQDEPALFVALTFERREVLDSSNIKPMNLIGVDRGENIPAVIALTDPEGCPLSRFKDSLGNPTHILRIGESYKEKQRTIQAKKEVEQRRAGGYSRKYASKAKNLADDMVRNTARDLLYYAVTQDAMLIFENLSRGFGRQGKRTFMAERQYTRMEDWLTAKLAYEGLPSKTYLSKTLAQYTSKTCSNCGFTITSADYDRVLEKLKKTATGWMTTINGKELKVEGQITYYNRYKRQNVVKDLSVELDRLSEESVNNDISSWTKGRSGEALSLLKKRFSHRPVQEKFVCLNCGFETHADEQAALNIARSWLFLRSQEYKKYQTNKTTGNTDKRAFVETWQSFYRKKLKEVWKPAV

SEQ ID NO: 36291 - protein, 978 aa, synthetic construct
  REGION 1..978: note = engineered CasX variant
QEIKRINKIRRRLVKDSNTKKAGKTGPMKTLLVRVMTPDLRERLENLRKKPENIPQPISNTSRANLNKLLTDYTEMKKAILHVYWEEFQKDPVGLMSRVAQPASKKIDQNKLKPEMDEKGNLTTAGFACSQCGQPLFVYKLEQVSEKGKAYTNYFGRCNVAEHEKLILLAQLKPEKDSDEAVTYSLGKFGQRALDFYSIHVTKESTHPVKPLAQIAGNRYASSPVGKALSDACMGTIASFLSKYQDIIIEHQKVVKGNQKRLESLRELAGKENLEYPSVTLPPQPHTKEGVDAYNEVIARVRWWVNLNLWQKLKLSRDDAKPLLRLKGFPSFPLVERQANEVDWWDMVCNVKKLINEKKEDGKVFWQNLAGYKRQEALRPYLSSEEDRKKGKKFARYQLGDLLLHLEKKHGEDWGKVYDEAWERIDKKVEGLSKHIKLEEERRSEDAQSKAALTDWLRAKASFVIEGLKEADKDEFCRCELKLQKWYGDLRGKPFAIEAENSILDISGFSKQYNCAFIWQKDGVKKLNLYLIINYFKGGKLRFKKIKPEAFEANRFYTVINKKSGEIVPMEVNFNFDDPNLIILPLAFGKRFGREFIWNDLLSLETGSLKLANGRVIEKTLYNRRTRQDEPALFVALTFERREVLDSSNIKPMNLIGVDRGENIPAVIALTDPEGCPLSRFKDSLGNPTHILRIGESYKEKQRTIQAKKEVEQRRAGGYSRKYASKAKNLADDMVRNTARDLLYYAVTQDAMLIFENLSRGFGRQGKRTFMAERQYTRMEDWLTAKLAYEGLPSKTYLSKTLAQYTSKTCSNCGFTITSADYDRVLEKLKKTATGWMTTINGKELKVEGQITYYNRYKRQNVVKDLSVELDRLSEESVNNDISSWTKGRSGEALSLLKKRFSHRPVQEKFVCLNCGFETHADEQAALNIARSWLFLRSQEYKKYQTNKTTGNTDKRAFVETWQSFYRKKLKEVWKPAV

SEQ ID NO: 36292 - protein, 978 aa, synthetic construct
  REGION 1..978: note = engineered CasX variant
QEIKRINKIRRRLVKDSNTKKAGKTGPMKTLLVRVMTPDLRERLENLRKKPENIPQPISNTSRANLNKLLTDYTEMKKAILHVYWEEFQKDPVGLMSRVAQPASKKIDQNKLKPEMDEKGNLTTAGFACSQCGQPLFVYKLEQVSEKGKAYTNYFGRCNVAEHEKLILLAQLKPEKDSDEAVTYSLGKFGQRALDFYSIHVTKESTHPVKPLAQIAGNRYASTPVGKALSDACMGTIASFLSKYQDIIIEHQKVVKGNQKRLESLRELAGKENLEYPSVTLPPQPHTKEGVDAYNEVIARVRWWVNLNLWQKLKLSRDDAKPLLRLKGFPSFPLVERQANEVDWWDMVCNVKKLINEKKEDGKVFWQNLAGYKRQEALRPYLSSEEDRKKGKKFARYQLGDLLLHLEKKHGEDWGKVYDEAWERIDKKVEGLSKHIKLEEERRSEDAQSKAALTDWLRAKASFVIEGLKEADKDEFCRCELKLQKWYGDLRGKPFAIEAENSILDISGFSKQYNCAFIWQKDGVKKLNLYLIINYFKGGKLRFKKIKPEAFEANRFYTVINKKSGEIVPMEVNFNFDDPNLIILPLAFGKRFGREFIWNDLLSLETGSLKLANGRVIEKTLYNRRTRQDEPALFVALTFERREVLDSSNIKPMNLIGVDRGENIPAVIALTDPEGCPLSRFKDSLGNPTHILRIGESYKEKQRTIQAKKEVEQRRAGGYSRKYASKAKNLADDMVRNTARDLLYYAVTQDAMLIFENLSRGFGRQGKRTFMAERQYTRMEDWLTAKLAYEGLPSKTYLSKTLAQYTSKTCSNCGFTITSADYDRVLEKLKKTATGWMTTINGKELKVEGQITYYNRYKRQNVVKDLSVELDRLSEESVNNDISSWTKGRSGEALSLLKKRFSHRPVQEKFVCLNCGFETHADEQAALNIARSWLFLRSQEYKKYQTNKTTGNTDKRAFVETWQSFYRKKLKEVWKPAV

SEQ ID NO: 36293 - protein, 978 aa, synthetic construct
  REGION 1..978: note = engineered CasX variant
QEIKRINKIRRRLVKDSNTKKAGKTGPMKTLLVRVMTPDLRERLENLRKKPENIPQPISNTSRANLNKLLTDYTEMKKAILHVYWEEFQKDPVGLMSRVAQPASKKIDQNKLKPEMDEKGNLTTAGFACSQCGQPLFVYKLEQVSEKGKAYTNYFGRCNVAEHEKLILLAQLKPEKDSDEAVTYSLGKFGQRALDFYSIHVTKESTHPVKPLAQIAGNRYASAPVGKALSDACMGTIASFLSKYQDIIIEHQKVVKGNQKRLESLRELAGKENLEYPSVTLPPQPHTKEGVDAYNEVIARVRWWVNLNLWQKLKLSRDDAKPLLRLKGFPSFPLVERQANEVDWWDMVCNVKKLINEKKEDGKVFWQNLAGYKRQEALRPYLSSEEDRKKGKKFARYQLGDLLLHLEKKHGEDWGKVYDEAWERIDKKVEGLSKHIKLEEERRSEDAQSKAALTDWLRAKASFVIEGLKEADKDEFCRCELKLQKWYGDLRGKPFAIEAENSILDISGFSKQYNCAFIWQKDGVKKLNLYLIINYFKGGKLRFKKIKPEAFEANRFYTVINKKSGEIVPMEVNFNFDDPNLIILPLAFGKRFGREFIWNDLLSLETGSLKLANGRVIEKTLYNRRTRQDEPALFVALTFERREVLDSSNIKPMNLIGVDRGENIPAVIALTDPEGCPLSRFKDSLGNPTHILRIGESYKEKQRTIQAKKEVEQRRAGGYSRKYASKAKNLADDMVRNTARDLLYYAVTQDAMLIFENLSRGFGRQGKRTFMAERQYTRMEDWLTAKLAYEGLPSKTYLSKTLAQYTSKTCSNCGFTITSADYDRVLEKLKKTATGWMTTINGKELKVEGQITYYNRYKRQNVVKDLSVELDRLSEESVNNDISSWTKGRSGEALSLLKKRFSHRPVQEKFVCLNCGFETHADEQAALNIARSWLFLRSQEYKKYQTNKTTGNTDKRAFVETWQSFYRKKLKEVWKPAV

SEQ ID NO: 36294 - protein, 978 aa, synthetic construct
  REGION 1..978: note = engineered CasX variant
QEIKRINKIRRRLVKDSNTKKAGKTGPMKTLLVRVMTPDLRERLENLRKKPENIPQPISNTSRANLNKLLTDYTEMKKAILHVYWEEFQKDPVGLMSRVAQPASKKIDQNKLKPEMDEKGNLTTAGFACSQCGQPLFVYKLEQVSEKGKAYTNYFGRCNVAEHEKLILLAQLKPEKDSDEAVTYSLGKFGQRALDFYSIHVTKESTHPVKPLAQIAGNRYASVPVGKALSDACMGTIASFLSKYQDIIIEHQKVVKGNQKRLESLRELAGKENLEYPSVTLPPQPHTKEGVDAYNEVIARVRWWVNLNLWQKLKLSRDDAKPLLRLKGFPSFPLVERQANEVDWWDMVCNVKKLINEKKEDGKVFWQNLAGYKRQEALRPYLSSEEDRKKGKKFARYQLGDLLLHLEKKHGEDWGKVYDEAWERIDKKVEGLSKHIKLEEERRSEDAQSKAALTDWLRAKASFVIEGLKEADKDEFCRCELKLQKWYGDLRGKPFAIEAENSILDISGFSKQYNCAFIWQKDGVKKLNLYLIINYFKGGKLRFKKIKPEAFEANRFYTVINKKSGEIVPMEVNFNFDDPNLIILPLAFGKRFGREFIWNDLLSLETGSLKLANGRVIEKTLYNRRTRQDEPALFVALTFERREVLDSSNIKPMNLIGVDRGENIPAVIALTDPEGCPLSRFKDSLGNPTHILRIGESYKEKQRTIQAKKEVEQRRAGGYSRKYASKAKNLADDMVRNTARDLLYYAVTQDAMLIFENLSRGFGRQGKRTFMAERQYTRMEDWLTAKLAYEGLPSKTYLSKTLAQYTSKTCSNCGFTITSADYDRVLEKLKKTATGWMTTINGKELKVEGQITYYNRYKRQNVVKDLSVELDRLSEESVNNDISSWTKGRSGEALSLLKKRFSHRPVQEKFVCLNCGFETHADEQAALNIARSWLFLRSQEYKKYQTNKTTGNTDKRAFVETWQSFYRKKLKEVWKPAV

SEQ ID NO: 36295 - protein, 978 aa, synthetic construct
  REGION 1..978: note = engineered CasX variant
QEIKRINKIRRRLVKDSNTKKAGKTGPMKTLLVRVMTPDLRERLENLRKKPENIPQPISNTSRANLNKLLTDYTEMKKAILHVYWEEFQKDPVGLMSRVAQPASKKIDQNKLKPEMDEKGNLTTAGFACSQCGQPLFVYKLEQVSEKGKAYTNYFGRCNVAEHEKLIKLAQLKPEKDSDEAVTYSLGKFGQRALDFYSIHVTKESTHPVKPLAQIAGNRYASGPVGKALSDACMGTIASFLSKYQDIIIEHQKVVKGNQKRLESLRELAGKENLEYPSVTLPPQPHTKEGVDAYNEVIARVRWWVNLNLWQKLKLSRDDAKPLLRLKGFPSFPLVERQANEVDWWDMVCNVKKLINEKKEDGKVFWQNLAGYKRQEALRPYLSSEEDRKKGKKFARYQLGDLLLHLEKKHGEDWGKVYDEAWERIDKKVEGLSKHIKLEEERRSEDAQSKAALTDWLRAKASFVIEGLKEADKDEFCRCELKLQKWYGDLRGKPFAIEAENSILDISGFSKQYNCAFIWQKDGVKKLNLYLIINYFKGGKLRFKKIKPEAFEANRFYTVINKKSGEIVPMEVNFNFDDPNLIILPLAFGKRFGREFIWNDLLSLETGSLKLANGRVIEKTLYNRRTRQDEPALFVALTFERREVLDSSNIKPMNLIGVDRGENIPAVIALTDPEGCPLSRFKDSLGNPTHILRIGESYKEKQRTIQAKKEVEQRRAGGYSRKYASKAKNLADDMVRNTARDLLYYAVTQDAMLIFENLSRGFGRQGKRTFMAERQYTRMEDWLTAKLAYEGLPSKTYLSKTLAQYTSKTCSNCGFTITSADYDRVLEKLKKTATGWMTTINGKELKVEGQITYYNRYKRQNVVKDLSVELDRLSEESVNNDISSWTKGRSGEALSLLKKRFSHRPVQEKFVCLNCGFETHADEQAALNIARSWLFLRSQEYKKYQTNKTTGNTDKRAFVETWQSFYRKKLKEVWKPAV

SEQ ID NO: 36296 - protein, 977 aa, synthetic construct
  REGION 1..977: note = engineered CasX variant
QEIKRINKIRRRLVKDSNTKKAGKTGPMKTLLVRVMTPDLRERLENLRKKPENIPQPISNTSRANLNKLLTDYTEMKKAILHVYWEEFQKDPVGLMSRVAQPASKKIDQNKLKPEMDEKGNLTTAGFACSQCGQPLFVYKLEQVSEKGKAYTNYFGRCNVAEHEKLILLAQLKPEKDSDEAVTYSLGKFGQRALDFYSIHVTKESTHPVKPLAQIAGNRYASPVGKALSDACMGTIASFLSKYQDIIIEHQKVVKGNQKRLESLRELAGKENLEYPSVTLPPQPHTKEGVDAYNEVIARVRWWVNLNLWQKLKLSRDDAKPLLRLKGFPSFPLVERQANEVDWWDMVCNVKKLINEKKEDGKVFWQNLAGYKRQEALRPYLSSEEDRKKGKKFARYQLGDLLLHLEKKHGEDWGKVYDEAWERIDKKVEGLSKHIKLEEERRSEDAQSKAALTDWLRAKASFVIEGLKEADKDEFCRCELKLQKWYGDLRGKPFAIEAENSILDISGFSKQYNCAFIWQKDGVKKLNLYLIINYFKGGKLRFKKIKPEAFEANRFYTVINKKSGEIVPMEVNFNFDDPNLIILPLAFGKRFGREFIWNDLLSLETGSLKLANGRVIEKTLYNRRTRQDEPALFVALTFERREVLDSSNIKPMNLIGVDRGENIPAVIALTDPEGCPLSRFKDSLGNPTHILRIGESYKEKQRTIQAKKEVEQRRAGGYSRKYASKAKNLADDMVRNTARDLLYYAVTQDAMLIFENLSRGFGRQGKRTFMAERQYTRMEDWLTAKLAYEGLPSKTYLSKTLAQYTSKTCSNCGFTITSADYDRVLEKLKKTATGWMTTINGKELKVEGQITYYNRYKRQNVVKDLSVELDRLSEESVNNDISSWTKGRSGEALSLLKKRFSHRPVQEKFVCLNCGFETHADEQAALNIARSWLFLRSQEYKKYQTNKTTGNTDKRAFVETWQSFYRKKLKEVWKPAV

SEQ ID NO: 36297 - protein, 978 aa, synthetic construct
  REGION 1..978: note = engineered CasX variant
QEIKRINKIRRRLVKDSNTKKAGKTGPMKTLLVRVMTPDLRERLENLRKKPENIPQPISNTSRANLNKLLTDYTEMKKAILHVYWEEFQKDPVGLMSRVAQPASKKIDQNKLKPEMDEKGNLTTAGFACSQCGQPLFVYKLEQVSEKGKAYTNYFGRCNVAEHEKLILLAQLKPEKDSDEAVTYSLGKFGQRALDFYSIHVTKESTHPVKPLAQIAGNRYASYPVGKALSDACMGTIASFLSKYQDIIIEHQKVVKGNQKRLESLRELAGKENLEYPSVTLPPQPHTKEGVDAYNEVIARVRWWVNLNLWQKLKLSRDDAKPLLRLKGFPSFPLVERQANEVDWWDMVCNVKKLINEKKEDGKVFWQNLAGYKRQEALRPYLSSEEDRKKGKKFARYQLGDLLLHLEKKHGEDWGKVYDEAWERIDKKVEGLSKHIKLEEERRSEDAQSKAALTDWLRAKASFVIEGLKEADKDEFCRCELKLQKWYGDLRGKPFAIEAENSILDISGFSKQYNCAFIWQKDGVKKLNLYLIINYFKGGKLRFKKIKPEAFEANRFYTVINKKSGEIVPMEVNFNFDDPNLIILPLAFGKRVGREFIWNDLLSLETGSLKLANGRVIEKTLYNRRTRQDEPALFVALTFERREVLDSSNIKPMNLIGVDRGENIPAVIALTDPEGCPLSRFKDSLGNPTHILRIGESYKEKQRTIQAKKEVEQRRAGGYSRKYASKAKNLADDMVRNTARDLLYYAVTQDAMLIFENLSRGFGRQGKRTFMAERQYTRMEDWLTAKLAYEGLPSKTYLSKTLAQYTSKTCSNCGFTITSADYDRVLEKLKKTATGWMTTINGKELKVEGQITYYNRYKRQNVVKDLSVELDRLSEESVNNDISSWTKGRSGEALSLLKKRFSHRPVQEKFVCLNCGFETHADEQAALNIARSWLFLRSQEYKKYQTNKTTGNTDKRAFVETWQSFYRKKLKEVWKPAV

SEQ ID NO: 36298 - protein, 978 aa, synthetic construct
  REGION 1..978: note = engineered CasX variant
QEIKRINKIRRRLVKDSNTKKAGKTGPMKTLLVRVMTPDLRERLENLRKKPENIPQPISNTSRANLNKLLTDYTEMKKAILHVYWEEFQKDPVGLMSRVAQPASKKIDQNKLKPEMDEKGNLTTAGFACSQCGQPLFVYKLEQVSEKGKAYTNYFGRCNVAEHEKLILLAQLKPEKDSDEAVTYSLGKFGQRALDFYSIHVTKESTHPVKPLAQIAGNRYASHPVGKALSDACMGTIASFLSKYQDIIIEHQKVVKGNQKRLESLRELAGKENLEYPSVTLPPQPHTKEGVDAYNEVIARVRWWVNLNLWQKLKLSRDDAKPLLRLKGFPSFPLVERQANEVDWWDMVCNVKKLINEKKEDGKVFWQNLAGYKRQEALRPYLSSEEDRKKGKKFARYQLGDLLLHLEKKHGEDWGKVYDEAWERIDKKVEGLSKHIKLEEERRSEDAQSKAALTDWLRAKASFVIEGLKEADKDEFCRCELKLQKWYGDLRGKPFAIEAENSILDISGFSKQYNCAFIWQKDGVKKLNLYLIINYFKGGKLRFKKIKPEAFEANRFYTVINKKSGEIVPMEVNFNFDDPNLIILPLAFGKRVGREFIWNDLLSLETGSLKLANGRVIEKTLYNRRTRQDEPALFVALTFERREVLDSSNIKPMNLIGVDRGENIPAVIALTDPEGCPLSRFKDSLGNPTHILRIGESYKEKQRTIQAKKEVEQRRAGGYSRKYASKAKNLADDMVRNTARDLLYYAVTQDAMLIFENLSRGFGRQGKRTFMAERQYTRMEDWLTAKLAYEGLPSKTYLSKTLAQYTSKTCSNCGFTITSADYDRVLEKLKKTATGWMTTINGKELKVEGQITYYNRYKRQNVVKDLSVELDRLSEESVNNDISSWTKGRSGEALSLLKKRFSHRPVQEKFVCLNCGFETHADEQAALNIARSWLFLRSQEYKKYQTNKTTGNTDKRAFVETWQSFYRKKLKEVWKPAV

SEQ ID NO: 36299 - protein, 978 aa, synthetic construct
  REGION 1..978: note = engineered CasX variant
QEIKRINKIRRRLVKDSNTKKAGKTGPMKTLLVRVMTPDLRERLENLRKKPENIPQPISNTSRANLNKLLTDYTEMKKAILHVYWEEFQKDPVGLMSRVAQPASKKIDQNKLKPEMDEKGNLTTAGFACSQCGQPLFVYKLEQVSEKGKAYTNYFGRCNVAEHEKLILLAQLKPEKDSDEAVTYSLGKFGQRALDFYSIHVTKESTHPVKPLAQIAGNRYASSPVGKALSDACMGTIASFLSKYQDIIIEHQKVVKGNQKRLESLRELAGKENLEYPSVTLPPQPHTKEGVDAYNEVIARVRWWVNLNLWQKLKLSRDDAKPLLRLKGFPSFPLVERQANEVDWWDMVCNVKKLINEKKEDGKVFWQNLAGYKRQEALRPYLSSEEDRKKGKKFARYQLGDLLLHLEKKHGEDWGKVYDEAWERIDKKVEGLSKHIKLEEERRSEDAQSKAALTDWLRAKASFVIEGLKEADKDEFCRCELKLQKWYGDLRGKPFAIEAENSILDISGFSKQYNCAFIWQKDGVKKLNLYLIINYFKGGKLRFKKIKPEAFEANRFYTVINKKSGEIVPMEVNFNFDDPNLIILPLAFGKRVGREFIWNDLLSLETGSLKLANGRVIEKTLYNRRTRQDEPALFVALTFERREVLDSSNIKPMNLIGVDRGENIPAVIALTDPEGCPLSRFKDSLGNPTHILRIGESYKEKQRTIQAKKEVEQRRAGGYSRKYASKAKNLADDMVRNTARDLLYYAVTQDAMLIFENLSRGFGRQGKRTFMAERQYTRMEDWLTAKLAYEGLPSKTYLSKTLAQYTSKTCSNCGFTITSADYDRVLEKLKKTATGWMTTINGKELKVEGQITYYNRYKRQNVVKDLSVELDRLSEESVNNDISSWTKGRSGEALSLLKKRFSHRPVQEKFVCLNCGFETHADEQAALNIARSWLFLRSQEYKKYQTNKTTGNTDKRAFVETWQSFYRKKLKEVWKPAV

SEQ ID NO: 36300 - protein, 978 aa, synthetic construct
  REGION 1..978: note = engineered CasX variant
QEIKRINKIRRRLVKDSNTKKAGKTGPMKTLLVRVMTPDLRERLENLRKKPENIPQPISNTSRANLNKLLTDYTEMKKAILHVYWEEFQKDPVGLMSRVAQPASKKIDQNKLKPEMDEKGNLTTAGFACSQCGQPLFVYKLEQVSEKGKAYTNYFGRCNVAEHEKLILLAQLKPEKDSDEAVTYSLGKFGQRALDFYSIHVTKESTHPVKPLAQIAGNRYASTPVGKALSDACMGTIASFLSKYQDIIIEHQKVVKGNQKRLESLRELAGKENLEYPSVTLPPQPHTKEGVDAYNEVIARVRWWVNLNLWQKLKLSRDDAKPLLRLKGFPSFPLVERQANEVDWWDMVCNVKKLINEKKEDGKVFWQNLAGYKRQEALRPYLSSEEDRKKGKKFARYQLGDLLLHLEKKHGEDWGKVYDEAWERIDKKVEGLSKHIKLEEERRSEDAQSKAALTDWLRAKASFVIEGLKEADKDEFCRCELKLQKWYGDLRGKPFAIEAENSILDISGFSKQYNCAFIWQKDGVKKLNLYLIINYFKGGKLRFKKIKPEAFEANRFYTVINKKSGEIVPMEVNFNFDDPNLIILPLAFGKRVGREFIWNDLLSLETGSLKLANGRVIEKTLYNRRTRQDEPALFVALTFERREVLDSSNIKPMNLIGVDRGENIPAVIALTDPEGCPLSRFKDSLGNPTHILRIGESYKEKQRTIQAKKEVEQRRAGGYSRKYASKAKNLADDMVRNTARDLLYYAVTQDAMLIFENLSRGFGRQGKRTFMAERQYTRMEDWLTAKLAYEGLPSKTYLSKTLAQYTSKTCSNCGFTITSADYDRVLEKLKKTATGWMTTINGKELKVEGQITYYNRYKRQNVVKDLSVELDRLSEESVNNDISSWTKGRSGEALSLLKKRFSHRPVQEKFVCLNCGFETHADEQAALNIARSWLFLRSQEYKKYQTNKTTGNTDKRAFVETWQSFYRKKLKEVWKPAV

SEQ ID NO: 36301 - protein, 978 aa, synthetic construct
  REGION 1..978: note = engineered CasX variant
QEIKRINKIRRRLVKDSNTKKAGKTGPMKTLLVRVMTPDLRERLENLRKKPENIPQPISNTSRANLNKLLTDYTEMKKAILHVYWEEFQKDPVGLMSRVAQPASKKIDQNKLKPEMDEKGNLTTAGFACSQCGQPLFVYKLEQVSEKGKAYTNYFGRCNVAEHEKLILLAQLKPEKDSDEAVTYSLGKFGQRALDFYSIHVTKESTHPVKPLAQIAGNRYASAPVGKALSDACMGTIASFLSKYQDIIIEHQKVVKGNQKRLESLRELAGKENLEYPSVTLPPQPHTKEGVDAYNEVIARVRWWVNLNLWQKLKLSRDDAKPLLRLKGFPSFPLVERQANEVDWWDMVCNVKKLINEKKEDGKVFWQNLAGYKRQEALRPYLSSEEDRKKGKKFARYQLGDLLLHLEKKHGEDWGKVYDEAWERIDKKVEGLSKHIKLEEERRSEDAQSKAALTDWLRAKASFVIEGLKEADKDEFCRCELKLQKWYGDLRGKPFAIEAENSILDISGFSKQYNCAFIWQKDGVKKLNLYLIINYFKGGKLRFKKIKPEAFEANRFYTVINKKSGEIVPMEVNFNFDDPNLIILPLAFGKRVGREFIWNDLLSLETGSLKLANGRVIEKTLYNRRTRQDEPALFVALTFERREVLDSSNIKPMNLIGVDRGENIPAVIALTDPEGCPLSRFKDSLGNPTHILRIGESYKEKQRTIQAKKEVEQRRAGGYSRKYASKAKNLADDMVRNTARDLLYYAVTQDAMLIFENLSRGFGRQGKRTFMAERQYTRMEDWLTAKLAYEGLPSKTYLSKTLAQYTSKTCSNCGFTITSADYDRVLEKLKKTATGWMTTINGKELKVEGQITYYNRYKRQNVVKDLSVELDRLSEESVNNDISSWTKGRSGEALSLLKKRFSHRPVQEKFVCLNCGFETHADEQAALNIARSWLFLRSQEYKKYQTNKTTGNTDKRAFVETWQSFYRKKLKEVWKPAV

SEQ ID NO: 36302 - protein, 978 aa, synthetic construct
  REGION 1..978: note = engineered CasX variant
QEIKRINKIRRRLVKDSNTKKAGKTGPMKTLLVRVMTPDLRERLENLRKKPENIPQPISNTSRANLNKLLTDYTEMKKAILHVYWEEFQKDPVGLMSRVAQPASKKIDQNKLKPEMDEKGNLTTAGFACSQCGQPLFVYKLEQVSEKGKAYTNYFGRCNVAEHEKLILLAQLKPEKDSDEAVTYSLGKFGQRALDFYSIHVTKESTHPVKPLAQIAGNRYASVPVGKALSDACMGTIASFLSKYQDIIIEHQKVVKGNQKRLESLRELAGKENLEYPSVTLPPQPHTKEGVDAYNEVIARVRWWVNLNLWQKLKLSRDDAKPLLRLKGFPSFPLVERQANEVDWWDMVCNVKKLINEKKEDGKVFWQNLAGYKRQEALRPYLSSEEDRKKGKKFARYQLGDLLLHLEKKHGEDWGKVYDEAWERIDKKVEGLSKHIKLEEERRSEDAQSKAALTDWLRAKASFVIEGLKEADKDEFCRCELKLQKWYGDLRGKPFAIEAENSILDISGFSKQYNCAFIWQKDGVKKLNLYLIINYFKGGKLRFKKIKPEAFEANRFYTVINKKSGEIVPMEVNFNFDDPNLIILPLAFGKRVGREFIWNDLLSLETGSLKLANGRVIEKTLYNRRTRQDEPALFVALTFERREVLDSSNIKPMNLIGVDRGENIPAVIALTDPEGCPLSRFKDSLGNPTHILRIGESYKEKQRTIQAKKEVEQRRAGGYSRKYASKAKNLADDMVRNTARDLLYYAVTQDAMLIFENLSRGFGRQGKRTFMAERQYTRMEDWLTAKLAYEGLPSKTYLSKTLAQYTSKTCSNCGFTITSADYDRVLEKLKKTATGWMTTINGKELKVEGQITYYNRYKRQNVVKDLSVELDRLSEESVNNDISSWTKGRSGEALSLLKKRFSHRPVQEKFVCLNCGFETHADEQAALNIARSWLFLRSQEYKKYQTNKTTGNTDKRAFVETWQSFYRKKLKEVWKPAV

SEQ ID NO: 36303 - protein, 978 aa, synthetic construct
  REGION 1..978: note = engineered CasX variant
QEIKRINKIRRRLVKDSNTKKAGKTGPMKTLLVRVMTPDLRERLENLRKKPENIPQPISNTSRANLNKLLTDYTEMKKAILHVYWEEFQKDPVGLMSRVAQPASKKIDQNKLKPEMDEKGNLTTAGFACSQCGQPLFVYKLEQVSEKGKAYTNYFGRCNVAEHEKLIKLAQLKPEKDSDEAVTYSLGKFGQRALDFYSIHVTKESTHPVKPLAQIAGNRYASGPVGKALSDACMGTIASFLSKYQDIIIEHQKVVKGNQKRLESLRELAGKENLEYPSVTLPPQPHTKEGVDAYNEVIARVRWWVNLNLWQKLKLSRDDAKPLLRLKGFPSFPLVERQANEVDWWDMVCNVKKLINEKKEDGKVFWQNLAGYKRQEALRPYLSSEEDRKKGKKFARYQLGDLLLHLEKKHGEDWGKVYDEAWERIDKKVEGLSKHIKLEEERRSEDAQSKAALTDWLRAKASFVIEGLKEADKDEFCRCELKLQKWYGDLRGKPFAIEAENSILDISGFSKQYNCAFIWQKDGVKKLNLYLIINYFKGGKLRFKKIKPEAFEANRFYTVINKKSGEIVPMEVNFNFDDPNLIILPLAFGKRVGREFIWNDLLSLETGSLKLANGRVIEKTLYNRRTRQDEPALFVALTFERREVLDSSNIKPMNLIGVDRGENIPAVIALTDPEGCPLSRFKDSLGNPTHILRIGESYKEKQRTIQAKKEVEQRRAGGYSRKYASKAKNLADDMVRNTARDLLYYAVTQDAMLIFENLSRGFGRQGKRTFMAERQYTRMEDWLTAKLAYEGLPSKTYLSKTLAQYTSKTCSNCGFTITSADYDRVLEKLKKTATGWMTTINGKELKVEGQITYYNRYKRQNVVKDLSVELDRLSEESVNNDISSWTKGRSGEALSLLKKRFSHRPVQEKFVCLNCGFETHADEQAALNIARSWLFLRSQEYKKYQTNKTTGNTDKRAFVETWQSFYRKKLKEVWKPAV

SEQ ID NO: 36304 - protein, 977 aa, synthetic construct
  REGION 1..977: note = engineered CasX variant
QEIKRINKIRRRLVKDSNTKKAGKTGPMKTLLVRVMTPDLRERLENLRKKPENIPQPISNTSRANLNKLLTDYTEMKKAILHVYWEEFQKDPVGLMSRVAQPASKKIDQNKLKPEMDEKGNLTTAGFACSQCGQPLFVYKLEQVSEKGKAYTNYFGRCNVAEHEKLILLAQLKPEKDSDEAVTYSLGKFGQRALDFYSIHVTKESTHPVKPLAQIAGNRYASPVGKALSDACMGTIASFLSKYQDIIIEHQKVVKGNQKRLESLRELAGKENLEYPSVTLPPQPHTKEGVDAYNEVIARVRWWVNLNLWQKLKLSRDDAKPLLRLKGFPSFPLVERQANEVDWWDMVCNVKKLINEKKEDGKVFWQNLAGYKRQEALRPYLSSEEDRKKGKKFARYQLGDLLLHLEKKHGEDWGKVYDEAWERIDKKVEGLSKHIKLEEERRSEDAQSKAALTDWLRAKASFVIEGLKEADKDEFCRCELKLQKWYGDLRGKPFAIEAENSILDISGFSKQYNCAFIWQKDGVKKLNLYLIINYFKGGKLRFKKIKPEAFEANRFYTVINKKSGEIVPMEVNFNFDDPNLIILPLAFGKRVGREFIWNDLLSLETGSLKLANGRVIEKTLYNRRTRQDEPALFVALTFERREVLDSSNIKPMNLIGVDRGENIPAVIALTDPEGCPLSRFKDSLGNPTHILRIGESYKEKQRTIQAKKEVEQRRAGGYSRKYASKAKNLADDMVRNTARDLLYYAVTQDAMLIFENLSRGFGRQGKRTFMAERQYTRMEDWLTAKLAYEGLPSKTYLSKTLAQYTSKTCSNCGFTITSADYDRVLEKLKKTATGWMTTINGKELKVEGQITYYNRYKRQNVVKDLSVELDRLSEESVNNDISSWTKGRSGEALSLLKKRFSHRPVQEKFVCLNCGFETHADEQAALNIARSWLFLRSQEYKKYQTNKTTGNTDKRAFVETWQSFYRKKLKEVWKPAV

SEQ ID NO: 36305 - protein, 979 aa, synthetic construct
  REGION 1..979: note = engineered CasX variant
QEIKRINKIRRRLVKDSNTKKAGKTGPMKTLLVRVMTPDLRERLENLRKKPENIPQPISNTSRANLNKLLTDYTEMKKAILHVYWEEFQKDPVGLMSRVAQPASKKIDQNKLKPEMDEKGNLTTAGFACSQCGQPLFVYKLEQVSEKGKAYTNYFGRCNVAEHEKLILLAQLKPEKDSDEAVTYSLGKFGQRALDFYSIHVTKESTHPVKPLAQIAGNRYASYPVGKALSDACMGTIASFLSKYQDIIIEHQKVVKGNQKRLESLRELAGKENLEYPSVTLPPQPHTKEGVDAYNEVIARVRWWVNLNLWQKLKLSRDDAKPLLRLKGFPSFPLVERQANEVDWWDMVCNVKKLINEKKEDGKVFWQNLAGYKRQEALRPYLSSEEDRKKGKKFARYQLGDLLLHLEKKHGEDWGKVYDEAWERIDKKVEGLSKHIKLEEERRSEDAQSKAALTDWLRAKASFVIEGLKEADKDEFCRCELKLQKWYGDLRGKPFAIEAENSILDISGFSKQYNCAFIWQKDGVKKLNLYLIINYFKGGKLRFKKIKPEAFEANRFYTVINKKSGEIVPMEVNFNFDDPNLIILPLAFGKRQGREFIWNDLLSLETGSLKLANGRVIEKTLYNRRTRQDEPALFVALTFERREVLDSSNIKTPMNLIGVDRGENIPAVIALTDPEGCPLSRFKDSLGNPTHILRIGESYKEKQRTIQAKKEVEQRRAGGYSRKYASKAKNLADDMVRNTARDLLYYAVTQDAMLIFENLSRGFGRQGKRTFMAERQYTRMEDWLTAKLAYEGLPSKTYLSKTLAQYTSKTCSNCGFTITSADYDRVLEKLKKTATGWMTTINGKELKVEGQITYYNRYKRQNVVKDLSVELDRLSEESVNNDISSWTKGRSGEALSLLKKRFSHRPVQEKFVCLNCGFETHADEQAALNIARSWLFLRSQEYKKYQTNKTTGNTDKRAFVETWQSFYRKKLKEVWKPAV

SEQ ID NO: 36306 - protein, 979 aa, synthetic construct
  REGION 1..979: note = engineered CasX variant
QEIKRINKIRRRLVKDSNTKKAGKTGPMKTLLVRVMTPDLRERLENLRKKPENIPQPISNTSRANLNKLLTDYTEMKKAILHVYWEEFQKDPVGLMSRVAQPASKKIDQNKLKPEMDEKGNLTTAGFACSQCGQPLFVYKLEQVSEKGKAYTNYFGRCNVAEHEKLILLAQLKPEKDSDEAVTYSLGKFGQRALDFYSIHVTKESTHPVKPLAQIAGNRYASHPVGKALSDACMGTIASFLSKYQDIIIEHQKVVKGNQKRLESLRELAGKENLEYPSVTLPPQPHTKEGVDAYNEVIARVRWWVNLNLWQKLKLSRDDAKPLLRLKGFPSFPLVERQANEVDWWDMVCNVKKLINEKKEDGKVFWQNLAGYKRQEALRPYLSSEEDRKKGKKFARYQLGDLLLHLEKKHGEDWGKVYDEAWERIDKKVEGLSKHIKLEEERRSEDAQSKAALTDWLRAKASFVIEGLKEADKDEFCRCELKLQKWYGDLRGKPFAIEAENSILDISGFSKQYNCAFIWQKDGVKKLNLYLIINYFKGGKLRFKKIKPEAFEANRFYTVINKKSGEIVPMEVNFNFDDPNLIILPLAFGKRQGREFIWNDLLSLETGSLKLANGRVIEKTLYNRRTRQDEPALFVALTFERREVLDSSNIKTPMNLIGVDRGENIPAVIALTDPEGCPLSRFKDSLGNPTHILRIGESYKEKQRTIQAKKEVEQRRAGGYSRKYASKAKNLADDMVRNTARDLLYYAVTQDAMLIFENLSRGFGRQGKRTFMAERQYTRMEDWLTAKLAYEGLPSKTYLSKTLAQYTSKTCSNCGFTITSADYDRVLEKLKKTATGWMTTINGKELKVEGQITYYNRYKRQNVVKDLSVELDRLSEESVNNDISSWTKGRSGEALSLLKKRFSHRPVQEKFVCLNCGFETHADEQAALNIARSWLFLRSQEYKKYQTNKTTGNTDKRAFVETWQSFYRKKLKEVWKPAV

SEQ ID NO: 36307 - protein, 979 aa, synthetic construct
  REGION 1..979: note = engineered CasX variant
QEIKRINKIRRRLVKDSNTKKAGKTGPMKTLLVRVMTPDLRERLENLRKKPENIPQPISNTSRANLNKLLTDYTEMKKAILHVYWEEFQKDPVGLMSRVAQPASKKIDQNKLKPEMDEKGNLTTAGFACSQCGQPLFVYKLEQVSEKGKAYTNYFGRCNVAEHEKLILLAQLKPEKDSDEAVTYSLGKFGQRALDFYSIHVTKESTHPVKPLAQIAGNRYASSPVGKALSDACMGTIASFLSKYQDIIIEHQKVVKGNQKRLESLRELAGKENLEYPSVTLPPQPHTKEGVDAYNEVIARVRWWVNLNLWQKLKLSRDDAKPLLRLKGFPSFPLVERQANEVDWWDMVCNVKKLINEKKEDGKVFWQNLAGYKRQEALRPYLSSEEDRKKGKKFARYQLGDLLLHLEKKHGEDWGKVYDEAWERIDKKVEGLSKHIKLEEERRSEDAQSKAALTDWLRAKASFVIEGLKEADKDEFCRCELKLQKWYGDLRGKPFAIEAENSILDISGFSKQYNCAFIWQKDGVKKLNLYLIINYFKGGKLRFKKIKPEAFEANRFYTVINKKSGEIVPMEVNFNFDDPNLIILPLAFGKRQGREFIWNDLLSLETGSLKLANGRVIEKTLYNRRTRQDEPALFVALTFERREVLDSSNIKTPMNLIGVDRGENIPAVIALTDPEGCPLSRFKDSLGNPTHILRIGESYKEKQRTIQAKKEVEQRRAGGYSRKYASKAKNLADDMVRNTARDLLYYAVTQDAMLIFENLSRGFGRQGKRTFMAERQYTRMEDWLTAKLAYEGLPSKTYLSKTLAQYTSKTCSNCGFTITSADYDRVLEKLKKTATGWMTTINGKELKVEGQITYYNRYKRQNVVKDLSVELDRLSEESVNNDISSWTKGRSGEALSLLKKRFSHRPVQEKFVCLNCGFETHADEQAALNIARSWLFLRSQEYKKYQTNKTTGNTDKRAFVETWQSFYRKKLKEVWKPAV

SEQ ID NO: 36308 - protein, 979 aa, synthetic construct
  REGION 1..979: note = engineered CasX variant
QEIKRINKIRRRLVKDSNTKKAGKTGPMKTLLVRVMTPDLRERLENLRKKPENIPQPISNTSRANLNKLLTDYTEMKKAILHVYWEEFQKDPVGLMSRVAQPASKKIDQNKLKPEMDEKGNLTTAGFACSQCGQPLFVYKLEQVSEKGKAYTNYFGRCNVAEHEKLILLAQLKPEKDSDEAVTYSLGKFGQRALDFYSIHVTKESTHPVKPLAQIAGNRYASTPVGKALSDACMGTIASFLSKYQDIIIEHQKVVKGNQKRLESLRELAGKENLEYPSVTLPPQPHTKEGVDAYNEVIARVRWWVNLNLWQKLKLSRDDAKPLLRLKGFPSFPLVERQANEVDWWDMVCNVKKLINEKKEDGKVFWQNLAGYKRQEALRPYLSSEEDRKKGKKFARYQLGDLLLHLEKKHGEDWGKVYDEAWERIDKKVEGLSKHIKLEEERRSEDAQSKAALTDWLRAKASFVIEGLKEADKDEFCRCELKLQKWYGDLRGKPFAIEAENSILDISGFSKQYNCAFIWQKDGVKKLNLYLIINYFKGGKLRFKKIKPEAFEANRFYTVINKKSGEIVPMEVNFNFDDPNLIILPLAFGKRQGREFIWNDLLSLETGSLKLANGRVIEKTLYNRRTRQDEPALFVALTFERREVLDSSNIKTPMNLIGVDRGENIPAVIALTDPEGCPLSRFKDSLGNPTHILRIGESYKEKQRTIQAKKEVEQRRAGGYSRKYASKAKNLADDMVRNTARDLLYYAVTQDAMLIFENLSRGFGRQGKRTFMAERQYTRMEDWLTAKLAYEGLPSKTYLSKTLAQYTSKTCSNCGFTITSADYDRVLEKLKKTATGWMTTINGKELKVEGQITYYNRYKRQNVVKDLSVELDRLSEESVNNDISSWTKGRSGEALSLLKKRFSHRPVQEKFVCLNCGFETHADEQAALNIARSWLFLRSQEYKKYQTNKTTGNTDKRAFVETWQSFYRKKLKEVWKPAV

SEQ ID NO: 36309 - protein, 979 aa, synthetic construct
  REGION 1..979: note = engineered CasX variant
QEIKRINKIRRRLVKDSNTKKAGKTGPMKTLLVRVMTPDLRERLENLRKKPENIPQPISNTSRANLNKLLTDYTEMKKAILHVYWEEFQKDPVGLMSRVAQPASKKIDQNKLKPEMDEKGNLTTAGFACSQCGQPLFVYKLEQVSEKGKAYTNYFGRCNVAEHEKLILLAQLKPEKDSDEAVTYSLGKFGQRALDFYSIHVTKESTHPVKPLAQIAGNRYASAPVGKALSDACMGTIASFLSKYQDIIIEHQKVVKGNQKRLESLRELAGKENLEYPSVTLPPQPHTKEGVDAYNEVIARVRWWVNLNLWQKLKLSRDDAKPLLRLKGFPSFPLVERQANEVDWWDMVCNVKKLINEKKEDGKVFWQNLAGYKRQEALRPYLSSEEDRKKGKKFARYQLGDLLLHLEKKHGEDWGKVYDEAWERIDKKVEGLSKHIKLEEERRSEDAQSKAALTDWLRAKASFVIEGLKEADKDEFCRCELKLQKWYGDLRGKPFAIEAENSILDISGFSKQYNCAFIWQKDGVKKLNLYLIINYFKGGKLRFKKIKPEAFEANRFYTVINKKSGEIVPMEVNFNFDDPNLIILPLAFGKRQGREFIWNDLLSLETGSLKLANGRVIEKTLYNRRTRQDEPALFVALTFERREVLDSSNIKTPMNLIGVDRGENIPAVIALTDPEGCPLSRFKDSLGNPTHILRIGESYKEKQRTIQAKKEVEQRRAGGYSRKYASKAKNLADDMVRNTARDLLYYAVTQDAMLIFENLSRGFGRQGKRTFMAERQYTRMEDWLTAKLAYEGLPSKTYLSKTLAQYTSKTCSNCGFTITSADYDRVLEKLKKTATGWMTTINGKELKVEGQITYYNRYKRQNVVKDLSVELDRLSEESVNNDISSWTKGRSGEALSLLKKRFSHRPVQEKFVCLNCGFETHADEQAALNIARSWLFLRSQEYKKYQTNKTTGNTDKRAFVETWQSFYRKKLKEVWKPAV

SEQ ID NO: 36310 - protein, 979 aa, synthetic construct
  REGION 1..979: note = engineered CasX variant
QEIKRINKIRRRLVKDSNTKKAGKTGPMKTLLVRVMTPDLRERLENLRKKPENIPQPISNTSRANLNKLLTDYTEMKKAILHVYWEEFQKDPVGLMSRVAQPASKKIDQNKLKPEMDEKGNLTTAGFACSQCGQPLFVYKLEQVSEKGKAYTNYFGRCNVAEHEKLILLAQLKPEKDSDEAVTYSLGKFGQRALDFYSIHVTKESTHPVKPLAQIAGNRYASVPVGKALSDACMGTIASFLSKYQDIIIEHQKVVKGNQKRLESLRELAGKENLEYPSVTLPPQPHTKEGVDAYNEVIARVRWWVNLNLWQKLKLSRDDAKPLLRLKGFPSFPLVERQANEVDWWDMVCNVKKLINEKKEDGKVFWQNLAGYKRQEALRPYLSSEEDRKKGKKFARYQLGDLLLHLEKKHGEDWGKVYDEAWERIDKKVEGLSKHIKLEEERRSEDAQSKAALTDWLRAKASFVIEGLKEADKDEFCRCELKLQKWYGDLRGKPFAIEAENSILDISGFSKQYNCAFIWQKDGVKKLNLYLIINYFKGGKLRFKKIKPEAFEANRFYTVINKKSGEIVPMEVNFNFDDPNLIILPLAFGKRQGREFIWNDLLSLETGSLKLANGRVIEKTLYNRRTRQDEPALFVALTFERREVLDSSNIKTPMNLIGVDRGENIPAVIALTDPEGCPLSRFKDSLGNPTHILRIGESYKEKQRTIQAKKEVEQRRAGGYSRKYASKAKNLADDMVRNTARDLLYYAVTQDAMLIFENLSRGFGRQGKRTFMAERQYTRMEDWLTAKLAYEGLPSKTYLSKTLAQYTSKTCSNCGFTITSADYDRVLEKLKKTATGWMTTINGKELKVEGQITYYNRYKRQNVVKDLSVELDRLSEESVNNDISSWTKGRSGEALSLLKKRFSHRPVQEKFVCLNCGFETHADEQAALNIARSWLFLRSQEYKKYQTNKTTGNTDKRAFVETWQSFYRKKLKEVWKPAV

SEQ ID NO: 36311 - protein, 979 aa, synthetic construct
  REGION 1..979: note = engineered CasX variant
QEIKRINKIRRRLVKDSNTKKAGKTGPMKTLLVRVMTPDLRERLENLRKKPENIPQPISNTSRANLNKLLTDYTEMKKAILHVYWEEFQKDPVGLMSRVAQPASKKIDQNKLKPEMDEKGNLTTAGFACSQCGQPLFVYKLEQVSEKGKAYTNYFGRCNVAEHEKLIKLAQLKPEKDSDEAVTYSLGKFGQRALDFYSIHVTKESTHPVKPLAQIAGNRYASGPVGKALSDACMGTIASFLSKYQDIIIEHQKVVKGNQKRLESLRELAGKENLEYPSVTLPPQPHTKEGVDAYNEVIARVRWWVNLNLWQKLKLSRDDAKPLLRLKGFPSFPLVERQANEVDWWDMVCNVKKLINEKKEDGKVFWQNLAGYKRQEALRPYLSSEEDRKKGKKFARYQLGDLLLHLEKKHGEDWGKVYDEAWERIDKKVEGLSKHIKLEEERRSEDAQSKAALTDWLRAKASFVIEGLKEADKDEFCRCELKLQKWYGDLRGKPFAIEAENSILDISGFSKQYNCAFIWQKDGVKKLNLYLIINYFKGGKLRFKKIKPEAFEANRFYTVINKKSGEIVPMEVNFNFDDPNLIILPLAFGKRQGREFIWNDLLSLETGSLKLANGRVIEKTLYNRRTRQDEPALFVALTFERREVLDSSNIKTPMNLIGVDRGENIPAVIALTDPEGCPLSRFKDSLGNPTHILRIGESYKEKQRTIQAKKEVEQRRAGGYSRKYASKAKNLADDMVRNTARDLLYYAVTQDAMLIFENLSRGFGRQGKRTFMAERQYTRMEDWLTAKLAYEGLPSKTYLSKTLAQYTSKTCSNCGFTITSADYDRVLEKLKKTATGWMTTINGKELKVEGQITYYNRYKRQNVVKDLSVELDRLSEESVNNDISSWTKGRSGEALSLLKKRFSHRPVQEKFVCLNCGFETHADEQAALNIARSWLFLRSQEYKKYQTNKTTGNTDKRAFVETWQSFYRKKLKEVWKPAV

SEQ ID NO: 36312 - protein, 978 aa, synthetic construct
  REGION 1..978: note = engineered CasX variant
QEIKRINKIRRRLVKDSNTKKAGKTGPMKTLLVRVMTPDLRERLENLRKKPENIPQPISNTSRANLNKLLTDYTEMKKAILHVYWEEFQKDPVGLMSRVAQPASKKIDQNKLKPEMDEKGNLTTAGFACSQCGQPLFVYKLEQVSEKGKAYTNYFGRCNVAEHEKLILLAQLKPEKDSDEAVTYSLGKFGQRALDFYSIHVTKESTHPVKPLAQIAGNRYASPVGKALSDACMGTIASFLSKYQDIIIEHQKVVKGNQKRLESLRELAGKENLEYPSVTLPPQPHTKEGVDAYNEVIARVRWWVNLNLWQKLKLSRDDAKPLLRLKGFPSFPLVERQANEVDWWDMVCNVKKLINEKKEDGKVFWQNLAGYKRQEALRPYLSSEEDRKKGKKFARYQLGDLLLHLEKKHGEDWGKVYDEAWERIDKKVEGLSKHIKLEEERRSEDAQSKAALTDWLRAKASFVIEGLKEADKDEFCRCELKLQKWYGDLRGKPFAIEAENSILDISGFSKQYNCAFIWQKDGVKKLNLYLIINYFKGGKLRFKKIKPEAFEANRFYTVINKKSGEIVPMEVNFNFDDPNLIILPLAFGKRQGREFIWNDLLSLETGSLKLANGRVIEKTLYNRRTRQDEPALFVALTFERREVLDSSNIKTPMNLIGVDRGENIPAVIALTDPEGCPLSRFKDSLGNPTHILRIGESYKEKQRTIQAKKEVEQRRAGGYSRKYASKAKNLADDMVRNTARDLLYYAVTQDAMLIFENLSRGFGRQGKRTFMAERQYTRMEDWLTAKLAYEGLPSKTYLSKTLAQYTSKTCSNCGFTITSADYDRVLEKLKKTATGWMTTINGKELKVEGQITYYNRYKRQNVVKDLSVELDRLSEESVNNDISSWTKGRSGEALSLLKKRFSHRPVQEKFVCLNCGFETHADEQAALNIARSWLFLRSQEYKKYQTNKTTGNTDKRAFVETWQSFYRKKLKEVWKPAV

SEQ ID NO: 36313 - protein, 979 aa, synthetic construct
  REGION 1..979: note = engineered CasX variant
QEIKRINKIRRRLVKDSNTKKAGKTGPMKTLLVRVMTPDLRERLENLRKKPENIPQPISNTSRANLNKLLTDYTEMKKAILHVYWEEFQKDPVGLMSRVAQPASKKIDQNKLKPEMDEKGNLTTAGFACSQCGQPLFVYKLEQVSEKGKAYTNYFGRCNVAEHEKLILLAQLKPEKDSDEAVTYSLGKFGQRALDFYSIHVTKESTHPVKPLAQIAGNRYASYPVGKALSDACMGTIASFLSKYQDIIIEHQKVVKGNQKRLESLRELAGKENLEYPSVTLPPQPHTKEGVDAYNEVIARVRWWVNLNLWQKLKLSRDDAKPLLRLKGFPSFPLVERQANEVDWWDMVCNVKKLINEKKEDGKVFWQNLAGYKRQEALRPYLSSEEDRKKGKKFARYQLGDLLLHLEKKHGEDWGKVYDEAWERIDKKVEGLSKHIKLEEERRSEDAQSKAALTDWLRAKASFVIEGLKEADKDEFCRCELKLQKWYGDLRGKPFAIEAENSILDISGFSKQYNCAFIWQKDGVKKLNLYLIINYFKGGKLRFKKIKPEAFEANRFYTVINKKSGEIVPMEVNFNFDDPNLIILPLAFGKRQGREFIWNDLLSLETGSLKLANGRVIEKTLYNRRTRQDEPALFVALTFERREVLDSSNIKPMSNLIGVDRGENIPAVIALTDPEGCPLSRFKDSLGNPTHILRIGESYKEKQRTIQAKKEVEQRRAGGYSRKYASKAKNLADDMVRNTARDLLYYAVTQDAMLIFENLSRGFGRQGKRTFMAERQYTRMEDWLTAKLAYEGLPSKTYLSKTLAQYTSKTCSNCGFTITSADYDRVLEKLKKTATGWMTTINGKELKVEGQITYYNRYKRQNVVKDLSVELDRLSEESVNNDISSWTKGRSGEALSLLKKRFSHRPVQEKFVCLNCGFETHADEQAALNIARSWLFLRSQEYKKYQTNKTTGNTDKRAFVETWQSFYRKKLKEVWKPAV

SEQ ID NO: 36314 - protein, 979 aa, synthetic construct
  REGION 1..979: note = engineered CasX variant
QEIKRINKIRRRLVKDSNTKKAGKTGPMKTLLVRVMTPDLRERLENLRKKPENIPQPISNTSRANLNKLLTDYTEMKKAILHVYWEEFQKDPVGLMSRVAQPASKKIDQNKLKPEMDEKGNLTTAGFACSQCGQPLFVYKLEQVSEKGKAYTNYFGRCNVAEHEKLILLAQLKPEKDSDEAVTYSLGKFGQRALDFYSIHVTKESTHPVKPLAQIAGNRYASHPVGKALSDACMGTIASFLSKYQDIIIEHQKVVKGNQKRLESLRELAGKENLEYPSVTLPPQPHTKEGVDAYNEVIARVRWWVNLNLWQKLKLSRDDAKPLLRLKGFPSFPLVERQANEVDWWDMVCNVKKLINEKKEDGKVFWQNLAGYKRQEALRPYLSSEEDRKKGKKFARYQLGDLLLHLEKKHGEDWGKVYDEAWERIDKKVEGLSKHIKLEEERRSEDAQSKAALTDWLRAKASFVIEGLKEADKDEFCRCELKLQKWYGDLRGKPFAIEAENSILDISGFSKQYNCAFIWQKDGVKKLNLYLIINYFKGGKLRFKKIKPEAFEANRFYTVINKKSGEIVPMEVNFNFDDPNLIILPLAFGKRQGREFIWNDLLSLETGSLKLANGRVIEKTLYNRRTRQDEPALFVALTFERREVLDSSNIKPMSNLIGVDRGENIPAVIALTDPEGCPLSRFKDSLGNPTHILRIGESYKEKQRTIQAKKEVEQRRAGGYSRKYASKAKNLADDMVRNTARDLLYYAVTQDAMLIFENLSRGFGRQGKRTFMAERQYTRMEDWLTAKLAYEGLPSKTYLSKTLAQYTSKTCSNCGFTITSADYDRVLEKLKKTATGWMTTINGKELKVEGQITYYNRYKRQNVVKDLSVELDRLSEESVNNDISSWTKGRSGEALSLLKKRFSHRPVQEKFVCLNCGFETHADEQAALNIARSWLFLRSQEYKKYQTNKTTGNTDKRAFVETWQSFYRKKLKEVWKPAV

SEQ ID NO: 36315 - protein, 979 aa, synthetic construct
  REGION 1..979: note = engineered CasX variant
QEIKRINKIRRRLVKDSNTKKAGKTGPMKTLLVRVMTPDLRERLENLRKKPENIPQPISNTSRANLNKLLTDYTEMKKAILHVYWEEFQKDPVGLMSRVAQPASKKIDQNKLKPEMDEKGNLTTAGFACSQCGQPLFVYKLEQVSEKGKAYTNYFGRCNVAEHEKLILLAQLKPEKDSDEAVTYSLGKFGQRALDFYSIHVTKESTHPVKPLAQIAGNRYASSPVGKALSDACMGTIASFLSKYQDIIIEHQKVVKGNQKRLESLRELAGKENLEYPSVTLPPQPHTKEGVDAYNEVIARVRWWVNLNLWQKLKLSRDDAKPLLRLKGFPSFPLVERQANEVDWWDMVCNVKKLINEKKEDGKVFWQNLAGYKRQEALRPYLSSEEDRKKGKKFARYQLGDLLLHLEKKHGEDWGKVYDEAWERIDKKVEGLSKHIKLEEERRSEDAQSKAALTDWLRAKASFVIEGLKEADKDEFCRCELKLQKWYGDLRGKPFAIEAENSILDISGFSKQYNCAFIWQKDGVKKLNLYLIINYFKGGKLRFKKIKPEAFEANRFYTVINKKSGEIVPMEVNFNFDDPNLIILPLAFGKRQGREFIWNDLLSLETGSLKLANGRVIEKTLYNRRTRQDEPALFVALTFERREVLDSSNIKPMSNLIGVDRGENIPAVIALTDPEGCPLSRFKDSLGNPTHILRIGESYKEKQRTIQAKKEVEQRRAGGYSRKYASKAKNLADDMVRNTARDLLYYAVTQDAMLIFENLSRGFGRQGKRTFMAERQYTRMEDWLTAKLAYEGLPSKTYLSKTLAQYTSKTCSNCGFTITSADYDRVLEKLKKTATGWMTTINGKELKVEGQITYYNRYKRQNVVKDLSVELDRLSEESVNNDISSWTKGRSGEALSLLKKRFSHRPVQEKFVCLNCGFETHADEQAALNIARSWLFLRSQEYKKYQTNKTTGNTDKRAFVETWQSFYRKKLKEVWKPAV

SEQ ID NO: 36316 - protein, 979 aa, synthetic construct
  REGION 1..979: note = engineered CasX variant
QEIKRINKIRRRLVKDSNTKKAGKTGPMKTLLVRVMTPDLRERLENLRKKPENIPQPISNTSRANLNKLLTDYTEMKKAILHVYWEEFQKDPVGLMSRVAQPASKKIDQNKLKPEMDEKGNLTTAGFACSQCGQPLFVYKLEQVSEKGKAYTNYFGRCNVAEHEKLILLAQLKPEKDSDEAVTYSLGKFGQRALDFYSIHVTKESTHPVKPLAQIAGNRYASTPVGKALSDACMGTIASFLSKYQDIIIEHQKVVKGNQKRLESLRELAGKENLEYPSVTLPPQPHTKEGVDAYNEVIARVRWWVNLNLWQKLKLSRDDAKPLLRLKGFPSFPLVERQANEVDWWDMVCNVKKLINEKKEDGKVFWQNLAGYKRQEALRPYLSSEEDRKKGKKFARYQLGDLLLHLEKKHGEDWGKVYDEAWERIDKKVEGLSKHIKLEEERRSEDAQSKAALTDWLRAKASFVIEGLKEADKDEFCRCELKLQKWYGDLRGKPFAIEAENSILDISGFSKQYNCAFIWQKDGVKKLNLYLIINYFKGGKLRFKKIKPEAFEANRFYTVINKKSGEIVPMEVNFNFDDPNLIILPLAFGKRQGREFIWNDLLSLETGSLKLANGRVIEKTLYNRRTRQDEPALFVALTFERREVLDSSNIKPMSNLIGVDRGENIPAVIALTDPEGCPLSRFKDSLGNPTHILRIGESYKEKQRTIQAKKEVEQRRAGGYSRKYASKAKNLADDMVRNTARDLLYYAVTQDAMLIFENLSRGFGRQGKRTFMAERQYTRMEDWLTAKLAYEGLPSKTYLSKTLAQYTSKTCSNCGFTITSADYDRVLEKLKKTATGWMTTINGKELKVEGQITYYNRYKRQNVVKDLSVELDRLSEESVNNDISSWTKGRSGEALSLLKKRFSHRPVQEKFVCLNCGFETHADEQAALNIARSWLFLRSQEYKKYQTNKTTGNTDKRAFVETWQSFYRKKLKEVWKPAV

SEQ ID NO: 36317 - protein, 979 aa, synthetic construct
  REGION 1..979: note = engineered CasX variant
QEIKRINKIRRRLVKDSNTKKAGKTGPMKTLLVRVMTPDLRERLENLRKKPENIPQPISNTSRANLNKLLTDYTEMKKAILHVYWEEFQKDPVGLMSRVAQPASKKIDQNKLKPEMDEKGNLTTAGFACSQCGQPLFVYKLEQVSEKGKAYTNYFGRCNVAEHEKLILLAQLKPEKDSDEAVTYSLGKFGQRALDFYSIHVTKESTHPVKPLAQIAGNRYASAPVGKALSDACMGTIASFLSKYQDIIIEHQKVVKGNQKRLESLRELAGKENLEYPSVTLPPQPHTKEGVDAYNEVIARVRWWVNLNLWQKLKLSRDDAKPLLRLKGFPSFPLVERQANEVDWWDMVCNVKKLINEKKEDGKVFWQNLAGYKRQEALRPYLSSEEDRKKGKKFARYQLGDLLLHLEKKHGEDWGKVYDEAWERIDKKVEGLSKHIKLEEERRSEDAQSKAALTDWLRAKASFVIEGLKEADKDEFCRCELKLQKWYGDLRGKPFAIEAENSILDISGFSKQYNCAFIWQKDGVKKLNLYLIINYFKGGKLRFKKIKPEAFEANRFYTVINKKSGEIVPMEVNFNFDDPNLIILPLAFGKRQGREFIWNDLLSLETGSLKLANGRVIEKTLYNRRTRQDEPALFVALTFERREVLDSSNIKPMSNLIGVDRGENIPAVIALTDPEGCPLSRFKDSLGNPTHILRIGESYKEKQRTIQAKKEVEQRRAGGYSRKYASKAKNLADDMVRNTARDLLYYAVTQDAMLIFENLSRGFGRQGKRTFMAERQYTRMEDWLTAKLAYEGLPSKTYLSKTLAQYTSKTCSNCGFTITSADYDRVLEKLKKTATGWMTTINGKELKVEGQITYYNRYKRQNVVKDLSVELDRLSEESVNNDISSWTKGRSGEALSLLKKRFSHRPVQEKFVCLNCGFETHADEQAALNIARSWLFLRSQEYKKYQTNKTTGNTDKRAFVETWQSFYRKKLKEVWKPAV

SEQ ID NO: 36318 - protein, 979 aa, synthetic construct
  REGION 1..979: note = engineered CasX variant
QEIKRINKIRRRLVKDSNTKKAGKTGPMKTLLVRVMTPDLRERLENLRKKPENIPQPISNTSRANLNKLLTDYTEMKKAILHVYWEEFQKDPVGLMSRVAQPASKKIDQNKLKPEMDEKGNLTTAGFACSQCGQPLFVYKLEQVSEKGKAYTNYFGRCNVAEHEKLILLAQLKPEKDSDEAVTYSLGKFGQRALDFYSIHVTKESTHPVKPLAQIAGNRYASVPVGKALSDACMGTIASFLSKYQDIIIEHQKVVKGNQKRLESLRELAGKENLEYPSVTLPPQPHTKEGVDAYNEVIARVRWWVNLNLWQKLKLSRDDAKPLLRLKGFPSFPLVERQANEVDWWDMVCNVKKLINEKKEDGKVFWQNLAGYKRQEALRPYLSSEEDRKKGKKFARYQLGDLLLHLEKKHGEDWGKVYDEAWERIDKKVEGLSKHIKLEEERRSEDAQSKAALTDWLRAKASFVIEGLKEADKDEFCRCELKLQKWYGDLRGKPFAIEAENSILDISGFSKQYNCAFIWQKDGVKKLNLYLIINYFKGGKLRFKKIKPEAFEANRFYTVINKKSGEIVPMEVNFNFDDPNLIILPLAFGKRQGREFIWNDLLSLETGSLKLANGRVIEKTLYNRRTRQDEPALFVALTFERREVLDSSNIKPMSNLIGVDRGENIPAVIALTDPEGCPLSRFKDSLGNPTHILRIGESYKEKQRTIQAKKEVEQRRAGGYSRKYASKAKNLADDMVRNTARDLLYYAVTQDAMLIFENLSRGFGRQGKRTFMAERQYTRMEDWLTAKLAYEGLPSKTYLSKTLAQYTSKTCSNCGFTITSADYDRVLEKLKKTATGWMTTINGKELKVEGQITYYNRYKRQNVVKDLSVELDRLSEESVNNDISSWTKGRSGEALSLLKKRFSHRPVQEKFVCLNCGFETHADEQAALNIARSWLFLRSQEYKKYQTNKTTGNTDKRAFVETWQSFYRKKLKEVWKPAV

SEQ ID NO: 36319 - protein, 979 aa, synthetic construct
  REGION 1..979: note = engineered CasX variant
QEIKRINKIRRRLVKDSNTKKAGKTGPMKTLLVRVMTPDLRERLENLRKKPENIPQPISNTSRANLNKLLTDYTEMKKAILHVYWEEFQKDPVGLMSRVAQPASKKIDQNKLKPEMDEKGNLTTAGFACSQCGQPLFVYKLEQVSEKGKAYTNYFGRCNVAEHEKLIKLAQLKPEKDSDEAVTYSLGKFGQRALDFYSIHVTKESTHPVKPLAQIAGNRYASGPVGKALSDACMGTIASFLSKYQDIIIEHQKVVKGNQKRLESLRELAGKENLEYPSVTLPPQPHTKEGVDAYNEVIARVRWWVNLNLWQKLKLSRDDAKPLLRLKGFPSFPLVERQANEVDWWDMVCNVKKLINEKKEDGKVFWQNLAGYKRQEALRPYLSSEEDRKKGKKFARYQLGDLLLHLEKKHGEDWGKVYDEAWERIDKKVEGLSKHIKLEEERRSEDAQSKAALTDWLRAKASFVIEGLKEADKDEFCRCELKLQKWYGDLRGKPFAIEAENSILDISGFSKQYNCAFIWQKDGVKKLNLYLIINYFKGGKLRFKKIKPEAFEANRFYTVINKKSGEIVPMEVNFNFDDPNLIILPLAFGKRQGREFIWNDLLSLETGSLKLANGRVIEKTLYNRRTRQDEPALFVALTFERREVLDSSNIKPMSNLIGVDRGENIPAVIALTDPEGCPLSRFKDSLGNPTHILRIGESYKEKQRTIQAKKEVEQRRAGGYSRKYASKAKNLADDMVRNTARDLLYYAVTQDAMLIFENLSRGFGRQGKRTFMAERQYTRMEDWLTAKLAYEGLPSKTYLSKTLAQYTSKTCSNCGFTITSADYDRVLEKLKKTATGWMTTINGKELKVEGQITYYNRYKRQNVVKDLSVELDRLSEESVNNDISSWTKGRSGEALSLLKKRFSHRPVQEKFVCLNCGFETHADEQAALNIARSWLFLRSQEYKKYQTNKTTGNTDKRAFVETWQSFYRKKLKEVWKPAV

SEQ ID NO: 36320 - protein, 978 aa, synthetic construct
  REGION 1..978: note = engineered CasX variant
QEIKRINKIRRRLVKDSNTKKAGKTGPMKTLLVRVMTPDLRERLENLRKKPENIPQPISNTSRANLNKLLTDYTEMKKAILHVYWEEFQKDPVGLMSRVAQPASKKIDQNKLKPEMDEKGNLTTAGFACSQCGQPLFVYKLEQVSEKGKAYTNYFGRCNVAEHEKLILLAQLKPEKDSDEAVTYSLGKFGQRALDFYSIHVTKESTHPVKPLAQIAGNRYASPVGKALSDACMGTIASFLSKYQDIIIEHQKVVKGNQKRLESLRELAGKENLEYPSVTLPPQPHTKEGVDAYNEVIARVRWWVNLNLWQKLKLSRDDAKPLLRLKGFPSFPLVERQANEVDWWDMVCNVKKLINEKKEDGKVFWQNLAGYKRQEALRPYLSSEEDRKKGKKFARYQLGDLLLHLEKKHGEDWGKVYDEAWERIDKKVEGLSKHIKLEEERRSEDAQSKAALTDWLRAKASFVIEGLKEADKDEFCRCELKLQKWYGDLRGKPFAIEAENSILDISGFSKQYNCAFIWQKDGVKKLNLYLIINYFKGGKLRFKKIKPEAFEANRFYTVINKKSGEIVPMEVNFNFDDPNLIILPLAFGKRQGREFIWNDLLSLETGSLKLANGRVIEKTLYNRRTRQDEPALFVALTFERREVLDSSNIKPMSNLIGVDRGENIPAVIALTDPEGCPLSRFKDSLGNPTHILRIGESYKEKQRTIQAKKEVEQRRAGGYSRKYASKAKNLADDMVRNTARDLLYYAVTQDAMLIFENLSRGFGRQGKRTFMAERQYTRMEDWLTAKLAYEGLPSKTYLSKTLAQYTSKTCSNCGFTITSADYDRVLEKLKKTATGWMTTINGKELKVEGQITYYNRYKRQNVVKDLSVELDRLSEESVNNDISSWTKGRSGEALSLLKKRFSHRPVQEKFVCLNCGFETHADEQAALNIARSWLFLRSQEYKKYQTNKTTGNTDKRAFVETWQSFYRKKLKEVWKPAV

SEQ ID NO: 36321 - protein, 978 aa, synthetic construct
  REGION 1..978: note = engineered CasX variant
QEIKRINKIRRRLVKDSNTKKAGKTGPMKTLLVRVMTPDLRERLENLRKKPENIPQPISNTSRANLNKLLTDYTEMKKAILHVYWEEFQKDPVGLMSRVAQPASKKIDQNKLKPEMDEKGNLTTAGFACSQCGQPLFVYKLEQVSEKGKAYTNYFGRCNVAEHEKLILLAQLKPEKDSDEAVTYSLGKFGQRALDFYSIHVTKESTHPVKPLAQIAGNRYASYPVGKALSDACMGTIASFLSKYQDIIIEHQKVVKGNQKRLESLRELAGKENLEYPSVTLPPQPHTKEGVDAYNEVIARVRWWVNLNLWQKLKLSRDDAKPLLRLKGFPSFPLVERQANEVDWWDMVCNVKKLINEKKEDGKVFWQNLAGYKRQEALRPYLSSEEDRKKGKKFARYQLGDLLLHLEKKHGEDWGKVYDEAWERIDKKVEGLSKHIKLEEERRSEDAQSKAALTDWLRAKASFVIEGLKEADKDEFCRCELKLQKWYGDLRGKPFAIEAENSILDISGFSKQYNCAFIWQKDGVKKLNLYLIINYFKGGKLRFKKIKPEAFEANRFYTVINKKSGEIVPMEVNFNFDDPNLIILPLAFGKRQGREFIWNDLLSLETGSLKLANGRVIEKTLYNRRTRQDEPALFVALTFERREVLDSSNIKPMNLIGVDRGENIPAVIALTDPEGCPLSRFKDSLGNPTHILRIRESYKEKQRTIQAKKEVEQRRAGGYSRKYASKAKNLADDMVRNTARDLLYYAVTQDAMLIFENLSRGFGRQGKRTFMAERQYTRMEDWLTAKLAYEGLPSKTYLSKTLAQYTSKTCSNCGFTITSADYDRVLEKLKKTATGWMTTINGKELKVEGQITYYNRYKRQNVVKDLSVELDRLSEESVNNDISSWTKGRSGEALSLLKKRFSHRPVQEKFVCLNCGFETHADEQAALNIARSWLFLRSQEYKKYQTNKTTGNTDKRAFVETWQSFYRKKLKEVWKPAV

SEQ ID NO: 36322 - protein, 978 aa, synthetic construct
  REGION 1..978: note = engineered CasX variant
QEIKRINKIRRRLVKDSNTKKAGKTGPMKTLLVRVMTPDLRERLENLRKKPENIPQPISNTSRANLNKLLTDYTEMKKAILHVYWEEFQKDPVGLMSRVAQPASKKIDQNKLKPEMDEKGNLTTAGFACSQCGQPLFVYKLEQVSEKGKAYTNYFGRCNVAEHEKLILLAQLKPEKDSDEAVTYSLGKFGQRALDFYSIHVTKESTHPVKPLAQIAGNRYASHPVGKALSDACMGTIASFLSKYQDIIIEHQKVVKGNQKRLESLRELAGKENLEYPSVTLPPQPHTKEGVDAYNEVIARVRWWVNLNLWQKLKLSRDDAKPLLRLKGFPSFPLVERQANEVDWWDMVCNVKKLINEKKEDGKVFWQNLAGYKRQEALRPYLSSEEDRKKGKKFARYQLGDLLLHLEKKHGEDWGKVYDEAWERIDKKVEGLSKHIKLEEERRSEDAQSKAALTDWLRAKASFVIEGLKEADKDEFCRCELKLQKWYGDLRGKPFAIEAENSILDISGFSKQYNCAFIWQKDGVKKLNLYLIINYFKGGKLRFKKIKPEAFEANRFYTVINKKSGEIVPMEVNFNFDDPNLIILPLAFGKRQGREFIWNDLLSLETGSLKLANGRVIEKTLYNRRTRQDEPALFVALTFERREVLDSSNIKPMNLIGVDRGENIPAVIALTDPEGCPLSRFKDSLGNPTHILRIRESYKEKQRTIQAKKEVEQRRAGGYSRKYASKAKNLADDMVRNTARDLLYYAVTQDAMLIFENLSRGFGRQGKRTFMAERQYTRMEDWLTAKLAYEGLPSKTYLSKTLAQYTSKTCSNCGFTITSADYDRVLEKLKKTATGWMTTINGKELKVEGQITYYNRYKRQNVVKDLSVELDRLSEESVNNDISSWTKGRSGEALSLLKKRFSHRPVQEKFVCLNCGFETHADEQAALNIARSWLFLRSQEYKKYQTNKTTGNTDKRAFVETWQSFYRKKLKEVWKPAV

SEQ ID NO: 36323 - protein, 978 aa, synthetic construct
  REGION 1..978: note = engineered CasX variant
QEIKRINKIRRRLVKDSNTKKAGKTGPMKTLLVRVMTPDLRERLENLRKKPENIPQPISNTSRANLNKLLTDYTEMKKAILHVYWEEFQKDPVGLMSRVAQPASKKIDQNKLKPEMDEKGNLTTAGFACSQCGQPLFVYKLEQVSEKGKAYTNYFGRCNVAEHEKLILLAQLKPEKDSDEAVTYSLGKFGQRALDFYSIHVTKESTHPVKPLAQIAGNRYASSPVGKALSDACMGTIASFLSKYQDIIIEHQKVVKGNQKRLESLRELAGKENLEYPSVTLPPQPHTKEGVDAYNEVIARVRWWVNLNLWQKLKLSRDDAKPLLRLKGFPSFPLVERQANEVDWWDMVCNVKKLINEKKEDGKVFWQNLAGYKRQEALRPYLSSEEDRKKGKKFARYQLGDLLLHLEKKHGEDWGKVYDEAWERIDKKVEGLSKHIKLEEERRSEDAQSKAALTDWLRAKASFVIEGLKEADKDEFCRCELKLQKWYGDLRGKPFAIEAENSILDISGFSKQYNCAFIWQKDGVKKLNLYLIINYFKGGKLRFKKIKPEAFEANRFYTVINKKSGEIVPMEVNFNFDDPNLIILPLAFGKRQGREFIWNDLLSLETGSLKLANGRVIEKTLYNRRTRQDEPALFVALTFERREVLDSSNIKPMNLIGVDRGENIPAVIALTDPEGCPLSRFKDSLGNPTHILRIRESYKEKQRTIQAKKEVEQRRAGGYSRKYASKAKNLADDMVRNTARDLLYYAVTQDAMLIFENLSRGFGRQGKRTFMAERQYTRMEDWLTAKLAYEGLPSKTYLSKTLAQYTSKTCSNCGFTITSADYDRVLEKLKKTATGWMTTINGKELKVEGQITYYNRYKRQNVVKDLSVELDRLSEESVNNDISSWTKGRSGEALSLLKKRFSHRPVQEKFVCLNCGFETHADEQAALNIARSWLFLRSQEYKKYQTNKTTGNTDKRAFVETWQSFYRKKLKEVWKPAV

SEQ ID NO: 36324 - protein, 978 aa, synthetic construct
  REGION 1..978: note = engineered CasX variant
QEIKRINKIRRRLVKDSNTKKAGKTGPMKTLLVRVMTPDLRERLENLRKKPENIPQPISNTSRANLNKLLTDYTEMKKAILHVYWEEFQKDPVGLMSRVAQPASKKIDQNKLKPEMDEKGNLTTAGFACSQCGQPLFVYKLEQVSEKGKAYTNYFGRCNVAEHEKLILLAQLKPEKDSDEAVTYSLGKFGQRALDFYSIHVTKESTHPVKPLAQIAGNRYASTPVGKALSDACMGTIASFLSKYQDIIIEHQKVVKGNQKRLESLRELAGKENLEYPSVTLPPQPHTKEGVDAYNEVIARVRWWVNLNLWQKLKLSRDDAKPLLRLKGFPSFPLVERQANEVDWWDMVCNVKKLINEKKEDGKVFWQNLAGYKRQEALRPYLSSEEDRKKGKKFARYQLGDLLLHLEKKHGEDWGKVYDEAWERIDKKVEGLSKHIKLEEERRSEDAQSKAALTDWLRAKASFVIEGLKEADKDEFCRCELKLQKWYGDLRGKPFAIEAENSILDISGFSKQYNCAFIWQKDGVKKLNLYLIINYFKGGKLRFKKIKPEAFEANRFYTVINKKSGEIVPMEVNFNFDDPNLIILPLAFGKRQGREFIWNDLLSLETGSLKLANGRVIEKTLYNRRTRQDEPALFVALTFERREVLDSSNIKPMNLIGVDRGENIPAVIALTDPEGCPLSRFKDSLGNPTHILRIRESYKEKQRTIQAKKEVEQRRAGGYSRKYASKAKNLADDMVRNTARDLLYYAVTQDAMLIFENLSRGFGRQGKRTFMAERQYTRMEDWLTAKLAYEGLPSKTYLSKTLAQYTSKTCSNCGFTITSADYDRVLEKLKKTATGWMTTINGKELKVEGQITYYNRYKRQNVVKDLSVELDRLSEESVNNDISSWTKGRSGEALSLLKKRFSHRPVQEKFVCLNCGFETHADEQAALNIARSWLFLRSQEYKKYQTNKTTGNTDKRAFVETWQSFYRKKLKEVWKPAV

SEQ ID NO: 36325 - protein, 978 aa, synthetic construct
  REGION 1..978: note = engineered CasX variant
QEIKRINKIRRRLVKDSNTKKAGKTGPMKTLLVRVMTPDLRERLENLRKKPENIPQPISNTSRANLNKLLTDYTEMKKAILHVYWEEFQKDPVGLMSRVAQPASKKIDQNKLKPEMDEKGNLTTAGFACSQCGQPLFVYKLEQVSEKGKAYTNYFGRCNVAEHEKLILLAQLKPEKDSDEAVTYSLGKFGQRALDFYSIHVTKESTHPVKPLAQIAGNRYASAPVGKALSDACMGTIASFLSKYQDIIIEHQKVVKGNQKRLESLRELAGKENLEYPSVTLPPQPHTKEGVDAYNEVIARVRWWVNLNLWQKLKLSRDDAKPLLRLKGFPSFPLVERQANEVDWWDMVCNVKKLINEKKEDGKVFWQNLAGYKRQEALRPYLSSEEDRKKGKKFARYQLGDLLLHLEKKHGEDWGKVYDEAWERIDKKVEGLSKHIKLEEERRSEDAQSKAALTDWLRAKASFVIEGLKEADKDEFCRCELKLQKWYGDLRGKPFAIEAENSILDISGFSKQYNCAFIWQKDGVKKLNLYLIINYFKGGKLRFKKIKPEAFEANRFYTVINKKSGEIVPMEVNFNFDDPNLIILPLAFGKRQGREFIWNDLLSLETGSLKLANGRVIEKTLYNRRTRQDEPALFVALTFERREVLDSSNIKPMNLIGVDRGENIPAVIALTDPEGCPLSRFKDSLGNPTHILRIRESYKEKQRTIQAKKEVEQRRAGGYSRKYASKAKNLADDMVRNTARDLLYYAVTQDAMLIFENLSRGFGRQGKRTFMAERQYTRMEDWLTAKLAYEGLPSKTYLSKTLAQYTSKTCSNCGFTITSADYDRVLEKLKKTATGWMTTINGKELKVEGQITYYNRYKRQNVVKDLSVELDRLSEESVNNDISSWTKGRSGEALSLLKKRFSHRPVQEKFVCLNCGFETHADEQAALNIARSWLFLRSQEYKKYQTNKTTGNTDKRAFVETWQSFYRKKLKEVWKPAV

SEQ ID NO: 36326 - protein, 978 aa, synthetic construct
  REGION 1..978: note = engineered CasX variant
QEIKRINKIRRRLVKDSNTKKAGKTGPMKTLLVRVMTPDLRERLENLRKKPENIPQPISNTSRANLNKLLTDYTEMKKAILHVYWEEFQKDPVGLMSRVAQPASKKIDQNKLKPEMDEKGNLTTAGFACSQCGQPLFVYKLEQVSEKGKAYTNYFGRCNVAEHEKLILLAQLKPEKDSDEAVTYSLGKFGQRALDFYSIHVTKESTHPVKPLAQIAGNRYASVPVGKALSDACMGTIASFLSKYQDIIIEHQKVVKGNQKRLESLRELAGKENLEYPSVTLPPQPHTKEGVDAYNEVIARVRWWVNLNLWQKLKLSRDDAKPLLRLKGFPSFPLVERQANEVDWWDMVCNVKKLINEKKEDGKVFWQNLAGYKRQEALRPYLSSEEDRKKGKKFARYQLGDLLLHLEKKHGEDWGKVYDEAWERIDKKVEGLSKHIKLEEERRSEDAQSKAALTDWLRAKASFVIEGLKEADKDEFCRCELKLQKWYGDLRGKPFAIEAENSILDISGFSKQYNCAFIWQKDGVKKLNLYLIINYFKGGKLRFKKIKPEAFEANRFYTVINKKSGEIVPMEVNFNFDDPNLIILPLAFGKRQGREFIWNDLLSLETGSLKLANGRVIEKTLYNRRTRQDEPALFVALTFERREVLDSSNIKPMNLIGVDRGENIPAVIALTDPEGCPLSRFKDSLGNPTHILRIRESYKEKQRTIQAKKEVEQRRAGGYSRKYASKAKNLADDMVRNTARDLLYYAVTQDAMLIFENLSRGFGRQGKRTFMAERQYTRMEDWLTAKLAYEGLPSKTYLSKTLAQYTSKTCSNCGFTITSADYDRVLEKLKKTATGWMTTINGKELKVEGQITYYNRYKRQNVVKDLSVELDRLSEESVNNDISSWTKGRSGEALSLLKKRFSHRPVQEKFVCLNCGFETHADEQAALNIARSWLFLRSQEYKKYQTNKTTGNTDKRAFVETWQSFYRKKLKEVWKPAV

SEQ ID NO: 36327 - protein, 978 aa, synthetic construct
  REGION 1..978: note = engineered CasX variant
QEIKRINKIRRRLVKDSNTKKAGKTGPMKTLLVRVMTPDLRERLENLRKKPENIPQPISNTSRANLNKLLTDYTEMKKAILHVYWEEFQKDPVGLMSRVAQPASKKIDQNKLKPEMDEKGNLTTAGFACSQCGQPLFVYKLEQVSEKGKAYTNYFGRCNVAEHEKLIKLAQLKPEKDSDEAVTYSLGKFGQRALDFYSIHVTKESTHPVKPLAQIAGNRYASGPVGKALSDACMGTIASFLSKYQDIIIEHQKVVKGNQKRLESLRELAGKENLEYPSVTLPPQPHTKEGVDAYNEVIARVRWWVNLNLWQKLKLSRDDAKPLLRLKGFPSFPLVERQANEVDWWDMVCNVKKLINEKKEDGKVFWQNLAGYKRQEALRPYLSSEEDRKKGKKFARYQLGDLLLHLEKKHGEDWGKVYDEAWERIDKKVEGLSKHIKLEEERRSEDAQSKAALTDWLRAKASFVIEGLKEADKDEFCRCELKLQKWYGDLRGKPFAIEAENSILDISGFSKQYNCAFIWQKDGVKKLNLYLIINYFKGGKLRFKKIKPEAFEANRFYTVINKKSGEIVPMEVNFNFDDPNLIILPLAFGKRQGREFIWNDLLSLETGSLKLANGRVIEKTLYNRRTRQDEPALFVALTFERREVLDSSNIKPMNLIGVDRGENIPAVIALTDPEGCPLSRFKDSLGNPTHILRIRESYKEKQRTIQAKKEVEQRRAGGYSRKYASKAKNLADDMVRNTARDLLYYAVTQDAMLIFENLSRGFGRQGKRTFMAERQYTRMEDWLTAKLAYEGLPSKTYLSKTLAQYTSKTCSNCGFTITSADYDRVLEKLKKTATGWMTTINGKELKVEGQITYYNRYKRQNVVKDLSVELDRLSEESVNNDISSWTKGRSGEALSLLKKRFSHRPVQEKFVCLNCGFETHADEQAALNIARSWLFLRSQEYKKYQTNKTTGNTDKRAFVETWQSFYRKKLKEVWKPAV

SEQ ID NO: 36328 - protein, 977 aa, synthetic construct
  REGION 1..977: note = engineered CasX variant
QEIKRINKIRRRLVKDSNTKKAGKTGPMKTLLVRVMTPDLRERLENLRKKPENIPQPISNTSRANLNKLLTDYTEMKKAILHVYWEEFQKDPVGLMSRVAQPASKKIDQNKLKPEMDEKGNLTTAGFACSQCGQPLFVYKLEQVSEKGKAYTNYFGRCNVAEHEKLILLAQLKPEKDSDEAVTYSLGKFGQRALDFYSIHVTKESTHPVKPLAQIAGNRYASPVGKALSDACMGTIASFLSKYQDIIIEHQKVVKGNQKRLESLRELAGKENLEYPSVTLPPQPHTKEGVDAYNEVIARVRWWVNLNLWQKLKLSRDDAKPLLRLKGFPSFPLVERQANEVDWWDMVCNVKKLINEKKEDGKVFWQNLAGYKRQEALRPYLSSEEDRKKGKKFARYQLGDLLLHLEKKHGEDWGKVYDEAWERIDKKVEGLSKHIKLEEERRSEDAQSKAALTDWLRAKASFVIEGLKEADKDEFCRCELKLQKWYGDLRGKPFAIEAENSILDISGFSKQYNCAFIWQKDGVKKLNLYLIINYFKGGKLRFKKIKPEAFEANRFYTVINKKSGEIVPMEVNFNFDDPNLIILPLAFGKRQGREFIWNDLLSLETGSLKLANGRVIEKTLYNRRTRQDEPALFVALTFERREVLDSSNIKPMNLIGVDRGENIPAVIALTDPEGCPLSRFKDSLGNPTHILRIRESYKEKQRTIQAKKEVEQRRAGGYSRKYASKAKNLADDMVRNTARDLLYYAVTQDAMLIFENLSRGFGRQGKRTFMAERQYTRMEDWLTAKLAYEGLPSKTYLSKTLAQYTSKTCSNCGFTITSADYDRVLEKLKKTATGWMTTINGKELKVEGQITYYNRYKRQNVVKDLSVELDRLSEESVNNDISSWTKGRSGEALSLLKKRFSHRPVQEKFVCLNCGFETHADEQAALNIARSWLFLRSQEYKKYQTNKTTGNTDKRAFVETWQSFYRKKLKEVWKPAV

SEQ ID NO: 36329 - protein, 978 aa, synthetic construct
  REGION 1..978: note = engineered CasX variant
QEIKRINKIRRRLVKDSNTKKAGKTGPMKTLLVRVMTPDLRERLENLRKKPENIPQPISNTSRANLNKLLTDYTEMKKAILHVYWEEFQKDPVGLMSRVAQPASKKIDQNKLKPEMDEKGNLTTAGFACSQCGQPLFVYKLEQVSEKGKAYTNYFGRCNVAEHEKLILLAQLKPEKDSDEAVTYSLGKFGQRALDFYSIHVTKESTHPVKPLAQIAGNRYASYPVGKALSDACMGTIASFLSKYQDIIIEHQKVVKGNQKRLESLRELAGKENLEYPSVTLPPQPHTKEGVDAYNEVIARVRWWVNLNLWQKLKLSRDDAKPLLRLKGFPSFPLVERQANEVDWWDMVCNVKKLINEKKEDGKVFWQNLAGYKRQEALRPYLSSEEDRKKGKKFARYQLGDLLLHLEKKHGEDWGKVYDEAWERIDKKVEGLSKHIKLEEERRSEDAQSKAALTDWLRAKASFVIEGLKEADKDEFCRCELKLQKWYGDLRGKPFAIEAENSILDISGFSKQYNCAFIWQKDGVKKLNLYLIINYFKGGKLRFKKIKPEAFEANRFYTVINKKSGEIVPMEVNFNFDDPNLIILPLAFGKRQGREFIWNDLLSLETGSLKLANGRVIEKTLYNRRTRQDEPALFVALTFERREVLDSSNIKPMNLIGVDRGENIPAVIALTDPEGCPLSRFKDSLGNPTHILRIGESYKEKQRTIQAKKEVEQRRAGGYSRKYASKAKNLADDMVRNTARDLLYYAVTQDAMLIFENLSRGFGRQGKRTFSAERQYTRMEDWLTAKLAYEGLPSKTYLSKTLAQYTSKTCSNCGFTITSADYDRVLEKLKKTATGWMTTINGKELKVEGQITYYNRYKRQNVVKDLSVELDRLSEESVNNDISSWTKGRSGEALSLLKKRFSHRPVQEKFVCLNCGFETHADEQAALNIARSWLFLRSQEYKKYQTNKTTGNTDKRAFVETWQSFYRKKLKEVWKPAV

SEQ ID NO: 36330 - protein, 978 aa, synthetic construct
  REGION 1..978: note = engineered CasX variant
QEIKRINKIRRRLVKDSNTKKAGKTGPMKTLLVRVMTPDLRERLENLRKKPENIPQPISNTSRANLNKLLTDYTEMKKAILHVYWEEFQKDPVGLMSRVAQPASKKIDQNKLKPEMDEKGNLTTAGFACSQCGQPLFVYKLEQVSEKGKAYTNYFGRCNVAEHEKLILLAQLKPEKDSDEAVTYSLGKFGQRALDFYSIHVTKESTHPVKPLAQIAGNRYASHPVGKALSDACMGTIASFLSKYQDIIIEHQKVVKGNQKRLESLRELAGKENLEYPSVTLPPQPHTKEGVDAYNEVIARVRWWVNLNLWQKLKLSRDDAKPLLRLKGFPSFPLVERQANEVDWWDMVCNVKKLINEKKEDGKVFWQNLAGYKRQEALRPYLSSEEDRKKGKKFARYQLGDLLLHLEKKHGEDWGKVYDEAWERIDKKVEGLSKHIKLEEERRSEDAQSKAALTDWLRAKASFVIEGLKEADKDEFCRCELKLQKWYGDLRGKPFAIEAENSILDISGFSKQYNCAFIWQKDGVKKLNLYLIINYFKGGKLRFKKIKPEAFEANRFYTVINKKSGEIVPMEVNFNFDDPNLIILPLAFGKRQGREFIWNDLLSLETGSLKLANGRVIEKTLYNRRTRQDEPALFVALTFERREVLDSSNIKPMNLIGVDRGENIPAVIALTDPEGCPLSRFKDSLGNPTHILRIGESYKEKQRTIQAKKEVEQRRAGGYSRKYASKAKNLADDMVRNTARDLLYYAVTQDAMLIFENLSRGFGRQGKRTFSAERQYTRMEDWLTAKLAYEGLPSKTYLSKTLAQYTSKTCSNCGFTITSADYDRVLEKLKKTATGWMTTINGKELKVEGQITYYNRYKRQNVVKDLSVELDRLSEESVNNDISSWTKGRSGEALSLLKKRFSHRPVQEKFVCLNCGFETHADEQAALNIARSWLFLRSQEYKKYQTNKTTGNTDKRAFVETWQSFYRKKLKEVWKPAV

SEQ ID NO: 36331 - protein, 978 aa, synthetic construct
  REGION 1..978: note = engineered CasX variant
QEIKRINKIRRRLVKDSNTKKAGKTGPMKTLLVRVMTPDLRERLENLRKKPENIPQPISNTSRANLNKLLTDYTEMKKAILHVYWEEFQKDPVGLMSRVAQPASKKIDQNKLKPEMDEKGNLTTAGFACSQCGQPLFVYKLEQVSEKGKAYTNYFGRCNVAEHEKLILLAQLKPEKDSDEAVTYSLGKFGQRALDFYSIHVTKESTHPVKPLAQIAGNRYASSPVGKALSDACMGTIASFLSKYQDIIIEHQKVVKGNQKRLESLRELAGKENLEYPSVTLPPQPHTKEGVDAYNEVIARVRWWVNLNLWQKLKLSRDDAKPLLRLKGFPSFPLVERQANEVDWWDMVCNVKKLINEKKEDGKVFWQNLAGYKRQEALRPYLSSEEDRKKGKKFARYQLGDLLLHLEKKHGEDWGKVYDEAWERIDKKVEGLSKHIKLEEERRSEDAQSKAALTDWLRAKASFVIEGLKEADKDEFCRCELKLQKWYGDLRGKPFAIEAENSILDISGFSKQYNCAFIWQKDGVKKLNLYLIINYFKGGKLRFKKIKPEAFEANRFYTVINKKSGEIVPMEVNFNFDDPNLIILPLAFGKRQGREFIWNDLLSLETGSLKLANGRVIEKTLYNRRTRQDEPALFVALTFERREVLDSSNIKPMNLIGVDRGENIPAVIALTDPEGCPLSRFKDSLGNPTHILRIGESYKEKQRTIQAKKEVEQRRAGGYSRKYASKAKNLADDMVRNTARDLLYYAVTQDAMLIFENLSRGFGRQGKRTFSAERQYTRMEDWLTAKLAYEGLPSKTYLSKTLAQYTSKTCSNCGFTITSADYDRVLEKLKKTATGWMTTINGKELKVEGQITYYNRYKRQNVVKDLSVELDRLSEESVNNDISSWTKGRSGEALSLLKKRFSHRPVQEKFVCLNCGFETHADEQAALNIARSWLFLRSQEYKKYQTNKTTGNTDKRAFVETWQSFYRKKLKEVWKPAV

SEQ ID NO: 36332 - protein, 978 aa, synthetic construct
  REGION 1..978: note = engineered CasX variant
QEIKRINKIRRRLVKDSNTKKAGKTGPMKTLLVRVMTPDLRERLENLRKKPENIPQPISNTSRANLNKLLTDYTEMKKAILHVYWEEFQKDPVGLMSRVAQPASKKIDQNKLKPEMDEKGNLTTAGFACSQCGQPLFVYKLEQVSEKGKAYTNYFGRCNVAEHEKLILLAQLKPEKDSDEAVTYSLGKFGQRALDFYSIHVTKESTHPVKPLAQIAGNRYASTPVGKALSDACMGTIASFLSKYQDIIIEHQKVVKGNQKRLESLRELAGKENLEYPSVTLPPQPHTKEGVDAYNEVIARVRWWVNLNLWQKLKLSRDDAKPLLRLKGFPSFPLVERQANEVDWWDMVCNVKKLINEKKEDGKVFWQNLAGYKRQEALRPYLSSEEDRKKGKKFARYQLGDLLLHLEKKHGEDWGKVYDEAWERIDKKVEGLSKHIKLEEERRSEDAQSKAALTDWLRAKASFVIEGLKEADKDEFCRCELKLQKWYGDLRGKPFAIEAENSILDISGFSKQYNCAFIWQKDGVKKLNLYLIINYFKGGKLRFKKIKPEAFEANRFYTVINKKSGEIVPMEVNFNFDDPNLIILPLAFGKRQGREFIWNDLLSLETGSLKLANGRVIEKTLYNRRTRQDEPALFVALTFERREVLDSSNIKPMNLIGVDRGENIPAVIALTDPEGCPLSRFKDSLGNPTHILRIGESYKEKQRTIQAKKEVEQRRAGGYSRKYASKAKNLADDMVRNTARDLLYYAVTQDAMLIFENLSRGFGRQGKRTFSAERQYTRMEDWLTAKLAYEGLPSKTYLSKTLAQYTSKTCSNCGFTITSADYDRVLEKLKKTATGWMTTINGKELKVEGQITYYNRYKRQNVVKDLSVELDRLSEESVNNDISSWTKGRSGEALSLLKKRFSHRPVQEKFVCLNCGFETHADEQAALNIARSWLFLRSQEYKKYQTNKTTGNTDKRAFVETWQSFYRKKLKEVWKPAV

SEQ ID NO: 36333 - protein, 978 aa, synthetic construct
  REGION 1..978: note = engineered CasX variant
QEIKRINKIRRRLVKDSNTKKAGKTGPMKTLLVRVMTPDLRERLENLRKKPENIPQPISNTSRANLNKLLTDYTEMKKAILHVYWEEFQKDPVGLMSRVAQPASKKIDQNKLKPEMDEKGNLTTAGFACSQCGQPLFVYKLEQVSEKGKAYTNYFGRCNVAEHEKLILLAQLKPEKDSDEAVTYSLGKFGQRALDFYSIHVTKESTHPVKPLAQIAGNRYASAPVGKALSDACMGTIASFLSKYQDIIIEHQKVVKGNQKRLESLRELAGKENLEYPSVTLPPQPHTKEGVDAYNEVIARVRWWVNLNLWQKLKLSRDDAKPLLRLKGFPSFPLVERQANEVDWWDMVCNVKKLINEKKEDGKVFWQNLAGYKRQEALRPYLSSEEDRKKGKKFARYQLGDLLLHLEKKHGEDWGKVYDEAWERIDKKVEGLSKHIKLEEERRSEDAQSKAALTDWLRAKASFVIEGLKEADKDEFCRCELKLQKWYGDLRGKPFAIEAENSILDISGFSKQYNCAFIWQKDGVKKLNLYLIINYFKGGKLRFKKIKPEAFEANRFYTVINKKSGEIVPMEVNFNFDDPNLIILPLAFGKRQGREFIWNDLLSLETGSLKLANGRVIEKTLYNRRTRQDEPALFVALTFERREVLDSSNIKPMNLIGVDRGENIPAVIALTDPEGCPLSRFKDSLGNPTHILRIGESYKEKQRTIQAKKEVEQRRAGGYSRKYASKAKNLADDMVRNTARDLLYYAVTQDAMLIFENLSRGFGRQGKRTFSAERQYTRMEDWLTAKLAYEGLPSKTYLSKTLAQYTSKTCSNCGFTITSADYDRVLEKLKKTATGWMTTINGKELKVEGQITYYNRYKRQNVVKDLSVELDRLSEESVNNDISSWTKGRSGEALSLLKKRFSHRPVQEKFVCLNCGFETHADEQAALNIARSWLFLRSQEYKKYQTNKTTGNTDKRAFVETWQSFYRKKLKEVWKPAV

SEQ ID NO: 36334 - protein, 978 aa, synthetic construct
  REGION 1..978: note = engineered CasX variant
QEIKRINKIRRRLVKDSNTKKAGKTGPMKTLLVRVMTPDLRERLENLRKKPENIPQPISNTSRANLNKLLTDYTEMKKAILHVYWEEFQKDPVGLMSRVAQPASKKIDQNKLKPEMDEKGNLTTAGFACSQCGQPLFVYKLEQVSEKGKAYTNYFGRCNVAEHEKLILLAQLKPEKDSDEAVTYSLGKFGQRALDFYSIHVTKESTHPVKPLAQIAGNRYASVPVGKALSDACMGTIASFLSKYQDIIIEHQKVVKGNQKRLESLRELAGKENLEYPSVTLPPQPHTKEGVDAYNEVIARVRWWVNLNLWQKLKLSRDDAKPLLRLKGFPSFPLVERQANEVDWWDMVCNVKKLINEKKEDGKVFWQNLAGYKRQEALRPYLSSEEDRKKGKKFARYQLGDLLLHLEKKHGEDWGKVYDEAWERIDKKVEGLSKHIKLEEERRSEDAQSKAALTDWLRAKASFVIEGLKEADKDEFCRCELKLQKWYGDLRGKPFAIEAENSILDISGFSKQYNCAFIWQKDGVKKLNLYLIINYFKGGKLRFKKIKPEAFEANRFYTVINKKSGEIVPMEVNFNFDDPNLIILPLAFGKRQGREFIWNDLLSLETGSLKLANGRVIEKTLYNRRTRQDEPALFVALTFERREVLDSSNIKPMNLIGVDRGENIPAVIALTDPEGCPLSRFKDSLGNPTHILRIGESYKEKQRTIQAKKEVEQRRAGGYSRKYASKAKNLADDMVRNTARDLLYYAVTQDAMLIFENLSRGFGRQGKRTFSAERQYTRMEDWLTAKLAYEGLPSKTYLSKTLAQYTSKTCSNCGFTITSADYDRVLEKLKKTATGWMTTINGKELKVEGQITYYNRYKRQNVVKDLSVELDRLSEESVNNDISSWTKGRSGEALSLLKKRFSHRPVQEKFVCLNCGFETHADEQAALNIARSWLFLRSQEYKKYQTNKTTGNTDKRAFVETWQSFYRKKLKEVWKPAV

SEQ ID NO: 36335 - protein, 978 aa, synthetic construct
  REGION 1..978: note = engineered CasX variant
QEIKRINKIRRRLVKDSNTKKAGKTGPMKTLLVRVMTPDLRERLENLRKKPENIPQPISNTSRANLNKLLTDYTEMKKAILHVYWEEFQKDPVGLMSRVAQPASKKIDQNKLKPEMDEKGNLTTAGFACSQCGQPLFVYKLEQVSEKGKAYTNYFGRCNVAEHEKLIKLAQLKPEKDSDEAVTYSLGKFGQRALDFYSIHVTKESTHPVKPLAQIAGNRYASGPVGKALSDACMGTIASFLSKYQDIIIEHQKVVKGNQKRLESLRELAGKENLEYPSVTLPPQPHTKEGVDAYNEVIARVRWWVNLNLWQKLKLSRDDAKPLLRLKGFPSFPLVERQANEVDWWDMVCNVKKLINEKKEDGKVFWQNLAGYKRQEALRPYLSSEEDRKKGKKFARYQLGDLLLHLEKKHGEDWGKVYDEAWERIDKKVEGLSKHIKLEEERRSEDAQSKAALTDWLRAKASFVIEGLKEADKDEFCRCELKLQKWYGDLRGKPFAIEAENSILDISGFSKQYNCAFIWQKDGVKKLNLYLIINYFKGGKLRFKKIKPEAFEANRFYTVINKKSGEIVPMEVNFNFDDPNLIILPLAFGKRQGREFIWNDLLSLETGSLKLANGRVIEKTLYNRRTRQDEPALFVALTFERREVLDSSNIKPMNLIGVDRGENIPAVIALTDPEGCPLSRFKDSLGNPTHILRIGESYKEKQRTIQAKKEVEQRRAGGYSRKYASKAKNLADDMVRNTARDLLYYAVTQDAMLIFENLSRGFGRQGKRTFSAERQYTRMEDWLTAKLAYEGLPSKTYLSKTLAQYTSKTCSNCGFTITSADYDRVLEKLKKTATGWMTTINGKELKVEGQITYYNRYKRQNVVKDLSVELDRLSEESVNNDISSWTKGRSGEALSLLKKRFSHRPVQEKFVCLNCGFETHADEQAALNIARSWLFLRSQEYKKYQTNKTTGNTDKRAFVETWQSFYRKKLKEVWKPAV

SEQ ID NO: 36336 - protein, 977 aa, synthetic construct
  REGION 1..977: note = engineered CasX variant
QEIKRINKIRRRLVKDSNTKKAGKTGPMKTLLVRVMTPDLRERLENLRKKPENIPQPISNTSRANLNKLLTDYTEMKKAILHVYWEEFQKDPVGLMSRVAQPASKKIDQNKLKPEMDEKGNLTTAGFACSQCGQPLFVYKLEQVSEKGKAYTNYFGRCNVAEHEKLILLAQLKPEKDSDEAVTYSLGKFGQRALDFYSIHVTKESTHPVKPLAQIAGNRYASPVGKALSDACMGTIASFLSKYQDIIIEHQKVVKGNQKRLESLRELAGKENLEYPSVTLPPQPHTKEGVDAYNEVIARVRWWVNLNLWQKLKLSRDDAKPLLRLKGFPSFPLVERQANEVDWWDMVCNVKKLINEKKEDGKVFWQNLAGYKRQEALRPYLSSEEDRKKGKKFARYQLGDLLLHLEKKHGEDWGKVYDEAWERIDKKVEGLSKHIKLEEERRSEDAQSKAALTDWLRAKASFVIEGLKEADKDEFCRCELKLQKWYGDLRGKPFAIEAENSILDISGFSKQYNCAFIWQKDGVKKLNLYLIINYFKGGKLRFKKIKPEAFEANRFYTVINKKSGEIVPMEVNFNFDDPNLIILPLAFGKRQGREFIWNDLLSLETGSLKLANGRVIEKTLYNRRTRQDEPALFVALTFERREVLDSSNIKPMNLIGVDRGENIPAVIALTDPEGCPLSRFKDSLGNPTHILRIGESYKEKQRTIQAKKEVEQRRAGGYSRKYASKAKNLADDMVRNTARDLLYYAVTQDAMLIFENLSRGFGRQGKRTFSAERQYTRMEDWLTAKLAYEGLPSKTYLSKTLAQYTSKTCSNCGFTITSADYDRVLEKLKKTATGWMTTINGKELKVEGQITYYNRYKRQNVVKDLSVELDRLSEESVNNDISSWTKGRSGEALSLLKKRFSHRPVQEKFVCLNCGFETHADEQAALNIARSWLFLRSQEYKKYQTNKTTGNTDKRAFVETWQSFYRKKLKEVWKPAV

SEQ ID NO: 36337 - protein, 978 aa, synthetic construct
  REGION 1..978: note = engineered CasX variant
QEIKRINKIRRRLVKDSNTKKAGKTGPMKTLLVRVMTPDLRERLENLRKKPENIPQPISNTSRANLNKLLTDYTEMKKAILHVYWEEFQKDPVGLMSRVAQPASKKIDQNKLKPEMDEKGNLTTAGFACSQCGQPLFVYKLEQVSEKGKAYTNYFGRCNVAEHEKLILLAQLKPEKDSDEAVTYSLGKFGQRALDFYSIHVTKESTHPVKPLAQIAGNRYASYPVGKALSDACMGTIASFLSKYQDIIIEHQKVVKGNQKRLESLRELAGKENLEYPSVTLPPQPHTKEGVDAYNEVIARVRWWVNLNLWQKLKLSRDDAKPLLRLKGFPSFPLVERQANEVDWWDMVCNVKKLINEKKEDGKVFWQNLAGYKRQEALRPYLSSEEDRKKGKKFARYQLGDLLLHLEKKHGEDWGKVYDEAWERIDKKVEGLSKHIKLEEERRSEDAQSKAALTDWLRAKASFVIEGLKEADKDEFCRCELKLQKWYGDLRGKPFAIEAENSILDISGFSKQYNCAFIWQKDGVKKLNLYLIINYFKGGKLRFKKIKPEAFEANRFYTVINKKSGEIVPMEVNFNFDDPNLIILPLAFGKRQGREFIWNDLLSLETGSLKLANGRVIEKTLYNRRTRQDEPALFVALTFERREVLDSSNIKPMNLIGVDRGENIPAVIALTDPEGCPLSRFKDSLGNPTHILRIGESYKEKQRTIQAKKEVEQRRAGGYSRKYASKAKNLADDMVRNTARDLLYYAVTQDAMLIFENLSRGFGRQGKRTFMAERQYTRMEDWLTAKLAYEGLPSKTYLSKTLAQYTSKTCSNCGFTITSADYDRVLEKLKKTATGWMTTINGKELKVEGQITYYNRYKRQNVVKDLSVELDRLSEESVNNDISSWDKGRSGEALSLLKKRFSHRPVQEKFVCLNCGFETHADEQAALNIARSWLFLRSQEYKKYQTNKTTGNTDKRAFVETWQSFYRKKLKEVWKPAV

SEQ ID NO: 36338 - protein, 978 aa, synthetic construct
  REGION 1..978: note = engineered CasX variant
QEIKRINKIRRRLVKDSNTKKAGKTGPMKTLLVRVMTPDLRERLENLRKKPENIPQPISNTSRANLNKLLTDYTEMKKAILHVYWEEFQKDPVGLMSRVAQPASKKIDQNKLKPEMDEKGNLTTAGFACSQCGQPLFVYKLEQVSEKGKAYTNYFGRCNVAEHEKLILLAQLKPEKDSDEAVTYSLGKFGQRALDFYSIHVTKESTHPVKPLAQIAGNRYASHPVGKALSDACMGTIASFLSKYQDIIIEHQKVVKGNQKRLESLRELAGKENLEYPSVTLPPQPHTKEGVDAYNEVIARVRWWVNLNLWQKLKLSRDDAKPLLRLKGFPSFPLVERQANEVDWWDMVCNVKKLINEKKEDGKVFWQNLAGYKRQEALRPYLSSEEDRKKGKKFARYQLGDLLLHLEKKHGEDWGKVYDEAWERIDKKVEGLSKHIKLEEERRSEDAQSKAALTDWLRAKASFVIEGLKEADKDEFCRCELKLQKWYGDLRGKPFAIEAENSILDISGFSKQYNCAFIWQKDGVKKLNLYLIINYFKGGKLRFKKIKPEAFEANRFYTVINKKSGEIVPMEVNFNFDDPNLIILPLAFGKRQGREFIWNDLLSLETGSLKLANGRVIEKTLYNRRTRQDEPALFVALTFERREVLDSSNIKPMNLIGVDRGENIPAVIALTDPEGCPLSRFKDSLGNPTHILRIGESYKEKQRTIQAKKEVEQRRAGGYSRKYASKAKNLADDMVRNTARDLLYYAVTQDAMLIFENLSRGFGRQGKRTFMAERQYTRMEDWLTAKLAYEGLPSKTYLSKTLAQYTSKTCSNCGFTITSADYDRVLEKLKKTATGWMTTINGKELKVEGQITYYNRYKRQNVVKDLSVELDRLSEESVNNDISSWDKGRSGEALSLLKKRFSHRPVQEKFVCLNCGFETHADEQAALNIARSWLFLRSQEYKKYQTNKTTGNTDKRAFVETWQSFYRKKLKEVWKPAV

SEQ ID NO: 36339 - protein, 978 aa, synthetic construct
  REGION 1..978: note = engineered CasX variant
QEIKRINKIRRRLVKDSNTKKAGKTGPMKTLLVRVMTPDLRERLENLRKKPENIPQPISNTSRANLNKLLTDYTEMKKAILHVYWEEFQKDPVGLMSRVAQPASKKIDQNKLKPEMDEKGNLTTAGFACSQCGQPLFVYKLEQVSEKGKAYTNYFGRCNVAEHEKLILLAQLKPEKDSDEAVTYSLGKFGQRALDFYSIHVTKESTHPVKPLAQIAGNRYASSPVGKALSDACMGTIASFLSKYQDIIIEHQKVVKGNQKRLESLRELAGKENLEYPSVTLPPQPHTKEGVDAYNEVIARVRWWVNLNLWQKLKLSRDDAKPLLRLKGFPSFPLVERQANEVDWWDMVCNVKKLINEKKEDGKVFWQNLAGYKRQEALRPYLSSEEDRKKGKKFARYQLGDLLLHLEKKHGEDWGKVYDEAWERIDKKVEGLSKHIKLEEERRSEDAQSKAALTDWLRAKASFVIEGLKEADKDEFCRCELKLQKWYGDLRGKPFAIEAENSILDISGFSKQYNCAFIWQKDGVKKLNLYLIINYFKGGKLRFKKIKPEAFEANRFYTVINKKSGEIVPMEVNFNFDDPNLIILPLAFGKRQGREFIWNDLLSLETGSLKLANGRVIEKTLYNRRTRQDEPALFVALTFERREVLDSSNIKPMNLIGVDRGENIPAVIALTDPEGCPLSRFKDSLGNPTHILRIGESYKEKQRTIQAKKEVEQRRAGGYSRKYASKAKNLADDMVRNTARDLLYYAVTQDAMLIFENLSRGFGRQGKRTFMAERQYTRMEDWLTAKLAYEGLPSKTYLSKTLAQYTSKTCSNCGFTITSADYDRVLEKLKKTATGWMTTINGKELKVEGQITYYNRYKRQNVVKDLSVELDRLSEESVNNDISSWDKGRSGEALSLLKKRFSHRPVQEKFVCLNCGFETHADEQAALNIARSWLFLRSQEYKKYQTNKTTGNTDKRAFVETWQSFYRKKLKEVWKPAV

SEQ ID NO: 36340 - protein, 978 aa, synthetic construct
  REGION 1..978: note = engineered CasX variant
QEIKRINKIRRRLVKDSNTKKAGKTGPMKTLLVRVMTPDLRERLENLRKKPENIPQPISNTSRANLNKLLTDYTEMKKAILHVYWEEFQKDPVGLMSRVAQPASKKIDQNKLKPEMDEKGNLTTAGFACSQCGQPLFVYKLEQVSEKGKAYTNYFGRCNVAEHEKLILLAQLKPEKDSDEAVTYSLGKFGQRALDFYSIHVTKESTHPVKPLAQIAGNRYASTPVGKALSDACMGTIASFLSKYQDIIIEHQKVVKGNQKRLESLRELAGKENLEYPSVTLPPQPHTKEGVDAYNEVIARVRWWVNLNLWQKLKLSRDDAKPLLRLKGFPSFPLVERQANEVDWWDMVCNVKKLINEKKEDGKVFWQNLAGYKRQEALRPYLSSEEDRKKGKKFARYQLGDLLLHLEKKHGEDWGKVYDEAWERIDKKVEGLSKHIKLEEERRSEDAQSKAALTDWLRAKASFVIEGLKEADKDEFCRCELKLQKWYGDLRGKPFAIEAENSILDISGFSKQYNCAFIWQKDGVKKLNLYLIINYFKGGKLRFKKIKPEAFEANRFYTVINKKSGEIVPMEVNFNFDDPNLIILPLAFGKRQGREFIWNDLLSLETGSLKLANGRVIEKTLYNRRTRQDEPALFVALTFERREVLDSSNIKPMNLIGVDRGENIPAVIALTDPEGCPLSRFKDSLGNPTHILRIGESYKEKQRTIQAKKEVEQRRAGGYSRKYASKAKNLADDMVRNTARDLLYYAVTQDAMLIFENLSRGFGRQGKRTFMAERQYTRMEDWLTAKLAYEGLPSKTYLSKTLAQYTSKTCSNCGFTITSADYDRVLEKLKKTATGWMTTINGKELKVEGQITYYNRYKRQNVVKDLSVELDRLSEESVNNDISSWDKGRSGEALSLLKKRFSHRPVQEKFVCLNCGFETHADEQAALNIARSWLFLRSQEYKKYQTNKTTGNTDKRAFVETWQSFYRKKLKEVWKPAV

SEQ ID NO: 36341 - protein, 978 aa, synthetic construct
  REGION 1..978: note = engineered CasX variant
QEIKRINKIRRRLVKDSNTKKAGKTGPMKTLLVRVMTPDLRERLENLRKKPENIPQPISNTSRANLNKLLTDYTEMKKAILHVYWEEFQKDPVGLMSRVAQPASKKIDQNKLKPEMDEKGNLTTAGFACSQCGQPLFVYKLEQVSEKGKAYTNYFGRCNVAEHEKLILLAQLKPEKDSDEAVTYSLGKFGQRALDFYSIHVTKESTHPVKPLAQIAGNRYASAPVGKALSDACMGTIASFLSKYQDIIIEHQKVVKGNQKRLESLRELAGKENLEYPSVTLPPQPHTKEGVDAYNEVIARVRWWVNLNLWQKLKLSRDDAKPLLRLKGFPSFPLVERQANEVDWWDMVCNVKKLINEKKEDGKVFWQNLAGYKRQEALRPYLSSEEDRKKGKKFARYQLGDLLLHLEKKHGEDWGKVYDEAWERIDKKVEGLSKHIKLEEERRSEDAQSKAALTDWLRAKASFVIEGLKEADKDEFCRCELKLQKWYGDLRGKPFAIEAENSILDISGFSKQYNCAFIWQKDGVKKLNLYLIINYFKGGKLRFKKIKPEAFEANRFYTVINKKSGEIVPMEVNFNFDDPNLIILPLAFGKRQGREFIWNDLLSLETGSLKLANGRVIEKTLYNRRTRQDEPALFVALTFERREVLDSSNIKPMNLIGVDRGENIPAVIALTDPEGCPLSRFKDSLGNPTHILRIGESYKEKQRTIQAKKEVEQRRAGGYSRKYASKAKNLADDMVRNTARDLLYYAVTQDAMLIFENLSRGFGRQGKRTFMAERQYTRMEDWLTAKLAYEGLPSKTYLSKTLAQYTSKTCSNCGFTITSADYDRVLEKLKKTATGWMTTINGKELKVEGQITYYNRYKRQNVVKDLSVELDRLSEESVNNDISSWDKGRSGEALSLLKKRFSHRPVQEKFVCLNCGFETHADEQAALNIARSWLFLRSQEYKKYQTNKTTGNTDKRAFVETWQSFYRKKLKEVWKPAV

SEQ ID NO: 36342 - protein, 978 aa, synthetic construct
  REGION 1..978: note = engineered CasX variant
QEIKRINKIRRRLVKDSNTKKAGKTGPMKTLLVRVMTPDLRERLENLRKKPENIPQPISNTSRANLNKLLTDYTEMKKAILHVYWEEFQKDPVGLMSRVAQPASKKIDQNKLKPEMDEKGNLTTAGFACSQCGQPLFVYKLEQVSEKGKAYTNYFGRCNVAEHEKLILLAQLKPEKDSDEAVTYSLGKFGQRALDFYSIHVTKESTHPVKPLAQIAGNRYASVPVGKALSDACMGTIASFLSKYQDIIIEHQKVVKGNQKRLESLRELAGKENLEYPSVTLPPQPHTKEGVDAYNEVIARVRWWVNLNLWQKLKLSRDDAKPLLRLKGFPSFPLVERQANEVDWWDMVCNVKKLINEKKEDGKVFWQNLAGYKRQEALRPYLSSEEDRKKGKKFARYQLGDLLLHLEKKHGEDWGKVYDEAWERIDKKVEGLSKHIKLEEERRSEDAQSKAALTDWLRAKASFVIEGLKEADKDEFCRCELKLQKWYGDLRGKPFAIEAENSILDISGFSKQYNCAFIWQKDGVKKLNLYLIINYFKGGKLRFKKIKPEAFEANRFYTVINKKSGEIVPMEVNFNFDDPNLIILPLAFGKRQGREFIWNDLLSLETGSLKLANGRVIEKTLYNRRTRQDEPALFVALTFERREVLDSSNIKPMNLIGVDRGENIPAVIALTDPEGCPLSRFKDSLGNPTHILRIGESYKEKQRTIQAKKEVEQRRAGGYSRKYASKAKNLADDMVRNTARDLLYYAVTQDAMLIFENLSRGFGRQGKRTFMAERQYTRMEDWLTAKLAYEGLPSKTYLSKTLAQYTSKTCSNCGFTITSADYDRVLEKLKKTATGWMTTINGKELKVEGQITYYNRYKRQNVVKDLSVELDRLSEESVNNDISSWDKGRSGEALSLLKKRFSHRPVQEKFVCLNCGFETHADEQAALNIARSWLFLRSQEYKKYQTNKTTGNTDKRAFVETWQSFYRKKLKEVWKPAV

SEQ ID NO: 36343 - protein, 978 aa, synthetic construct
  REGION 1..978: note = engineered CasX variant
QEIKRINKIRRRLVKDSNTKKAGKTGPMKTLLVRVMTPDLRERLENLRKKPENIPQPISNTSRANLNKLLTDYTEMKKAILHVYWEEFQKDPVGLMSRVAQPASKKIDQNKLKPEMDEKGNLTTAGFACSQCGQPLFVYKLEQVSEKGKAYTNYFGRCNVAEHEKLIKLAQLKPEKDSDEAVTYSLGKFGQRALDFYSIHVTKESTHPVKPLAQIAGNRYASGPVGKALSDACMGTIASFLSKYQDIIIEHQKVVKGNQKRLESLRELAGKENLEYPSVTLPPQPHTKEGVDAYNEVIARVRWWVNLNLWQKLKLSRDDAKPLLRLKGFPSFPLVERQANEVDWWDMVCNVKKLINEKKEDGKVFWQNLAGYKRQEALRPYLSSEEDRKKGKKFARYQLGDLLLHLEKKHGEDWGKVYDEAWERIDKKVEGLSKHIKLEEERRSEDAQSKAALTDWLRAKASFVIEGLKEADKDEFCRCELKLQKWYGDLRGKPFAIEAENSILDISGFSKQYNCAFIWQKDGVKKLNLYLIINYFKGGKLRFKKIKPEAFEANRFYTVINKKSGEIVPMEVNFNFDDPNLIILPLAFGKRQGREFIWNDLLSLETGSLKLANGRVIEKTLYNRRTRQDEPALFVALTFERREVLDSSNIKPMNLIGVDRGENIPAVIALTDPEGCPLSRFKDSLGNPTHILRIGESYKEKQRTIQAKKEVEQRRAGGYSRKYASKAKNLADDMVRNTARDLLYYAVTQDAMLIFENLSRGFGRQGKRTFMAERQYTRMEDWLTAKLAYEGLPSKTYLSKTLAQYTSKTCSNCGFTITSADYDRVLEKLKKTATGWMTTINGKELKVEGQITYYNRYKRQNVVKDLSVELDRLSEESVNNDISSWDKGRSGEALSLLKKRFSHRPVQEKFVCLNCGFETHADEQAALNIARSWLFLRSQEYKKYQTNKTTGNTDKRAFVETWQSFYRKKLKEVWKPAV

SEQ ID NO: 36344 - protein, 977 aa, synthetic construct
  REGION 1..977: note = engineered CasX variant
QEIKRINKIRRRLVKDSNTKKAGKTGPMKTLLVRVMTPDLRERLENLRKKPENIPQPISNTSRANLNKLLTDYTEMKKAILHVYWEEFQKDPVGLMSRVAQPASKKIDQNKLKPEMDEKGNLTTAGFACSQCGQPLFVYKLEQVSEKGKAYTNYFGRCNVAEHEKLILLAQLKPEKDSDEAVTYSLGKFGQRALDFYSIHVTKESTHPVKPLAQIAGNRYASPVGKALSDACMGTIASFLSKYQDIIIEHQKVVKGNQKRLESLRELAGKENLEYPSVTLPPQPHTKEGVDAYNEVIARVRWWVNLNLWQKLKLSRDDAKPLLRLKGFPSFPLVERQANEVDWWDMVCNVKKLINEKKEDGKVFWQNLAGYKRQEALRPYLSSEEDRKKGKKFARYQLGDLLLHLEKKHGEDWGKVYDEAWERIDKKVEGLSKHIKLEEERRSEDAQSKAALTDWLRAKASFVIEGLKEADKDEFCRCELKLQKWYGDLRGKPFAIEAENSILDISGFSKQYNCAFIWQKDGVKKLNLYLIINYFKGGKLRFKKIKPEAFEANRFYTVINKKSGEIVPMEVNFNFDDPNLIILPLAFGKRQGREFIWNDLLSLETGSLKLANGRVIEKTLYNRRTRQDEPALFVALTFERREVLDSSNIKPMNLIGVDRGENIPAVIALTDPEGCPLSRFKDSLGNPTHILRIGESYKEKQRTIQAKKEVEQRRAGGYSRKYASKAKNLADDMVRNTARDLLYYAVTQDAMLIFENLSRGFGRQGKRTFMAERQYTRMEDWLTAKLAYEGLPSKTYLSKTLAQYTSKTCSNCGFTITSADYDRVLEKLKKTATGWMTTINGKELKVEGQITYYNRYKRQNVVKDLSVELDRLSEESVNNDISSWDKGRSGEALSLLKKRFSHRPVQEKFVCLNCGFETHADEQAALNIARSWLFLRSQEYKKYQTNKTTGNTDKRAFVETWQSFYRKKLKEVWKPAV

SEQ ID NO: 36345 - protein, 978 aa, synthetic construct
  REGION 1..978: note = engineered CasX variant
QEIKRINKIRRRLVKDSNTKKAGKTGPMKTLLVRVMTPDLRERLENLRKKPENIPQPISNTSRANLNKLLTDYTEMKKAILHVYWEEFQVDPVGLMSRVAQPASKKIDQNKLKPEMDEKGNLTTAGFACSQCGQPLFVYKLEQVSEKGKAYTNYFGRCNVAEHEKLILLAQLKPEKDSDEAVTYSLGKFGQRALDFYSIHVTKESTHPVKPLAQIAGNRYASYPVGKALSDACMGTIASFLSKYQDIIIEHQKVVKGNQKRLESLRELAGKENLEYPSVTLPPQPHTKEGVDAYNEVIARVRWWVNLNLWQKLKLSRDDAKPLLRLKGFPSFPLVERQANEVDWWDMVCNVKKLINEKKEDGKVFWQNLAGYKRQEALRPYLSSEEDRKKGKKFARYQLGDLLLHLEKKHGEDWGKVYDEAWERIDKKVEGLSKHIKLEEERRSEDAQSKAALTDWLRAKASFVIEGLKEADKDEFCRCELKLQKWYGDLRGKPFAIEAENSILDISGFSKQYNCAFIWQKDGVKKLNLYLIINYFKGGKLRFKKIKPEAFEANRFYTVINKKSGEIVPMEVNFNFDDPNLIILPLAFGKRQGREFIWNDLLSLETGSLKLANGRVIEKTLYNRRTRQDEPALFVALTFERREVLDSSNIKPMNLIGVDRGENIPAVIALTDPEGCPLSRFKDSLGNPTHILRIGESYKEKQRTIQAKKEVEQRRAGGYSRKYASKAKNLADDMVRNTARDLLYYAVTQDAMLIFENLSRGFGRQGKRTFMAERQYTRMEDWLTAKLAYEGLPSKTYLSKTLAQYTSKTCSNCGFTITSADYDRVLEKLKKTATGWMTTINGKELKVEGQITYYNRYKRQNVVKDLSVELDRLSEESVNNDISSWTKGRSGEALSLLKKRFSHRPVQEKFVCLNCGFETHADEQAALNIARSWLFLRSQEYKKYQTNKTTGNTDKRAFVETWQSFYRKKLKEVWKPAV

SEQ ID NO: 36346 - protein, 978 aa, synthetic construct
  REGION 1..978: note = engineered CasX variant
QEIKRINKIRRRLVKDSNTKKAGKTGPMKTLLVRVMTPDLRERLENLRKKPENIPQPISNTSRANLNKLLTDYTEMKKAILHVYWEEFQVDPVGLMSRVAQPASKKIDQNKLKPEMDEKGNLTTAGFACSQCGQPLFVYKLEQVSEKGKAYTNYFGRCNVAEHEKLILLAQLKPEKDSDEAVTYSLGKFGQRALDFYSIHVTKESTHPVKPLAQIAGNRYASHPVGKALSDACMGTIASFLSKYQDIIIEHQKVVKGNQKRLESLRELAGKENLEYPSVTLPPQPHTKEGVDAYNEVIARVRWWVNLNLWQKLKLSRDDAKPLLRLKGFPSFPLVERQANEVDWWDMVCNVKKLINEKKEDGKVFWQNLAGYKRQEALRPYLSSEEDRKKGKKFARYQLGDLLLHLEKKHGEDWGKVYDEAWERIDKKVEGLSKHIKLEEERRSEDAQSKAALTDWLRAKASFVIEGLKEADKDEFCRCELKLQKWYGDLRGKPFAIEAENSILDISGFSKQYNCAFIWQKDGVKKLNLYLIINYFKGGKLRFKKIKPEAFEANRFYTVINKKSGEIVPMEVNFNFDDPNLIILPLAFGKRQGREFIWNDLLSLETGSLKLANGRVIEKTLYNRRTRQDEPALFVALTFERREVLDSSNIKPMNLIGVDRGENIPAVIALTDPEGCPLSRFKDSLGNPTHILRIGESYKEKQRTIQAKKEVEQRRAGGYSRKYASKAKNLADDMVRNTARDLLYYAVTQDAMLIFENLSRGFGRQGKRTFMAERQYTRMEDWLTAKLAYEGLPSKTYLSKTLAQYTSKTCSNCGFTITSADYDRVLEKLKKTATGWMTTINGKELKVEGQITYYNRYKRQNVVKDLSVELDRLSEESVNNDISSWTKGRSGEALSLLKKRFSHRPVQEKFVCLNCGFETHADEQAALNIARSWLFLRSQEYKKYQTNKTTGNTDKRAFVETWQSFYRKKLKEVWKPAV

SEQ ID NO: 36347 - protein, 978 aa, synthetic construct
  REGION 1..978: note = engineered CasX variant
QEIKRINKIRRRLVKDSNTKKAGKTGPMKTLLVRVMTPDLRERLENLRKKPENIPQPISNTSRANLNKLLTDYTEMKKAILHVYWEEFQVDPVGLMSRVAQPASKKIDQNKLKPEMDEKGNLTTAGFACSQCGQPLFVYKLEQVSEKGKAYTNYFGRCNVAEHEKLILLAQLKPEKDSDEAVTYSLGKFGQRALDFYSIHVTKESTHPVKPLAQIAGNRYASSPVGKALSDACMGTIASFLSKYQDIIIEHQKVVKGNQKRLESLRELAGKENLEYPSVTLPPQPHTKEGVDAYNEVIARVRWWVNLNLWQKLKLSRDDAKPLLRLKGFPSFPLVERQANEVDWWDMVCNVKKLINEKKEDGKVFWQNLAGYKRQEALRPYLSSEEDRKKGKKFARYQLGDLLLHLEKKHGEDWGKVYDEAWERIDKKVEGLSKHIKLEEERRSEDAQSKAALTDWLRAKASFVIEGLKEADKDEFCRCELKLQKWYGDLRGKPFAIEAENSILDISGFSKQYNCAFIWQKDGVKKLNLYLIINYFKGGKLRFKKIKPEAFEANRFYTVINKKSGEIVPMEVNFNFDDPNLIILPLAFGKRQGREFIWNDLLSLETGSLKLANGRVIEKTLYNRRTRQDEPALFVALTFERREVLDSSNIKPMNLIGVDRGENIPAVIALTDPEGCPLSRFKDSLGNPTHILRIGESYKEKQRTIQAKKEVEQRRAGGYSRKYASKAKNLADDMVRNTARDLLYYAVTQDAMLIFENLSRGFGRQGKRTFMAERQYTRMEDWLTAKLAYEGLPSKTYLSKTLAQYTSKTCSNCGFTITSADYDRVLEKLKKTATGWMTTINGKELKVEGQITYYNRYKRQNVVKDLSVELDRLSEESVNNDISSWTKGRSGEALSLLKKRFSHRPVQEKFVCLNCGFETHADEQAALNIARSWLFLRSQEYKKYQTNKTTGNTDKRAFVETWQSFYRKKLKEVWKPAV

SEQ ID NO: 36348 - protein, 978 aa, synthetic construct
  REGION 1..978: note = engineered CasX variant
QEIKRINKIRRRLVKDSNTKKAGKTGPMKTLLVRVMTPDLRERLENLRKKPENIPQPISNTSRANLNKLLTDYTEMKKAILHVYWEEFQVDPVGLMSRVAQPASKKIDQNKLKPEMDEKGNLTTAGFACSQCGQPLFVYKLEQVSEKGKAYTNYFGRCNVAEHEKLILLAQLKPEKDSDEAVTYSLGKFGQRALDFYSIHVTKESTHPVKPLAQIAGNRYASTPVGKALSDACMGTIASFLSKYQDIIIEHQKVVKGNQKRLESLRELAGKENLEYPSVTLPPQPHTKEGVDAYNEVIARVRWWVNLNLWQKLKLSRDDAKPLLRLKGFPSFPLVERQANEVDWWDMVCNVKKLINEKKEDGKVFWQNLAGYKRQEALRPYLSSEEDRKKGKKFARYQLGDLLLHLEKKHGEDWGKVYDEAWERIDKKVEGLSKHIKLEEERRSEDAQSKAALTDWLRAKASFVIEGLKEADKDEFCRCELKLQKWYGDLRGKPFAIEAENSILDISGFSKQYNCAFIWQKDGVKKLNLYLIINYFKGGKLRFKKIKPEAFEANRFYTVINKKSGEIVPMEVNFNFDDPNLIILPLAFGKRQGREFIWNDLLSLETGSLKLANGRVIEKTLYNRRTRQDEPALFVALTFERREVLDSSNIKPMNLIGVDRGENIPAVIALTDPEGCPLSRFKDSLGNPTHILRIGESYKEKQRTIQAKKEVEQRRAGGYSRKYASKAKNLADDMVRNTARDLLYYAVTQDAMLIFENLSRGFGRQGKRTFMAERQYTRMEDWLTAKLAYEGLPSKTYLSKTLAQYTSKTCSNCGFTITSADYDRVLEKLKKTATGWMTTINGKELKVEGQITYYNRYKRQNVVKDLSVELDRLSEESVNNDISSWTKGRSGEALSLLKKRFSHRPVQEKFVCLNCGFETHADEQAALNIARSWLFLRSQEYKKYQTNKTTGNTDKRAFVETWQSFYRKKLKEVWKPAV

SEQ ID NO: 36349 - protein, 978 aa, synthetic construct
  REGION 1..978: note = engineered CasX variant
QEIKRINKIRRRLVKDSNTKKAGKTGPMKTLLVRVMTPDLRERLENLRKKPENIPQPISNTSRANLNKLLTDYTEMKKAILHVYWEEFQVDPVGLMSRVAQPASKKIDQNKLKPEMDEKGNLTTAGFACSQCGQPLFVYKLEQVSEKGKAYTNYFGRCNVAEHEKLILLAQLKPEKDSDEAVTYSLGKFGQRALDFYSIHVTKESTHPVKPLAQIAGNRYASAPVGKALSDACMGTIASFLSKYQDIIIEHQKVVKGNQKRLESLRELAGKENLEYPSVTLPPQPHTKEGVDAYNEVIARVRWWVNLNLWQKLKLSRDDAKPLLRLKGFPSFPLVERQANEVDWWDMVCNVKKLINEKKEDGKVFWQNLAGYKRQEALRPYLSSEEDRKKGKKFARYQLGDLLLHLEKKHGEDWGKVYDEAWERIDKKVEGLSKHIKLEEERRSEDAQSKAALTDWLRAKASFVIEGLKEADKDEFCRCELKLQKWYGDLRGKPFAIEAENSILDISGFSKQYNCAFIWQKDGVKKLNLYLIINYFKGGKLRFKKIKPEAFEANRFYTVINKKSGEIVPMEVNFNFDDPNLIILPLAFGKRQGREFIWNDLLSLETGSLKLANGRVIEKTLYNRRTRQDEPALFVALTFERREVLDSSNIKPMNLIGVDRGENIPAVIALTDPEGCPLSRFKDSLGNPTHILRIGESYKEKQRTIQAKKEVEQRRAGGYSRKYASKAKNLADDMVRNTARDLLYYAVTQDAMLIFENLSRGFGRQGKRTFMAERQYTRMEDWLTAKLAYEGLPSKTYLSKTLAQYTSKTCSNCGFTITSADYDRVLEKLKKTATGWMTTINGKELKVEGQITYYNRYKRQNVVKDLSVELDRLSEESVNNDISSWTKGRSGEALSLLKKRFSHRPVQEKFVCLNCGFETHADEQAALNIARSWLFLRSQEYKKYQTNKTTGNTDKRAFVETWQSFYRKKLKEVWKPAV

SEQ ID NO: 36350 - protein, 978 aa, synthetic construct
  REGION 1..978: note = engineered CasX variant
QEIKRINKIRRRLVKDSNTKKAGKTGPMKTLLVRVMTPDLRERLENLRKKPENIPQPISNTSRANLNKLLTDYTEMKKAILHVYWEEFQVDPVGLMSRVAQPASKKIDQNKLKPEMDEKGNLTTAGFACSQCGQPLFVYKLEQVSEKGKAYTNYFGRCNVAEHEKLILLAQLKPEKDSDEAVTYSLGKFGQRALDFYSIHVTKESTHPVKPLAQIAGNRYASVPVGKALSDACMGTIASFLSKYQDIIIEHQKVVKGNQKRLESLRELAGKENLEYPSVTLPPQPHTKEGVDAYNEVIARVRWWVNLNLWQKLKLSRDDAKPLLRLKGFPSFPLVERQANEVDWWDMVCNVKKLINEKKEDGKVFWQNLAGYKRQEALRPYLSSEEDRKKGKKFARYQLGDLLLHLEKKHGEDWGKVYDEAWERIDKKVEGLSKHIKLEEERRSEDAQSKAALTDWLRAKASFVIEGLKEADKDEFCRCELKLQKWYGDLRGKPFAIEAENSILDISGFSKQYNCAFIWQKDGVKKLNLYLIINYFKGGKLRFKKIKPEAFEANRFYTVINKKSGEIVPMEVNFNFDDPNLIILPLAFGKRQGREFIWNDLLSLETGSLKLANGRVIEKTLYNRRTRQDEPALFVALTFERREVLDSSNIKPMNLIGVDRGENIPAVIALTDPEGCPLSRFKDSLGNPTHILRIGESYKEKQRTIQAKKEVEQRRAGGYSRKYASKAKNLADDMVRNTARDLLYYAVTQDAMLIFENLSRGFGRQGKRTFMAERQYTRMEDWLTAKLAYEGLPSKTYLSKTLAQYTSKTCSNCGFTITSADYDRVLEKLKKTATGWMTTINGKELKVEGQITYYNRYKRQNVVKDLSVELDRLSEESVNNDISSWTKGRSGEALSLLKKRFSHRPVQEKFVCLNCGFETHADEQAALNIARSWLFLRSQEYKKYQTNKTTGNTDKRAFVETWQSFYRKKLKEVWKPAV

SEQ ID NO: 36351 - protein, 978 aa, synthetic construct
  REGION 1..978: note = engineered CasX variant
QEIKRINKIRRRLVKDSNTKKAGKTGPMKTLLVRVMTPDLRERLENLRKKPENIPQPISNTSRANLNKLLTDYTEMKKAILHVYWEEFQVDPVGLMSRVAQPASKKIDQNKLKPEMDEKGNLTTAGFACSQCGQPLFVYKLEQVSEKGKAYTNYFGRCNVAEHEKLIKLAQLKPEKDSDEAVTYSLGKFGQRALDFYSIHVTKESTHPVKPLAQIAGNRYASGPVGKALSDACMGTIASFLSKYQDIIIEHQKVVKGNQKRLESLRELAGKENLEYPSVTLPPQPHTKEGVDAYNEVIARVRWWVNLNLWQKLKLSRDDAKPLLRLKGFPSFPLVERQANEVDWWDMVCNVKKLINEKKEDGKVFWQNLAGYKRQEALRPYLSSEEDRKKGKKFARYQLGDLLLHLEKKHGEDWGKVYDEAWERIDKKVEGLSKHIKLEEERRSEDAQSKAALTDWLRAKASFVIEGLKEADKDEFCRCELKLQKWYGDLRGKPFAIEAENSILDISGFSKQYNCAFIWQKDGVKKLNLYLIINYFKGGKLRFKKIKPEAFEANRFYTVINKKSGEIVPMEVNFNFDDPNLIILPLAFGKRQGREFIWNDLLSLETGSLKLANGRVIEKTLYNRRTRQDEPALFVALTFERREVLDSSNIKPMNLIGVDRGENIPAVIALTDPEGCPLSRFKDSLGNPTHILRIGESYKEKQRTIQAKKEVEQRRAGGYSRKYASKAKNLADDMVRNTARDLLYYAVTQDAMLIFENLSRGFGRQGKRTFMAERQYTRMEDWLTAKLAYEGLPSKTYLSKTLAQYTSKTCSNCGFTITSADYDRVLEKLKKTATGWMTTINGKELKVEGQITYYNRYKRQNVVKDLSVELDRLSEESVNNDISSWTKGRSGEALSLLKKRFSHRPVQEKFVCLNCGFETHADEQAALNIARSWLFLRSQEYKKYQTNKTTGNTDKRAFVETWQSFYRKKLKEVWKPAV

SEQ ID NO: 36352 - protein, 977 aa, synthetic construct
  REGION 1..977: note = engineered CasX variant
QEIKRINKIRRRLVKDSNTKKAGKTGPMKTLLVRVMTPDLRERLENLRKKPENIPQPISNTSRANLNKLLTDYTEMKKAILHVYWEEFQVDPVGLMSRVAQPASKKIDQNKLKPEMDEKGNLTTAGFACSQCGQPLFVYKLEQVSEKGKAYTNYFGRCNVAEHEKLILLAQLKPEKDSDEAVTYSLGKFGQRALDFYSIHVTKESTHPVKPLAQIAGNRYASPVGKALSDACMGTIASFLSKYQDIIIEHQKVVKGNQKRLESLRELAGKENLEYPSVTLPPQPHTKEGVDAYNEVIARVRWWVNLNLWQKLKLSRDDAKPLLRLKGFPSFPLVERQANEVDWWDMVCNVKKLINEKKEDGKVFWQNLAGYKRQEALRPYLSSEEDRKKGKKFARYQLGDLLLHLEKKHGEDWGKVYDEAWERIDKKVEGLSKHIKLEEERRSEDAQSKAALTDWLRAKASFVIEGLKEADKDEFCRCELKLQKWYGDLRGKPFAIEAENSILDISGFSKQYNCAFIWQKDGVKKLNLYLIINYFKGGKLRFKKIKPEAFEANRFYTVINKKSGEIVPMEVNFNFDDPNLIILPLAFGKRQGREFIWNDLLSLETGSLKLANGRVIEKTLYNRRTRQDEPALFVALTFERREVLDSSNIKPMNLIGVDRGENIPAVIALTDPEGCPLSRFKDSLGNPTHILRIGESYKEKQRTIQAKKEVEQRRAGGYSRKYASKAKNLADDMVRNTARDLLYYAVTQDAMLIFENLSRGFGRQGKRTFMAERQYTRMEDWLTAKLAYEGLPSKTYLSKTLAQYTSKTCSNCGFTITSADYDRVLEKLKKTATGWMTTINGKELKVEGQITYYNRYKRQNVVKDLSVELDRLSEESVNNDISSWTKGRSGEALSLLKKRFSHRPVQEKFVCLNCGFETHADEQAALNIARSWLFLRSQEYKKYQTNKTTGNTDKRAFVETWQSFYRKKLKEVWKPAV

SEQ ID NO: 36353 - protein, 978 aa, synthetic construct
  REGION 1..978: note = engineered CasX variant
QEIKRLNKIRRRLVKDSNTKKAGKTGPMKTLLVRVMTPDLRERLENLRKKPENIPQPISNTSRANLNKLLTDYTEMKKAILHVYWEEFQKDPVGLMSRVAQPASKKIDQNKLKPEMDEKGNLTTAGFACSQCGQPLFVYKLEQVSEKGKAYTNYFGRCNVAEHEKLILLAQLKPEKDSDEAVTYSLGKFGQRALDFYSIHVTKESTHPVKPLAQIAGNRYASYPVGKALSDACMGTIASFLSKYQDIIIEHQKVVKGNQKRLESLRELAGKENLEYPSVTLPPQPHTKEGVDAYNEVIARVRWWVNLNLWQKLKLSRDDAKPLLRLKGFPSFPLVERQANEVDWWDMVCNVKKLINEKKEDGKVFWQNLAGYKRQEALRPYLSSEEDRKKGKKFARYQLGDLLLHLEKKHGEDWGKVYDEAWERIDKKVEGLSKHIKLEEERRSEDAQSKAALTDWLRAKASFVIEGLKEADKDEFCRCELKLQKWYGDLRGKPFAIEAENSILDISGFSKQYNCAFIWQKDGVKKLNLYLIINYFKGGKLRFKKIKPEAFEANRFYTVINKKSGEIVPMEVNFNFDDPNLIILPLAFGKRQGREFIWNDLLSLETGSLKLANGRVIEKTLYNRRTRQDEPALFVALTFERREVLDSSNIKPMNLIGVDRGENIPAVIALTDPEGCPLSRFKDSLGNPTHILRIGESYKEKQRTIQAKKEVEQRRAGGYSRKYASKAKNLADDMVRNTARDLLYYAVTQDAMLIFENLSRGFGRQGKRTFMAERQYTRMEDWLTAKLAYEGLPSKTYLSKTLAQYTSKTCSNCGFTITSADYDRVLEKLKKTATGWMTTINGKELKVEGQITYYNRYKRQNVVKDLSVELDRLSEESVNNDISSWTKGRSGEALSLLKKRFSHRPVQEKFVCLNCGFETHADEQAALNIARSWLFLRSQEYKKYQTNKTTGNTDKRAFVETWQSFYRKKLKEVWKPAV

SEQ ID NO: 36354 - protein, 978 aa, synthetic construct
  REGION 1..978: note = engineered CasX variant
QEIKRLNKIRRRLVKDSNTKKAGKTGPMKTLLVRVMTPDLRERLENLRKKPENIPQPISNTSRANLNKLLTDYTEMKKAILHVYWEEFQKDPVGLMSRVAQPASKKIDQNKLKPEMDEKGNLTTAGFACSQCGQPLFVYKLEQVSEKGKAYTNYFGRCNVAEHEKLILLAQLKPEKDSDEAVTYSLGKFGQRALDFYSIHVTKESTHPVKPLAQIAGNRYASHPVGKALSDACMGTIASFLSKYQDIIIEHQKVVKGNQKRLESLRELAGKENLEYPSVTLPPQPHTKEGVDAYNEVIARVRWWVNLNLWQKLKLSRDDAKPLLRLKGFPSFPLVERQANEVDWWDMVCNVKKLINEKKEDGKVFWQNLAGYKRQEALRPYLSSEEDRKKGKKFARYQLGDLLLHLEKKHGEDWGKVYDEAWERIDKKVEGLSKHIKLEEERRSEDAQSKAALTDWLRAKASFVIEGLKEADKDEFCRCELKLQKWYGDLRGKPFAIEAENSILDISGFSKQYNCAFIWQKDGVKKLNLYLIINYFKGGKLRFKKIKPEAFEANRFYTVINKKSGEIVPMEVNFNFDDPNLIILPLAFGKRQGREFIWNDLLSLETGSLKLANGRVIEKTLYNRRTRQDEPALFVALTFERREVLDSSNIKPMNLIGVDRGENIPAVIALTDPEGCPLSRFKDSLGNPTHILRIGESYKEKQRTIQAKKEVEQRRAGGYSRKYASKAKNLADDMVRNTARDLLYYAVTQDAMLIFENLSRGFGRQGKRTFMAERQYTRMEDWLTAKLAYEGLPSKTYLSKTLAQYTSKTCSNCGFTITSADYDRVLEKLKKTATGWMTTINGKELKVEGQITYYNRYKRQNVVKDLSVELDRLSEESVNNDISSWTKGRSGEALSLLKKRFSHRPVQEKFVCLNCGFETHADEQAALNIARSWLFLRSQEYKKYQTNKTTGNTDKRAFVETWQSFYRKKLKEVWKPAV

SEQ ID NO: 36355 - protein, 978 aa, synthetic construct
  REGION 1..978: note = engineered CasX variant
QEIKRLNKIRRRLVKDSNTKKAGKTGPMKTLLVRVMTPDLRERLENLRKKPENIPQPISNTSRANLNKLLTDYTEMKKAILHVYWEEFQKDPVGLMSRVAQPASKKIDQNKLKPEMDEKGNLTTAGFACSQCGQPLFVYKLEQVSEKGKAYTNYFGRCNVAEHEKLILLAQLKPEKDSDEAVTYSLGKFGQRALDFYSIHVTKESTHPVKPLAQIAGNRYASSPVGKALSDACMGTIASFLSKYQDIIIEHQKVVKGNQKRLESLRELAGKENLEYPSVTLPPQPHTKEGVDAYNEVIARVRWWVNLNLWQKLKLSRDDAKPLLRLKGFPSFPLVERQANEVDWWDMVCNVKKLINEKKEDGKVFWQNLAGYKRQEALRPYLSSEEDRKKGKKFARYQLGDLLLHLEKKHGEDWGKVYDEAWERIDKKVEGLSKHIKLEEERRSEDAQSKAALTDWLRAKASFVIEGLKEADKDEFCRCELKLQKWYGDLRGKPFAIEAENSILDISGFSKQYNCAFIWQKDGVKKLNLYLIINYFKGGKLRFKKIKPEAFEANRFYTVINKKSGEIVPMEVNFNFDDPNLIILPLAFGKRQGREFIWNDLLSLETGSLKLANGRVIEKTLYNRRTRQDEPALFVALTFERREVLDSSNIKPMNLIGVDRGENIPAVIALTDPEGCPLSRFKDSLGNPTHILRIGESYKEKQRTIQAKKEVEQRRAGGYSRKYASKAKNLADDMVRNTARDLLYYAVTQDAMLIFENLSRGFGRQGKRTFMAERQYTRMEDWLTAKLAYEGLPSKTYLSKTLAQYTSKTCSNCGFTITSADYDRVLEKLKKTATGWMTTINGKELKVEGQITYYNRYKRQNVVKDLSVELDRLSEESVNNDISSWTKGRSGEALSLLKKRFSHRPVQEKFVCLNCGFETHADEQAALNIARSWLFLRSQEYKKYQTNKTTGNTDKRAFVETWQSFYRKKLKEVWKPAV

SEQ ID NO: 36356 - protein, 978 aa, synthetic construct
  REGION 1..978: note = engineered CasX variant
QEIKRLNKIRRRLVKDSNTKKAGKTGPMKTLLVRVMTPDLRERLENLRKKPENIPQPISNTSRANLNKLLTDYTEMKKAILHVYWEEFQKDPVGLMSRVAQPASKKIDQNKLKPEMDEKGNLTTAGFACSQCGQPLFVYKLEQVSEKGKAYTNYFGRCNVAEHEKLILLAQLKPEKDSDEAVTYSLGKFGQRALDFYSIHVTKESTHPVKPLAQIAGNRYASTPVGKALSDACMGTIASFLSKYQDIIIEHQKVVKGNQKRLESLRELAGKENLEYPSVTLPPQPHTKEGVDAYNEVIARVRWWVNLNLWQKLKLSRDDAKPLLRLKGFPSFPLVERQANEVDWWDMVCNVKKLINEKKEDGKVFWQNLAGYKRQEALRPYLSSEEDRKKGKKFARYQLGDLLLHLEKKHGEDWGKVYDEAWERIDKKVEGLSKHIKLEEERRSEDAQSKAALTDWLRAKASFVIEGLKEADKDEFCRCELKLQKWYGDLRGKPFAIEAENSILDISGFSKQYNCAFIWQKDGVKKLNLYLIINYFKGGKLRFKKIKPEAFEANRFYTVINKKSGEIVPMEVNFNFDDPNLIILPLAFGKRQGREFIWNDLLSLETGSLKLANGRVIEKTLYNRRTRQDEPALFVALTFERREVLDSSNIKPMNLIGVDRGENIPAVIALTDPEGCPLSRFKDSLGNPTHILRIGESYKEKQRTIQAKKEVEQRRAGGYSRKYASKAKNLADDMVRNTARDLLYYAVTQDAMLIFENLSRGFGRQGKRTFMAERQYTRMEDWLTAKLAYEGLPSKTYLSKTLAQYTSKTCSNCGFTITSADYDRVLEKLKKTATGWMTTINGKELKVEGQITYYNRYKRQNVVKDLSVELDRLSEESVNNDISSWTKGRSGEALSLLKKRFSHRPVQEKFVCLNCGFETHADEQAALNIARSWLFLRSQEYKKYQTNKTTGNTDKRAFVETWQSFYRKKLKEVWKPAV

SEQ ID NO: 36357 - protein, 978 aa, synthetic construct
  REGION 1..978: note = engineered CasX variant
QEIKRLNKIRRRLVKDSNTKKAGKTGPMKTLLVRVMTPDLRERLENLRKKPENIPQPISNTSRANLNKLLTDYTEMKKAILHVYWEEFQKDPVGLMSRVAQPASKKIDQNKLKPEMDEKGNLTTAGFACSQCGQPLFVYKLEQVSEKGKAYTNYFGRCNVAEHEKLILLAQLKPEKDSDEAVTYSLGKFGQRALDFYSIHVTKESTHPVKPLAQIAGNRYASAPVGKALSDACMGTIASFLSKYQDIIIEHQKVVKGNQKRLESLRELAGKENLEYPSVTLPPQPHTKEGVDAYNEVIARVRWWVNLNLWQKLKLSRDDAKPLLRLKGFPSFPLVERQANEVDWWDMVCNVKKLINEKKEDGKVFWQNLAGYKRQEALRPYLSSEEDRKKGKKFARYQLGDLLLHLEKKHGEDWGKVYDEAWERIDKKVEGLSKHIKLEEERRSEDAQSKAALTDWLRAKASFVIEGLKEADKDEFCRCELKLQKWYGDLRGKPFAIEAENSILDISGFSKQYNCAFIWQKDGVKKLNLYLIINYFKGGKLRFKKIKPEAFEANRFYTVINKKSGEIVPMEVNFNFDDPNLIILPLAFGKRQGREFIWNDLLSLETGSLKLANGRVIEKTLYNRRTRQDEPALFVALTFERREVLDSSNIKPMNLIGVDRGENIPAVIALTDPEGCPLSRFKDSLGNPTHILRIGESYKEKQRTIQAKKEVEQRRAGGYSRKYASKAKNLADDMVRNTARDLLYYAVTQDAMLIFENLSRGFGRQGKRTFMAERQYTRMEDWLTAKLAYEGLPSKTYLSKTLAQYTSKTCSNCGFTITSADYDRVLEKLKKTATGWMTTINGKELKVEGQITYYNRYKRQNVVKDLSVELDRLSEESVNNDISSWTKGRSGEALSLLKKRFSHRPVQEKFVCLNCGFETHADEQAALNIARSWLFLRSQEYKKYQTNKTTGNTDKRAFVETWQSFYRKKLKEVWKPAV

SEQ ID NO: 36358 - protein, 978 aa, synthetic construct
  REGION 1..978: note = engineered CasX variant
QEIKRLNKIRRRLVKDSNTKKAGKTGPMKTLLVRVMTPDLRERLENLRKKPENIPQPISNTSRANLNKLLTDYTEMKKAILHVYWEEFQKDPVGLMSRVAQPASKKIDQNKLKPEMDEKGNLTTAGFACSQCGQPLFVYKLEQVSEKGKAYTNYFGRCNVAEHEKLILLAQLKPEKDSDEAVTYSLGKFGQRALDFYSIHVTKESTHPVKPLAQIAGNRYASVPVGKALSDACMGTIASFLSKYQDIIIEHQKVVKGNQKRLESLRELAGKENLEYPSVTLPPQPHTKEGVDAYNEVIARVRWWVNLNLWQKLKLSRDDAKPLLRLKGFPSFPLVERQANEVDWWDMVCNVKKLINEKKEDGKVFWQNLAGYKRQEALRPYLSSEEDRKKGKKFARYQLGDLLLHLEKKHGEDWGKVYDEAWERIDKKVEGLSKHIKLEEERRSEDAQSKAALTDWLRAKASFVIEGLKEADKDEFCRCELKLQKWYGDLRGKPFAIEAENSILDISGFSKQYNCAFIWQKDGVKKLNLYLIINYFKGGKLRFKKIKPEAFEANRFYTVINKKSGEIVPMEVNFNFDDPNLIILPLAFGKRQGREFIWNDLLSLETGSLKLANGRVIEKTLYNRRTRQDEPALFVALTFERREVLDSSNIKPMNLIGVDRGENIPAVIALTDPEGCPLSRFKDSLGNPTHILRIGESYKEKQRTIQAKKEVEQRRAGGYSRKYASKAKNLADDMVRNTARDLLYYAVTQDAMLIFENLSRGFGRQGKRTFMAERQYTRMEDWLTAKLAYEGLPSKTYLSKTLAQYTSKTCSNCGFTITSADYDRVLEKLKKTATGWMTTINGKELKVEGQITYYNRYKRQNVVKDLSVELDRLSEESVNNDISSWTKGRSGEALSLLKKRFSHRPVQEKFVCLNCGFETHADEQAALNIARSWLFLRSQEYKKYQTNKTTGNTDKRAFVETWQSFYRKKLKEVWKPAV

SEQ ID NO: 36359 - protein, 978 aa, synthetic construct
  REGION 1..978: note = engineered CasX variant
QEIKRLNKIRRRLVKDSNTKKAGKTGPMKTLLVRVMTPDLRERLENLRKKPENIPQPISNTSRANLNKLLTDYTEMKKAILHVYWEEFQKDPVGLMSRVAQPASKKIDQNKLKPEMDEKGNLTTAGFACSQCGQPLFVYKLEQVSEKGKAYTNYFGRCNVAEHEKLIKLAQLKPEKDSDEAVTYSLGKFGQRALDFYSIHVTKESTHPVKPLAQIAGNRYASGPVGKALSDACMGTIASFLSKYQDIIIEHQKVVKGNQKRLESLRELAGKENLEYPSVTLPPQPHTKEGVDAYNEVIARVRWWVNLNLWQKLKLSRDDAKPLLRLKGFPSFPLVERQANEVDWWDMVCNVKKLINEKKEDGKVFWQNLAGYKRQEALRPYLSSEEDRKKGKKFARYQLGDLLLHLEKKHGEDWGKVYDEAWERIDKKVEGLSKHIKLEEERRSEDAQSKAALTDWLRAKASFVIEGLKEADKDEFCRCELKLQKWYGDLRGKPFAIEAENSILDISGFSKQYNCAFIWQKDGVKKLNLYLIINYFKGGKLRFKKIKPEAFEANRFYTVINKKSGEIVPMEVNFNFDDPNLIILPLAFGKRQGREFIWNDLLSLETGSLKLANGRVIEKTLYNRRTRQDEPALFVALTFERREVLDSSNIKPMNLIGVDRGENIPAVIALTDPEGCPLSRFKDSLGNPTHILRIGESYKEKQRTIQAKKEVEQRRAGGYSRKYASKAKNLADDMVRNTARDLLYYAVTQDAMLIFENLSRGFGRQGKRTFMAERQYTRMEDWLTAKLAYEGLPSKTYLSKTLAQYTSKTCSNCGFTITSADYDRVLEKLKKTATGWMTTINGKELKVEGQITYYNRYKRQNVVKDLSVELDRLSEESVNNDISSWTKGRSGEALSLLKKRFSHRPVQEKFVCLNCGFETHADEQAALNIARSWLFLRSQEYKKYQTNKTTGNTDKRAFVETWQSFYRKKLKEVWKPAV

SEQ ID NO: 36360 - protein, 977 aa, synthetic construct
  REGION 1..977: note = engineered CasX variant
QEIKRLNKIRRRLVKDSNTKKAGKTGPMKTLLVRVMTPDLRERLENLRKKPENIPQPISNTSRANLNKLLTDYTEMKKAILHVYWEEFQKDPVGLMSRVAQPASKKIDQNKLKPEMDEKGNLTTAGFACSQCGQPLFVYKLEQVSEKGKAYTNYFGRCNVAEHEKLILLAQLKPEKDSDEAVTYSLGKFGQRALDFYSIHVTKESTHPVKPLAQIAGNRYASPVGKALSDACMGTIASFLSKYQDIIIEHQKVVKGNQKRLESLRELAGKENLEYPSVTLPPQPHTKEGVDAYNEVIARVRWWVNLNLWQKLKLSRDDAKPLLRLKGFPSFPLVERQANEVDWWDMVCNVKKLINEKKEDGKVFWQNLAGYKRQEALRPYLSSEEDRKKGKKFARYQLGDLLLHLEKKHGEDWGKVYDEAWERIDKKVEGLSKHIKLEEERRSEDAQSKAALTDWLRAKASFVIEGLKEADKDEFCRCELKLQKWYGDLRGKPFAIEAENSILDISGFSKQYNCAFIWQKDGVKKLNLYLIINYFKGGKLRFKKIKPEAFEANRFYTVINKKSGEIVPMEVNFNFDDPNLIILPLAFGKRQGREFIWNDLLSLETGSLKLANGRVIEKTLYNRRTRQDEPALFVALTFERREVLDSSNIKPMNLIGVDRGENIPAVIALTDPEGCPLSRFKDSLGNPTHILRIGESYKEKQRTIQAKKEVEQRRAGGYSRKYASKAKNLADDMVRNTARDLLYYAVTQDAMLIFENLSRGFGRQGKRTFMAERQYTRMEDWLTAKLAYEGLPSKTYLSKTLAQYTSKTCSNCGFTITSADYDRVLEKLKKTATGWMTTINGKELKVEGQITYYNRYKRQNVVKDLSVELDRLSEESVNNDISSWTKGRSGEALSLLKKRFSHRPVQEKFVCLNCGFETHADEQAALNIARSWLFLRSQEYKKYQTNKTTGNTDKRAFVETWQSFYRKKLKEVWKPAV

SEQ ID NO: 36361 - protein, 978 aa, synthetic construct
  REGION 1..978: note = engineered CasX variant
QEIKRINKIRRRLVKDSNTKKAGKTGPMKTLLVRVMTPDLRERLENLRKKPENIPQPISNTSRANLNKLLTDYTEMKKAILHVYWEEFQKDPVGLMSRVAQPASKKIDQNKLKPEMDEKGNLTTAGFACSQCGQPLFVYKLEQVSEKGKAYTNYVGRCNVAEHEKLILLAQLKPEKDSDEAVTYSLGKFGQRALDFYSIHVTKESTHPVKPLAQIAGNRYASYPVGKALSDACMGTIASFLSKYQDIIIEHQKVVKGNQKRLESLRELAGKENLEYPSVTLPPQPHTKEGVDAYNEVIARVRWWVNLNLWQKLKLSRDDAKPLLRLKGFPSFPLVERQANEVDWWDMVCNVKKLINEKKEDGKVFWQNLAGYKRQEALRPYLSSEEDRKKGKKFARYQLGDLLLHLEKKHGEDWGKVYDEAWERIDKKVEGLSKHIKLEEERRSEDAQSKAALTDWLRAKASFVIEGLKEADKDEFCRCELKLQKWYGDLRGKPFAIEAENSILDISGFSKQYNCAFIWQKDGVKKLNLYLIINYFKGGKLRFKKIKPEAFEANRFYTVINKKSGEIVPMEVNFNFDDPNLIILPLAFGKRQGREFIWNDLLSLETGSLKLANGRVIEKTLYNRRTRQDEPALFVALTFERREVLDSSNIKPMNLIGVDRGENIPAVIALTDPEGCPLSRFKDSLGNPTHILRIGESYKEKQRTIQAKKEVEQRRAGGYSRKYASKAKNLADDMVRNTARDLLYYAVTQDAMLIFENLSRGFGRQGKRTFMAERQYTRMEDWLTAKLAYEGLPSKTYLSKTLAQYTSKTCSNCGFTITSADYDRVLEKLKKTATGWMTTINGKELKVEGQITYYNRYKRQNVVKDLSVELDRLSEESVNNDISSWTKGRSGEALSLLKKRFSHRPVQEKFVCLNCGFETHADEQAALNIARSWLFLRSQEYKKYQTNKTTGNTDKRAFVETWQSFYRKKLKEVWKPAV

SEQ ID NO: 36362 - protein, 978 aa, synthetic construct
  REGION 1..978: note = engineered CasX variant
QEIKRINKIRRRLVKDSNTKKAGKTGPMKTLLVRVMTPDLRERLENLRKKPENIPQPISNTSRANLNKLLTDYTEMKKAILHVYWEEFQKDPVGLMSRVAQPASKKIDQNKLKPEMDEKGNLTTAGFACSQCGQPLFVYKLEQVSEKGKAYTNYVGRCNVAEHEKLILLAQLKPEKDSDEAVTYSLGKFGQRALDFYSIHVTKESTHPVKPLAQIAGNRYASHPVGKALSDACMGTIASFLSKYQDIIIEHQKVVKGNQKRLESLRELAGKENLEYPSVTLPPQPHTKEGVDAYNEVIARVRWWVNLNLWQKLKLSRDDAKPLLRLKGFPSFPLVERQANEVDWWDMVCNVKKLINEKKEDGKVFWQNLAGYKRQEALRPYLSSEEDRKKGKKFARYQLGDLLLHLEKKHGEDWGKVYDEAWERIDKKVEGLSKHIKLEEERRSEDAQSKAALTDWLRAKASFVIEGLKEADKDEFCRCELKLQKWYGDLRGKPFAIEAENSILDISGFSKQYNCAFIWQKDGVKKLNLYLIINYFKGGKLRFKKIKPEAFEANRFYTVINKKSGEIVPMEVNFNFDDPNLIILPLAFGKRQGREFIWNDLLSLETGSLKLANGRVIEKTLYNRRTRQDEPALFVALTFERREVLDSSNIKPMNLIGVDRGENIPAVIALTDPEGCPLSRFKDSLGNPTHILRIGESYKEKQRTIQAKKEVEQRRAGGYSRKYASKAKNLADDMVRNTARDLLYYAVTQDAMLIFENLSRGFGRQGKRTFMAERQYTRMEDWLTAKLAYEGLPSKTYLSKTLAQYTSKTCSNCGFTITSADYDRVLEKLKKTATGWMTTINGKELKVEGQITYYNRYKRQNVVKDLSVELDRLSEESVNNDISSWTKGRSGEALSLLKKRFSHRPVQEKFVCLNCGFETHADEQAALNIARSWLFLRSQEYKKYQTNKTTGNTDKRAFVETWQSFYRKKLKEVWKPAV

SEQ ID NO: 36363 - protein, 978 aa, synthetic construct
  REGION 1..978: note = engineered CasX variant
QEIKRINKIRRRLVKDSNTKKAGKTGPMKTLLVRVMTPDLRERLENLRKKPENIPQPISNTSRANLNKLLTDYTEMKKAILHVYWEEFQKDPVGLMSRVAQPASKKIDQNKLKPEMDEKGNLTTAGFACSQCGQPLFVYKLEQVSEKGKAYTNYVGRCNVAEHEKLILLAQLKPEKDSDEAVTYSLGKFGQRALDFYSIHVTKESTHPVKPLAQIAGNRYASSPVGKALSDACMGTIASFLSKYQDIIIEHQKVVKGNQKRLESLRELAGKENLEYPSVTLPPQPHTKEGVDAYNEVIARVRWWVNLNLWQKLKLSRDDAKPLLRLKGFPSFPLVERQANEVDWWDMVCNVKKLINEKKEDGKVFWQNLAGYKRQEALRPYLSSEEDRKKGKKFARYQLGDLLLHLEKKHGEDWGKVYDEAWERIDKKVEGLSKHIKLEEERRSEDAQSKAALTDWLRAKASFVIEGLKEADKDEFCRCELKLQKWYGDLRGKPFAIEAENSILDISGFSKQYNCAFIWQKDGVKKLNLYLIINYFKGGKLRFKKIKPEAFEANRFYTVINKKSGEIVPMEVNFNFDDPNLIILPLAFGKRQGREFIWNDLLSLETGSLKLANGRVIEKTLYNRRTRQDEPALFVALTFERREVLDSSNIKPMNLIGVDRGENIPAVIALTDPEGCPLSRFKDSLGNPTHILRIGESYKEKQRTIQAKKEVEQRRAGGYSRKYASKAKNLADDMVRNTARDLLYYAVTQDAMLIFENLSRGFGRQGKRTFMAERQYTRMEDWLTAKLAYEGLPSKTYLSKTLAQYTSKTCSNCGFTITSADYDRVLEKLKKTATGWMTTINGKELKVEGQITYYNRYKRQNVVKDLSVELDRLSEESVNNDISSWTKGRSGEALSLLKKRFSHRPVQEKFVCLNCGFETHADEQAALNIARSWLFLRSQEYKKYQTNKTTGNTDKRAFVETWQSFYRKKLKEVWKPAV

SEQ ID NO: 36364 - protein, 978 aa, synthetic construct
  REGION 1..978: note = engineered CasX variant
QEIKRINKIRRRLVKDSNTKKAGKTGPMKTLLVRVMTPDLRERLENLRKKPENIPQPISNTSRANLNKLLTDYTEMKKAILHVYWEEFQKDPVGLMSRVAQPASKKIDQNKLKPEMDEKGNLTTAGFACSQCGQPLFVYKLEQVSEKGKAYTNYVGRCNVAEHEKLILLAQLKPEKDSDEAVTYSLGKFGQRALDFYSIHVTKESTHPVKPLAQIAGNRYASTPVGKALSDACMGTIASFLSKYQDIIIEHQKVVKGNQKRLESLRELAGKENLEYPSVTLPPQPHTKEGVDAYNEVIARVRWWVNLNLWQKLKLSRDDAKPLLRLKGFPSFPLVERQANEVDWWDMVCNVKKLINEKKEDGKVFWQNLAGYKRQEALRPYLSSEEDRKKGKKFARYQLGDLLLHLEKKHGEDWGKVYDEAWERIDKKVEGLSKHIKLEEERRSEDAQSKAALTDWLRAKASFVIEGLKEADKDEFCRCELKLQKWYGDLRGKPFAIEAENSILDISGFSKQYNCAFIWQKDGVKKLNLYLIINYFKGGKLRFKKIKPEAFEANRFYTVINKKSGEIVPMEVNFNFDDPNLIILPLAFGKRQGREFIWNDLLSLETGSLKLANGRVIEKTLYNRRTRQDEPALFVALTFERREVLDSSNIKPMNLIGVDRGENIPAVIALTDPEGCPLSRFKDSLGNPTHILRIGESYKEKQRTIQAKKEVEQRRAGGYSRKYASKAKNLADDMVRNTARDLLYYAVTQDAMLIFENLSRGFGRQGKRTFMAERQYTRMEDWLTAKLAYEGLPSKTYLSKTLAQYTSKTCSNCGFTITSADYDRVLEKLKKTATGWMTTINGKELKVEGQITYYNRYKRQNVVKDLSVELDRLSEESVNNDISSWTKGRSGEALSLLKKRFSHRPVQEKFVCLNCGFETHADEQAALNIARSWLFLRSQEYKKYQTNKTTGNTDKRAFVETWQSFYRKKLKEVWKPAV

SEQ ID NO: 36365 - protein, 978 aa, synthetic construct
  REGION 1..978: note = engineered CasX variant
QEIKRINKIRRRLVKDSNTKKAGKTGPMKTLLVRVMTPDLRERLENLRKKPENIPQPISNTSRANLNKLLTDYTEMKKAILHVYWEEFQKDPVGLMSRVAQPASKKIDQNKLKPEMDEKGNLTTAGFACSQCGQPLFVYKLEQVSEKGKAYTNYVGRCNVAEHEKLILLAQLKPEKDSDEAVTYSLGKFGQRALDFYSIHVTKESTHPVKPLAQIAGNRYASAPVGKALSDACMGTIASFLSKYQDIIIEHQKVVKGNQKRLESLRELAGKENLEYPSVTLPPQPHTKEGVDAYNEVIARVRWWVNLNLWQKLKLSRDDAKPLLRLKGFPSFPLVERQANEVDWWDMVCNVKKLINEKKEDGKVFWQNLAGYKRQEALRPYLSSEEDRKKGKKFARYQLGDLLLHLEKKHGEDWGKVYDEAWERIDKKVEGLSKHIKLEEERRSEDAQSKAALTDWLRAKASFVIEGLKEADKDEFCRCELKLQKWYGDLRGKPFAIEAENSILDISGFSKQYNCAFIWQKDGVKKLNLYLIINYFKGGKLRFKKIKPEAFEANRFYTVINKKSGEIVPMEVNFNFDDPNLIILPLAFGKRQGREFIWNDLLSLETGSLKLANGRVIEKTLYNRRTRQDEPALFVALTFERREVLDSSNIKPMNLIGVDRGENIPAVIALTDPEGCPLSRFKDSLGNPTHILRIGESYKEKQRTIQAKKEVEQRRAGGYSRKYASKAKNLADDMVRNTARDLLYYAVTQDAMLIFENLSRGFGRQGKRTFMAERQYTRMEDWLTAKLAYEGLPSKTYLSKTLAQYTSKTCSNCGFTITSADYDRVLEKLKKTATGWMTTINGKELKVEGQITYYNRYKRQNVVKDLSVELDRLSEESVNNDISSWTKGRSGEALSLLKKRFSHRPVQEKFVCLNCGFETHADEQAALNIARSWLFLRSQEYKKYQTNKTTGNTDKRAFVETWQSFYRKKLKEVWKPAV

SEQ ID NO: 36366 - protein, 978 aa, synthetic construct
  REGION 1..978: note = engineered CasX variant
QEIKRINKIRRRLVKDSNTKKAGKTGPMKTLLVRVMTPDLRERLENLRKKPENIPQPISNTSRANLNKLLTDYTEMKKAILHVYWEEFQKDPVGLMSRVAQPASKKIDQNKLKPEMDEKGNLTTAGFACSQCGQPLFVYKLEQVSEKGKAYTNYVGRCNVAEHEKLILLAQLKPEKDSDEAVTYSLGKFGQRALDFYSIHVTKESTHPVKPLAQIAGNRYASVPVGKALSDACMGTIASFLSKYQDIIIEHQKVVKGNQKRLESLRELAGKENLEYPSVTLPPQPHTKEGVDAYNEVIARVRWWVNLNLWQKLKLSRDDAKPLLRLKGFPSFPLVERQANEVDWWDMVCNVKKLINEKKEDGKVFWQNLAGYKRQEALRPYLSSEEDRKKGKKFARYQLGDLLLHLEKKHGEDWGKVYDEAWERIDKKVEGLSKHIKLEEERRSEDAQSKAALTDWLRAKASFVIEGLKEADKDEFCRCELKLQKWYGDLRGKPFAIEAENSILDISGFSKQYNCAFIWQKDGVKKLNLYLIINYFKGGKLRFKKIKPEAFEANRFYTVINKKSGEIVPMEVNFNFDDPNLIILPLAFGKRQGREFIWNDLLSLETGSLKLANGRVIEKTLYNRRTRQDEPALFVALTFERREVLDSSNIKPMNLIGVDRGENIPAVIALTDPEGCPLSRFKDSLGNPTHILRIGESYKEKQRTIQAKKEVEQRRAGGYSRKYASKAKNLADDMVRNTARDLLYYAVTQDAMLIFENLSRGFGRQGKRTFMAERQYTRMEDWLTAKLAYEGLPSKTYLSKTLAQYTSKTCSNCGFTITSADYDRVLEKLKKTATGWMTTINGKELKVEGQITYYNRYKRQNVVKDLSVELDRLSEESVNNDISSWTKGRSGEALSLLKKRFSHRPVQEKFVCLNCGFETHADEQAALNIARSWLFLRSQEYKKYQTNKTTGNTDKRAFVETWQSFYRKKLKEVWKPAV

SEQ ID NO: 36367 - protein, 978 aa, synthetic construct
  REGION 1..978: note = engineered CasX variant
QEIKRINKIRRRLVKDSNTKKAGKTGPMKTLLVRVMTPDLRERLENLRKKPENIPQPISNTSRANLNKLLTDYTEMKKAILHVYWEEFQKDPVGLMSRVAQPASKKIDQNKLKPEMDEKGNLTTAGFACSQCGQPLFVYKLEQVSEKGKAYTNYVGRCNVAEHEKLIKLAQLKPEKDSDEAVTYSLGKFGQRALDFYSIHVTKESTHPVKPLAQIAGNRYASGPVGKALSDACMGTIASFLSKYQDIIIEHQKVVKGNQKRLESLRELAGKENLEYPSVTLPPQPHTKEGVDAYNEVIARVRWWVNLNLWQKLKLSRDDAKPLLRLKGFPSFPLVERQANEVDWWDMVCNVKKLINEKKEDGKVFWQNLAGYKRQEALRPYLSSEEDRKKGKKFARYQLGDLLLHLEKKHGEDWGKVYDEAWERIDKKVEGLSKHIKLEEERRSEDAQSKAALTDWLRAKASFVIEGLKEADKDEFCRCELKLQKWYGDLRGKPFAIEAENSILDISGFSKQYNCAFIWQKDGVKKLNLYLIINYFKGGKLRFKKIKPEAFEANRFYTVINKKSGEIVPMEVNFNFDDPNLIILPLAFGKRQGREFIWNDLLSLETGSLKLANGRVIEKTLYNRRTRQDEPALFVALTFERREVLDSSNIKPMNLIGVDRGENIPAVIALTDPEGCPLSRFKDSLGNPTHILRIGESYKEKQRTIQAKKEVEQRRAGGYSRKYASKAKNLADDMVRNTARDLLYYAVTQDAMLIFENLSRGFGRQGKRTFMAERQYTRMEDWLTAKLAYEGLPSKTYLSKTLAQYTSKTCSNCGFTITSADYDRVLEKLKKTATGWMTTINGKELKVEGQITYYNRYKRQNVVKDLSVELDRLSEESVNNDISSWTKGRSGEALSLLKKRFSHRPVQEKFVCLNCGFETHADEQAALNIARSWLFLRSQEYKKYQTNKTTGNTDKRAFVETWQSFYRKKLKEVWKPAV

SEQ ID NO: 36368 - protein, 977 aa, synthetic construct
  REGION 1..977: note = engineered CasX variant
QEIKRINKIRRRLVKDSNTKKAGKTGPMKTLLVRVMTPDLRERLENLRKKPENIPQPISNTSRANLNKLLTDYTEMKKAILHVYWEEFQKDPVGLMSRVAQPASKKIDQNKLKPEMDEKGNLTTAGFACSQCGQPLFVYKLEQVSEKGKAYTNYVGRCNVAEHEKLILLAQLKPEKDSDEAVTYSLGKFGQRALDFYSIHVTKESTHPVKPLAQIAGNRYASPVGKALSDACMGTIASFLSKYQDIIIEHQKVVKGNQKRLESLRELAGKENLEYPSVTLPPQPHTKEGVDAYNEVIARVRWWVNLNLWQKLKLSRDDAKPLLRLKGFPSFPLVERQANEVDWWDMVCNVKKLINEKKEDGKVFWQNLAGYKRQEALRPYLSSEEDRKKGKKFARYQLGDLLLHLEKKHGEDWGKVYDEAWERIDKKVEGLSKHIKLEEERRSEDAQSKAALTDWLRAKASFVIEGLKEADKDEFCRCELKLQKWYGDLRGKPFAIEAENSILDISGFSKQYNCAFIWQKDGVKKLNLYLIINYFKGGKLRFKKIKPEAFEANRFYTVINKKSGEIVPMEVNFNFDDPNLIILPLAFGKRQGREFIWNDLLSLETGSLKLANGRVIEKTLYNRRTRQDEPALFVALTFERREVLDSSNIKPMNLIGVDRGENIPAVIALTDPEGCPLSRFKDSLGNPTHILRIGESYKEKQRTIQAKKEVEQRRAGGYSRKYASKAKNLADDMVRNTARDLLYYAVTQDAMLIFENLSRGFGRQGKRTFMAERQYTRMEDWLTAKLAYEGLPSKTYLSKTLAQYTSKTCSNCGFTITSADYDRVLEKLKKTATGWMTTINGKELKVEGQITYYNRYKRQNVVKDLSVELDRLSEESVNNDISSWTKGRSGEALSLLKKRFSHRPVQEKFVCLNCGFETHADEQAALNIARSWLFLRSQEYKKYQTNKTTGNTDKRAFVETWQSFYRKKLKEVWKPAV

SEQ ID NO: 36369 - protein, 978 aa, synthetic construct
  REGION 1..978: note = engineered CasX variant
QEIKRINKIRRRLVKDSNTKKAGKTGPMKTLLVRVMTPDLRERLENLRKKPENIPQPISNTSRANLNKLLTDYTEMKKAILHVYWEEFQKDPVGLMSRVAQPASKKIDQNKLKPEMDEKGNLTTAGFACSQCGQPLFVYKLEQVSEKGKAYTNYFGRCNVAEHEKLILLAQLKPEKDSDEAVTYSLGKFGQRALDFYSIHVTKESTHPVKPLAQIAGNRYASYPVGKALSDACMGTIASFLSKYQDIIIEHQKVVKGNQKRLESLRELAGKENLEYPSVTLPPQPHTKEGVDAYNEVIARVRWWVNLNLWQKLKLSRDDAKPLLRLKGFPSFPLVERQANEVDWWDMVCNVKKLINEKKEDGKVFWQNLAGYKRQEALRPYLSSEEDRKKGKKFARYQLGDLLLHLEKKHGEDWGKVYDEAWERIDKKVEGLSKHIKLEEERRSEDAQSKAALTDWLRAKASFVIEGLKEADKDEFCRCELKLQKWYGDLRGKPFAIEAENSILDISGFSKQYNCAFIWQKDGVKKLNLYLIINYFKGGKLRFKKIKPEAFEANRFYTVINKKSGEIVPMEVNFNFDDPNLIILPLAFGKRQGREFIWNDLLSLETGSLKLANGRVIEKTLYNRRTRQDEPALFVALTFERREVLDSSNIKPMNLIGVDRGENIPAVIALTDPEGCPLSRFKDSLGNPTHILRIGESYKEKQRTIQAKKEVEQRRAGGYSRKYASKAKNLADDMVRNTARDLLYYAVTQDAMLIFENLSRGFGRQGKRTFMAERQYTRMEDWLTAKLAYEGLASKTYLSKTLAQYTSKTCSNCGFTITSADYDRVLEKLKKTATGWMTTINGKELKVEGQITYYNRYKRQNVVKDLSVELDRLSEESVNNDISSWTKGRSGEALSLLKKRFSHRPVQEKFVCLNCGFETHADEQAALNIARSWLFLRSQEYKKYQTNKTTGNTDKRAFVETWQSFYRKKLKEVWKPAV

SEQ ID NO: 36370 - protein, 978 aa, synthetic construct
  REGION 1..978: note = engineered CasX variant
QEIKRINKIRRRLVKDSNTKKAGKTGPMKTLLVRVMTPDLRERLENLRKKPENIPQPISNTSRANLNKLLTDYTEMKKAILHVYWEEFQKDPVGLMSRVAQPASKKIDQNKLKPEMDEKGNLTTAGFACSQCGQPLFVYKLEQVSEKGKAYTNYFGRCNVAEHEKLILLAQLKPEKDSDEAVTYSLGKFGQRALDFYSIHVTKESTHPVKPLAQIAGNRYASHPVGKALSDACMGTIASFLSKYQDIIIEHQKVVKGNQKRLESLRELAGKENLEYPSVTLPPQPHTKEGVDAYNEVIARVRWWVNLNLWQKLKLSRDDAKPLLRLKGFPSFPLVERQANEVDWWDMVCNVKKLINEKKEDGKVFWQNLAGYKRQEALRPYLSSEEDRKKGKKFARYQLGDLLLHLEKKHGEDWGKVYDEAWERIDKKVEGLSKHIKLEEERRSEDAQSKAALTDWLRAKASFVIEGLKEADKDEFCRCELKLQKWYGDLRGKPFAIEAENSILDISGFSKQYNCAFIWQKDGVKKLNLYLIINYFKGGKLRFKKIKPEAFEANRFYTVINKKSGEIVPMEVNFNFDDPNLIILPLAFGKRQGREFIWNDLLSLETGSLKLANGRVIEKTLYNRRTRQDEPALFVALTFERREVLDSSNIKPMNLIGVDRGENIPAVIALTDPEGCPLSRFKDSLGNPTHILRIGESYKEKQRTIQAKKEVEQRRAGGYSRKYASKAKNLADDMVRNTARDLLYYAVTQDAMLIFENLSRGFGRQGKRTFMAERQYTRMEDWLTAKLAYEGLASKTYLSKTLAQYTSKTCSNCGFTITSADYDRVLEKLKKTATGWMTTINGKELKVEGQITYYNRYKRQNVVKDLSVELDRLSEESVNNDISSWTKGRSGEALSLLKKRFSHRPVQEKFVCLNCGFETHADEQAALNIARSWLFLRSQEYKKYQTNKTTGNTDKRAFVETWQSFYRKKLKEVWKPAV

SEQ ID NO: 36371 - protein, 978 aa, synthetic construct
  REGION 1..978: note = engineered CasX variant
QEIKRINKIRRRLVKDSNTKKAGKTGPMKTLLVRVMTPDLRERLENLRKKPENIPQPISNTSRANLNKLLTDYTEMKKAILHVYWEEFQKDPVGLMSRVAQPASKKIDQNKLKPEMDEKGNLTTAGFACSQCGQPLFVYKLEQVSEKGKAYTNYFGRCNVAEHEKLILLAQLKPEKDSDEAVTYSLGKFGQRALDFYSIHVTKESTHPVKPLAQIAGNRYASSPVGKALSDACMGTIASFLSKYQDIIIEHQKVVKGNQKRLESLRELAGKENLEYPSVTLPPQPHTKEGVDAYNEVIARVRWWVNLNLWQKLKLSRDDAKPLLRLKGFPSFPLVERQANEVDWWDMVCNVKKLINEKKEDGKVFWQNLAGYKRQEALRPYLSSEEDRKKGKKFARYQLGDLLLHLEKKHGEDWGKVYDEAWERIDKKVEGLSKHIKLEEERRSEDAQSKAALTDWLRAKASFVIEGLKEADKDEFCRCELKLQKWYGDLRGKPFAIEAENSILDISGFSKQYNCAFIWQKDGVKKLNLYLIINYFKGGKLRFKKIKPEAFEANRFYTVINKKSGEIVPMEVNFNFDDPNLIILPLAFGKRQGREFIWNDLLSLETGSLKLANGRVIEKTLYNRRTRQDEPALFVALTFERREVLDSSNIKPMNLIGVDRGENIPAVIALTDPEGCPLSRFKDSLGNPTHILRIGESYKEKQRTIQAKKEVEQRRAGGYSRKYASKAKNLADDMVRNTARDLLYYAVTQDAMLIFENLSRGFGRQGKRTFMAERQYTRMEDWLTAKLAYEGLASKTYLSKTLAQYTSKTCSNCGFTITSADYDRVLEKLKKTATGWMTTINGKELKVEGQITYYNRYKRQNVVKDLSVELDRLSEESVNNDISSWTKGRSGEALSLLKKRFSHRPVQEKFVCLNCGFETHADEQAALNIARSWLFLRSQEYKKYQTNKTTGNTDKRAFVETWQSFYRKKLKEVWKPAV

SEQ ID NO: 36372 - protein, 978 aa, synthetic construct
  REGION 1..978: note = engineered CasX variant
QEIKRINKIRRRLVKDSNTKKAGKTGPMKTLLVRVMTPDLRERLENLRKKPENIPQPISNTSRANLNKLLTDYTEMKKAILHVYWEEFQKDPVGLMSRVAQPASKKIDQNKLKPEMDEKGNLTTAGFACSQCGQPLFVYKLEQVSEKGKAYTNYFGRCNVAEHEKLILLAQLKPEKDSDEAVTYSLGKFGQRALDFYSIHVTKESTHPVKPLAQIAGNRYASTPVGKALSDACMGTIASFLSKYQDIIIEHQKVVKGNQKRLESLRELAGKENLEYPSVTLPPQPHTKEGVDAYNEVIARVRWWVNLNLWQKLKLSRDDAKPLLRLKGFPSFPLVERQANEVDWWDMVCNVKKLINEKKEDGKVFWQNLAGYKRQEALRPYLSSEEDRKKGKKFARYQLGDLLLHLEKKHGEDWGKVYDEAWERIDKKVEGLSKHIKLEEERRSEDAQSKAALTDWLRAKASFVIEGLKEADKDEFCRCELKLQKWYGDLRGKPFAIEAENSILDISGFSKQYNCAFIWQKDGVKKLNLYLIINYFKGGKLRFKKIKPEAFEANRFYTVINKKSGEIVPMEVNFNFDDPNLIILPLAFGKRQGREFIWNDLLSLETGSLKLANGRVIEKTLYNRRTRQDEPALFVALTFERREVLDSSNIKPMNLIGVDRGENIPAVIALTDPEGCPLSRFKDSLGNPTHILRIGESYKEKQRTIQAKKEVEQRRAGGYSRKYASKAKNLADDMVRNTARDLLYYAVTQDAMLIFENLSRGFGRQGKRTFMAERQYTRMEDWLTAKLAYEGLASKTYLSKTLAQYTSKTCSNCGFTITSADYDRVLEKLKKTATGWMTTINGKELKVEGQITYYNRYKRQNVVKDLSVELDRLSEESVNNDISSWTKGRSGEALSLLKKRFSHRPVQEKFVCLNCGFETHADEQAALNIARSWLFLRSQEYKKYQTNKTTGNTDKRAFVETWQSFYRKKLKEVWKPAV

SEQ ID NO: 36373 - protein, 978 aa, synthetic construct
  REGION 1..978: note = engineered CasX variant
QEIKRINKIRRRLVKDSNTKKAGKTGPMKTLLVRVMTPDLRERLENLRKKPENIPQPISNTSRANLNKLLTDYTEMKKAILHVYWEEFQKDPVGLMSRVAQPASKKIDQNKLKPEMDEKGNLTTAGFACSQCGQPLFVYKLEQVSEKGKAYTNYFGRCNVAEHEKLILLAQLKPEKDSDEAVTYSLGKFGQRALDFYSIHVTKESTHPVKPLAQIAGNRYASAPVGKALSDACMGTIASFLSKYQDIIIEHQKVVKGNQKRLESLRELAGKENLEYPSVTLPPQPHTKEGVDAYNEVIARVRWWVNLNLWQKLKLSRDDAKPLLRLKGFPSFPLVERQANEVDWWDMVCNVKKLINEKKEDGKVFWQNLAGYKRQEALRPYLSSEEDRKKGKKFARYQLGDLLLHLEKKHGEDWGKVYDEAWERIDKKVEGLSKHIKLEEERRSEDAQSKAALTDWLRAKASFVIEGLKEADKDEFCRCELKLQKWYGDLRGKPFAIEAENSILDISGFSKQYNCAFIWQKDGVKKLNLYLIINYFKGGKLRFKKIKPEAFEANRFYTVINKKSGEIVPMEVNFNFDDPNLIILPLAFGKRQGREFIWNDLLSLETGSLKLANGRVIEKTLYNRRTRQDEPALFVALTFERREVLDSSNIKPMNLIGVDRGENIPAVIALTDPEGCPLSRFKDSLGNPTHILRIGESYKEKQRTIQAKKEVEQRRAGGYSRKYASKAKNLADDMVRNTARDLLYYAVTQDAMLIFENLSRGFGRQGKRTFMAERQYTRMEDWLTAKLAYEGLASKTYLSKTLAQYTSKTCSNCGFTITSADYDRVLEKLKKTATGWMTTINGKELKVEGQITYYNRYKRQNVVKDLSVELDRLSEESVNNDISSWTKGRSGEALSLLKKRFSHRPVQEKFVCLNCGFETHADEQAALNIARSWLFLRSQEYKKYQTNKTTGNTDKRAFVETWQSFYRKKLKEVWKPAV

SEQ ID NO: 36374 - protein, 978 aa, synthetic construct
  REGION 1..978: note = engineered CasX variant
QEIKRINKIRRRLVKDSNTKKAGKTGPMKTLLVRVMTPDLRERLENLRKKPENIPQPISNTSRANLNKLLTDYTEMKKAILHVYWEEFQKDPVGLMSRVAQPASKKIDQNKLKPEMDEKGNLTTAGFACSQCGQPLFVYKLEQVSEKGKAYTNYFGRCNVAEHEKLILLAQLKPEKDSDEAVTYSLGKFGQRALDFYSIHVTKESTHPVKPLAQIAGNRYASVPVGKALSDACMGTIASFLSKYQDIIIEHQKVVKGNQKRLESLRELAGKENLEYPSVTLPPQPHTKEGVDAYNEVIARVRWWVNLNLWQKLKLSRDDAKPLLRLKGFPSFPLVERQANEVDWWDMVCNVKKLINEKKEDGKVFWQNLAGYKRQEALRPYLSSEEDRKKGKKFARYQLGDLLLHLEKKHGEDWGKVYDEAWERIDKKVEGLSKHIKLEEERRSEDAQSKAALTDWLRAKASFVIEGLKEADKDEFCRCELKLQKWYGDLRGKPFAIEAENSILDISGFSKQYNCAFIWQKDGVKKLNLYLIINYFKGGKLRFKKIKPEAFEANRFYTVINKKSGEIVPMEVNFNFDDPNLIILPLAFGKRQGREFIWNDLLSLETGSLKLANGRVIEKTLYNRRTRQDEPALFVALTFERREVLDSSNIKPMNLIGVDRGENIPAVIALTDPEGCPLSRFKDSLGNPTHILRIGESYKEKQRTIQAKKEVEQRRAGGYSRKYASKAKNLADDMVRNTARDLLYYAVTQDAMLIFENLSRGFGRQGKRTFMAERQYTRMEDWLTAKLAYEGLASKTYLSKTLAQYTSKTCSNCGFTITSADYDRVLEKLKKTATGWMTTINGKELKVEGQITYYNRYKRQNVVKDLSVELDRLSEESVNNDISSWTKGRSGEALSLLKKRFSHRPVQEKFVCLNCGFETHADEQAALNIARSWLFLRSQEYKKYQTNKTTGNTDKRAFVETWQSFYRKKLKEVWKPAV

SEQ ID NO: 36375 - protein, 978 aa, synthetic construct
  REGION 1..978: note = engineered CasX variant
QEIKRINKIRRRLVKDSNTKKAGKTGPMKTLLVRVMTPDLRERLENLRKKPENIPQPISNTSRANLNKLLTDYTEMKKAILHVYWEEFQKDPVGLMSRVAQPASKKIDQNKLKPEMDEKGNLTTAGFACSQCGQPLFVYKLEQVSEKGKAYTNYFGRCNVAEHEKLIKLAQLKPEKDSDEAVTYSLGKFGQRALDFYSIHVTKESTHPVKPLAQIAGNRYASGPVGKALSDACMGTIASFLSKYQDIIIEHQKVVKGNQKRLESLRELAGKENLEYPSVTLPPQPHTKEGVDAYNEVIARVRWWVNLNLWQKLKLSRDDAKPLLRLKGFPSFPLVERQANEVDWWDMVCNVKKLINEKKEDGKVFWQNLAGYKRQEALRPYLSSEEDRKKGKKFARYQLGDLLLHLEKKHGEDWGKVYDEAWERIDKKVEGLSKHIKLEEERRSEDAQSKAALTDWLRAKASFVIEGLKEADKDEFCRCELKLQKWYGDLRGKPFAIEAENSILDISGFSKQYNCAFIWQKDGVKKLNLYLIINYFKGGKLRFKKIKPEAFEANRFYTVINKKSGEIVPMEVNFNFDDPNLIILPLAFGKRQGREFIWNDLLSLETGSLKLANGRVIEKTLYNRRTRQDEPALFVALTFERREVLDSSNIKPMNLIGVDRGENIPAVIALTDPEGCPLSRFKDSLGNPTHILRIGESYKEKQRTIQAKKEVEQRRAGGYSRKYASKAKNLADDMVRNTARDLLYYAVTQDAMLIFENLSRGFGRQGKRTFMAERQYTRMEDWLTAKLAYEGLASKTYLSKTLAQYTSKTCSNCGFTITSADYDRVLEKLKKTATGWMTTINGKELKVEGQITYYNRYKRQNVVKDLSVELDRLSEESVNNDISSWTKGRSGEALSLLKKRFSHRPVQEKFVCLNCGFETHADEQAALNIARSWLFLRSQEYKKYQTNKTTGNTDKRAFVETWQSFYRKKLKEVWKPAV

SEQ ID NO: 36376 - protein, 977 aa, synthetic construct
  REGION 1..977: note = engineered CasX variant
QEIKRINKIRRRLVKDSNTKKAGKTGPMKTLLVRVMTPDLRERLENLRKKPENIPQPISNTSRANLNKLLTDYTEMKKAILHVYWEEFQKDPVGLMSRVAQPASKKIDQNKLKPEMDEKGNLTTAGFACSQCGQPLFVYKLEQVSEKGKAYTNYFGRCNVAEHEKLILLAQLKPEKDSDEAVTYSLGKFGQRALDFYSIHVTKESTHPVKPLAQIAGNRYASPVGKALSDACMGTIASFLSKYQDIIIEHQKVVKGNQKRLESLRELAGKENLEYPSVTLPPQPHTKEGVDAYNEVIARVRWWVNLNLWQKLKLSRDDAKPLLRLKGFPSFPLVERQANEVDWWDMVCNVKKLINEKKEDGKVFWQNLAGYKRQEALRPYLSSEEDRKKGKKFARYQLGDLLLHLEKKHGEDWGKVYDEAWERIDKKVEGLSKHIKLEEERRSEDAQSKAALTDWLRAKASFVIEGLKEADKDEFCRCELKLQKWYGDLRGKPFAIEAENSILDISGFSKQYNCAFIWQKDGVKKLNLYLIINYFKGGKLRFKKIKPEAFEANRFYTVINKKSGEIVPMEVNFNFDDPNLIILPLAFGKRQGREFIWNDLLSLETGSLKLANGRVIEKTLYNRRTRQDEPALFVALTFERREVLDSSNIKPMNLIGVDRGENIPAVIALTDPEGCPLSRFKDSLGNPTHILRIGESYKEKQRTIQAKKEVEQRRAGGYSRKYASKAKNLADDMVRNTARDLLYYAVTQDAMLIFENLSRGFGRQGKRTFMAERQYTRMEDWLTAKLAYEGLASKTYLSKTLAQYTSKTCSNCGFTITSADYDRVLEKLKKTATGWMTTINGKELKVEGQITYYNRYKRQNVVKDLSVELDRLSEESVNNDISSWTKGRSGEALSLLKKRFSHRPVQEKFVCLNCGFETHADEQAALNIARSWLFLRSQEYKKYQTNKTTGNTDKRAFVETWQSFYRKKLKEVWKPAV

SEQ ID NO: 36377 - protein, 978 aa, synthetic construct
  REGION 1..978: note = engineered CasX variant
QEIKRINKIRRRLVKDSNTKKAGKTGPMKTLLVRVMTPDLRERLENLRKKPENIPQPISNTSRANLNKLLTDYTEMKKAILHVYWEEFQKDPVGLMSRVAQPASKKIDQNKLKPEMDEKGNLTTAGFACSQCGQPLFVYKLEQVSEKGKAYTNYFGRCNVAEHEKLILLAQLKPEKDSDEAVTYSLGKFGQRALDFYSIHVTKESTHPVKPLAQIAGNRYASYPVGKALSDACMGTIASFLSKYQDIIIEHQKVVKGNQKRLESLRELAGKENLEYPSVTLPPQPHTKEGVDAYNEVIARVRWWVNLNLWQKLKLSRDDAKPLLRLKGFPSFPLVERQANEVDWWDMVCNVKKLINEKKEDGKVFWQNLAGYKRQEALRPYLSSEEDRKKGKKFARYQLGDLLLHLEKKHGEDWGKVYDEAWERIDKKVEGLSKHIKLEEERRSEDAQSKAALTDWLRAKASFVIEGLKEADKDEFCRCELKLQKWYGDLRGKPFAIEAENSILDISGFSKQYNCAFIWQKDGVKKLNLYLIINYFKGGKLRFKKIKPEAFEANRFYTVINKKSGEIVPMEVNFNFDDPNLIILPLAFGKRQGREFIWNDLLSLETGSLKLANGRVIEKTLYNRRTRQDEPALFVALTFERREVLDSSNIKPMNLIGVDRGENIPAVIALTDPEGCPLSRFKDSLGNPTHILRIGESYKEKQRTIQAKKEVEQRRAGGYSRKYASKAKNLADDMVRNTARDLLYYAVTQDAMLIFENLSRGFGRQGKRTFMAERQYTRMEDWLTAKLAYEGLPSKVYLSKTLAQYTSKTCSNCGFTITSADYDRVLEKLKKTATGWMTTINGKELKVEGQITYYNRYKRQNVVKDLSVELDRLSEESVNNDISSWTKGRSGEALSLLKKRFSHRPVQEKFVCLNCGFETHADEQAALNIARSWLFLRSQEYKKYQTNKTTGNTDKRAFVETWQSFYRKKLKEVWKPAV

SEQ ID NO: 36378 - protein, 978 aa, synthetic construct
  REGION 1..978: note = engineered CasX variant
QEIKRINKIRRRLVKDSNTKKAGKTGPMKTLLVRVMTPDLRERLENLRKKPENIPQPISNTSRANLNKLLTDYTEMKKAILHVYWEEFQKDPVGLMSRVAQPASKKIDQNKLKPEMDEKGNLTTAGFACSQCGQPLFVYKLEQVSEKGKAYTNYFGRCNVAEHEKLILLAQLKPEKDSDEAVTYSLGKFGQRALDFYSIHVTKESTHPVKPLAQIAGNRYASHPVGKALSDACMGTIASFLSKYQDIIIEHQKVVKGNQKRLESLRELAGKENLEYPSVTLPPQPHTKEGVDAYNEVIARVRWWVNLNLWQKLKLSRDDAKPLLRLKGFPSFPLVERQANEVDWWDMVCNVKKLINEKKEDGKVFWQNLAGYKRQEALRPYLSSEEDRKKGKKFARYQLGDLLLHLEKKHGEDWGKVYDEAWERIDKKVEGLSKHIKLEEERRSEDAQSKAALTDWLRAKASFVIEGLKEADKDEFCRCELKLQKWYGDLRGKPFAIEAENSILDISGFSKQYNCAFIWQKDGVKKLNLYLIINYFKGGKLRFKKIKPEAFEANRFYTVINKKSGEIVPMEVNFNFDDPNLIILPLAFGKRQGREFIWNDLLSLETGSLKLANGRVIEKTLYNRRTRQDEPALFVALTFERREVLDSSNIKPMNLIGVDRGENIPAVIALTDPEGCPLSRFKDSLGNPTHILRIGESYKEKQRTIQAKKEVEQRRAGGYSRKYASKAKNLADDMVRNTARDLLYYAVTQDAMLIFENLSRGFGRQGKRTFMAERQYTRMEDWLTAKLAYEGLPSKVYLSKTLAQYTSKTCSNCGFTITSADYDRVLEKLKKTATGWMTTINGKELKVEGQITYYNRYKRQNVVKDLSVELDRLSEESVNNDISSWTKGRSGEALSLLKKRFSHRPVQEKFVCLNCGFETHADEQAALNIARSWLFLRSQEYKKYQTNKTTGNTDKRAFVETWQSFYRKKLKEVWKPAV

SEQ ID NO: 36379 - protein, 978 aa, synthetic construct
  REGION 1..978: note = engineered CasX variant
QEIKRINKIRRRLVKDSNTKKAGKTGPMKTLLVRVMTPDLRERLENLRKKPENIPQPISNTSRANLNKLLTDYTEMKKAILHVYWEEFQKDPVGLMSRVAQPASKKIDQNKLKPEMDEKGNLTTAGFACSQCGQPLFVYKLEQVSEKGKAYTNYFGRCNVAEHEKLILLAQLKPEKDSDEAVTYSLGKFGQRALDFYSIHVTKESTHPVKPLAQIAGNRYASSPVGKALSDACMGTIASFLSKYQDIIIEHQKVVKGNQKRLESLRELAGKENLEYPSVTLPPQPHTKEGVDAYNEVIARVRWWVNLNLWQKLKLSRDDAKPLLRLKGFPSFPLVERQANEVDWWDMVCNVKKLINEKKEDGKVFWQNLAGYKRQEALRPYLSSEEDRKKGKKFARYQLGDLLLHLEKKHGEDWGKVYDEAWERIDKKVEGLSKHIKLEEERRSEDAQSKAALTDWLRAKASFVIEGLKEADKDEFCRCELKLQKWYGDLRGKPFAIEAENSILDISGFSKQYNCAFIWQKDGVKKLNLYLIINYFKGGKLRFKKIKPEAFEANRFYTVINKKSGEIVPMEVNFNFDDPNLIILPLAFGKRQGREFIWNDLLSLETGSLKLANGRVIEKTLYNRRTRQDEPALFVALTFERREVLDSSNIKPMNLIGVDRGENIPAVIALTDPEGCPLSRFKDSLGNPTHILRIGESYKEKQRTIQAKKEVEQRRAGGYSRKYASKAKNLADDMVRNTARDLLYYAVTQDAMLIFENLSRGFGRQGKRTFMAERQYTRMEDWLTAKLAYEGLPSKVYLSKTLAQYTSKTCSNCGFTITSADYDRVLEKLKKTATGWMTTINGKELKVEGQITYYNRYKRQNVVKDLSVELDRLSEESVNNDISSWTKGRSGEALSLLKKRFSHRPVQEKFVCLNCGFETHADEQAALNIARSWLFLRSQEYKKYQTNKTTGNTDKRAFVETWQSFYRKKLKEVWKPAV

SEQ ID NO: 36380 - protein, 978 aa, synthetic construct
  REGION 1..978: note = engineered CasX variant
QEIKRINKIRRRLVKDSNTKKAGKTGPMKTLLVRVMTPDLRERLENLRKKPENIPQPISNTSRANLNKLLTDYTEMKKAILHVYWEEFQKDPVGLMSRVAQPASKKIDQNKLKPEMDEKGNLTTAGFACSQCGQPLFVYKLEQVSEKGKAYTNYFGRCNVAEHEKLILLAQLKPEKDSDEAVTYSLGKFGQRALDFYSIHVTKESTHPVKPLAQIAGNRYASTPVGKALSDACMGTIASFLSKYQDIIIEHQKVVKGNQKRLESLRELAGKENLEYPSVTLPPQPHTKEGVDAYNEVIARVRWWVNLNLWQKLKLSRDDAKPLLRLKGFPSFPLVERQANEVDWWDMVCNVKKLINEKKEDGKVFWQNLAGYKRQEALRPYLSSEEDRKKGKKFARYQLGDLLLHLEKKHGEDWGKVYDEAWERIDKKVEGLSKHIKLEEERRSEDAQSKAALTDWLRAKASFVIEGLKEADKDEFCRCELKLQKWYGDLRGKPFAIEAENSILDISGFSKQYNCAFIWQKDGVKKLNLYLIINYFKGGKLRFKKIKPEAFEANRFYTVINKKSGEIVPMEVNFNFDDPNLIILPLAFGKRQGREFIWNDLLSLETGSLKLANGRVIEKTLYNRRTRQDEPALFVALTFERREVLDSSNIKPMNLIGVDRGENIPAVIALTDPEGCPLSRFKDSLGNPTHILRIGESYKEKQRTIQAKKEVEQRRAGGYSRKYASKAKNLADDMVRNTARDLLYYAVTQDAMLIFENLSRGFGRQGKRTFMAERQYTRMEDWLTAKLAYEGLPSKVYLSKTLAQYTSKTCSNCGFTITSADYDRVLEKLKKTATGWMTTINGKELKVEGQITYYNRYKRQNVVKDLSVELDRLSEESVNNDISSWTKGRSGEALSLLKKRFSHRPVQEKFVCLNCGFETHADEQAALNIARSWLFLRSQEYKKYQTNKTTGNTDKRAFVETWQSFYRKKLKEVWKPAV

SEQ ID NO: 36381 - protein, 978 aa, synthetic construct
  REGION 1..978: note = engineered CasX variant
QEIKRINKIRRRLVKDSNTKKAGKTGPMKTLLVRVMTPDLRERLENLRKKPENIPQPISNTSRANLNKLLTDYTEMKKAILHVYWEEFQKDPVGLMSRVAQPASKKIDQNKLKPEMDEKGNLTTAGFACSQCGQPLFVYKLEQVSEKGKAYTNYFGRCNVAEHEKLILLAQLKPEKDSDEAVTYSLGKFGQRALDFYSIHVTKESTHPVKPLAQIAGNRYASAPVGKALSDACMGTIASFLSKYQDIIIEHQKVVKGNQKRLESLRELAGKENLEYPSVTLPPQPHTKEGVDAYNEVIARVRWWVNLNLWQKLKLSRDDAKPLLRLKGFPSFPLVERQANEVDWWDMVCNVKKLINEKKEDGKVFWQNLAGYKRQEALRPYLSSEEDRKKGKKFARYQLGDLLLHLEKKHGEDWGKVYDEAWERIDKKVEGLSKHIKLEEERRSEDAQSKAALTDWLRAKASFVIEGLKEADKDEFCRCELKLQKWYGDLRGKPFAIEAENSILDISGFSKQYNCAFIWQKDGVKKLNLYLIINYFKGGKLRFKKIKPEAFEANRFYTVINKKSGEIVPMEVNFNFDDPNLIILPLAFGKRQGREFIWNDLLSLETGSLKLANGRVIEKTLYNRRTRQDEPALFVALTFERREVLDSSNIKPMNLIGVDRGENIPAVIALTDPEGCPLSRFKDSLGNPTHILRIGESYKEKQRTIQAKKEVEQRRAGGYSRKYASKAKNLADDMVRNTARDLLYYAVTQDAMLIFENLSRGFGRQGKRTFMAERQYTRMEDWLTAKLAYEGLPSKVYLSKTLAQYTSKTCSNCGFTITSADYDRVLEKLKKTATGWMTTINGKELKVEGQITYYNRYKRQNVVKDLSVELDRLSEESVNNDISSWTKGRSGEALSLLKKRFSHRPVQEKFVCLNCGFETHADEQAALNIARSWLFLRSQEYKKYQTNKTTGNTDKRAFVETWQSFYRKKLKEVWKPAV

SEQ ID NO: 36382 - protein, 978 aa, synthetic construct
  REGION 1..978: note = engineered CasX variant
QEIKRINKIRRRLVKDSNTKKAGKTGPMKTLLVRVMTPDLRERLENLRKKPENIPQPISNTSRANLNKLLTDYTEMKKAILHVYWEEFQKDPVGLMSRVAQPASKKIDQNKLKPEMDEKGNLTTAGFACSQCGQPLFVYKLEQVSEKGKAYTNYFGRCNVAEHEKLILLAQLKPEKDSDEAVTYSLGKFGQRALDFYSIHVTKESTHPVKPLAQIAGNRYASVPVGKALSDACMGTIASFLSKYQDIIIEHQKVVKGNQKRLESLRELAGKENLEYPSVTLPPQPHTKEGVDAYNEVIARVRWWVNLNLWQKLKLSRDDAKPLLRLKGFPSFPLVERQANEVDWWDMVCNVKKLINEKKEDGKVFWQNLAGYKRQEALRPYLSSEEDRKKGKKFARYQLGDLLLHLEKKHGEDWGKVYDEAWERIDKKVEGLSKHIKLEEERRSEDAQSKAALTDWLRAKASFVIEGLKEADKDEFCRCELKLQKWYGDLRGKPFAIEAENSILDISGFSKQYNCAFIWQKDGVKKLNLYLIINYFKGGKLRFKKIKPEAFEANRFYTVINKKSGEIVPMEVNFNFDDPNLIILPLAFGKRQGREFIWNDLLSLETGSLKLANGRVIEKTLYNRRTRQDEPALFVALTFERREVLDSSNIKPMNLIGVDRGENIPAVIALTDPEGCPLSRFKDSLGNPTHILRIGESYKEKQRTIQAKKEVEQRRAGGYSRKYASKAKNLADDMVRNTARDLLYYAVTQDAMLIFENLSRGFGRQGKRTFMAERQYTRMEDWLTAKLAYEGLPSKVYLSKTLAQYTSKTCSNCGFTITSADYDRVLEKLKKTATGWMTTINGKELKVEGQITYYNRYKRQNVVKDLSVELDRLSEESVNNDISSWTKGRSGEALSLLKKRFSHRPVQEKFVCLNCGFETHADEQAALNIARSWLFLRSQEYKKYQTNKTTGNTDKRAFVETWQSFYRKKLKEVWKPAV

SEQ ID NO: 36383 - protein, 978 aa, synthetic construct
  REGION 1..978: note = engineered CasX variant
QEIKRINKIRRRLVKDSNTKKAGKTGPMKTLLVRVMTPDLRERLENLRKKPENIPQPISNTSRANLNKLLTDYTEMKKAILHVYWEEFQKDPVGLMSRVAQPASKKIDQNKLKPEMDEKGNLTTAGFACSQCGQPLFVYKLEQVSEKGKAYTNYFGRCNVAEHEKLIKLAQLKPEKDSDEAVTYSLGKFGQRALDFYSIHVTKESTHPVKPLAQIAGNRYASGPVGKALSDACMGTIASFLSKYQDIIIEHQKVVKGNQKRLESLRELAGKENLEYPSVTLPPQPHTKEGVDAYNEVIARVRWWVNLNLWQKLKLSRDDAKPLLRLKGFPSFPLVERQANEVDWWDMVCNVKKLINEKKEDGKVFWQNLAGYKRQEALRPYLSSEEDRKKGKKFARYQLGDLLLHLEKKHGEDWGKVYDEAWERIDKKVEGLSKHIKLEEERRSEDAQSKAALTDWLRAKASFVIEGLKEADKDEFCRCELKLQKWYGDLRGKPFAIEAENSILDISGFSKQYNCAFIWQKDGVKKLNLYLIINYFKGGKLRFKKIKPEAFEANRFYTVINKKSGEIVPMEVNFNFDDPNLIILPLAFGKRQGREFIWNDLLSLETGSLKLANGRVIEKTLYNRRTRQDEPALFVALTFERREVLDSSNIKPMNLIGVDRGENIPAVIALTDPEGCPLSRFKDSLGNPTHILRIGESYKEKQRTIQAKKEVEQRRAGGYSRKYASKAKNLADDMVRNTARDLLYYAVTQDAMLIFENLSRGFGRQGKRTFMAERQYTRMEDWLTAKLAYEGLPSKVYLSKTLAQYTSKTCSNCGFTITSADYDRVLEKLKKTATGWMTTINGKELKVEGQITYYNRYKRQNVVKDLSVELDRLSEESVNNDISSWTKGRSGEALSLLKKRFSHRPVQEKFVCLNCGFETHADEQAALNIARSWLFLRSQEYKKYQTNKTTGNTDKRAFVETWQSFYRKKLKEVWKPAV

SEQ ID NO: 36384 - protein, 977 aa, synthetic construct
  REGION 1..977: note = engineered CasX variant
QEIKRINKIRRRLVKDSNTKKAGKTGPMKTLLVRVMTPDLRERLENLRKKPENIPQPISNTSRANLNKLLTDYTEMKKAILHVYWEEFQKDPVGLMSRVAQPASKKIDQNKLKPEMDEKGNLTTAGFACSQCGQPLFVYKLEQVSEKGKAYTNYFGRCNVAEHEKLILLAQLKPEKDSDEAVTYSLGKFGQRALDFYSIHVTKESTHPVKPLAQIAGNRYASPVGKALSDACMGTIASFLSKYQDIIIEHQKVVKGNQKRLESLRELAGKENLEYPSVTLPPQPHTKEGVDAYNEVIARVRWWVNLNLWQKLKLSRDDAKPLLRLKGFPSFPLVERQANEVDWWDMVCNVKKLINEKKEDGKVFWQNLAGYKRQEALRPYLSSEEDRKKGKKFARYQLGDLLLHLEKKHGEDWGKVYDEAWERIDKKVEGLSKHIKLEEERRSEDAQSKAALTDWLRAKASFVIEGLKEADKDEFCRCELKLQKWYGDLRGKPFAIEAENSILDISGFSKQYNCAFIWQKDGVKKLNLYLIINYFKGGKLRFKKIKPEAFEANRFYTVINKKSGEIVPMEVNFNFDDPNLIILPLAFGKRQGREFIWNDLLSLETGSLKLANGRVIEKTLYNRRTRQDEPALFVALTFERREVLDSSNIKPMNLIGVDRGENIPAVIALTDPEGCPLSRFKDSLGNPTHILRIGESYKEKQRTIQAKKEVEQRRAGGYSRKYASKAKNLADDMVRNTARDLLYYAVTQDAMLIFENLSRGFGRQGKRTFMAERQYTRMEDWLTAKLAYEGLPSKVYLSKTLAQYTSKTCSNCGFTITSADYDRVLEKLKKTATGWMTTINGKELKVEGQITYYNRYKRQNVVKDLSVELDRLSEESVNNDISSWTKGRSGEALSLLKKRFSHRPVQEKFVCLNCGFETHADEQAALNIARSWLFLRSQEYKKYQTNKTTGNTDKRAFVETWQSFYRKKLKEVWKPAV

SEQ ID NO: 36385 - protein, 979 aa, synthetic construct
  REGION 1..979: note = engineered CasX variant
QEIKRINKIRRRLVKDSNTKKAGKTGPMKTLLVRVMTPDLRERLENLRKKPENIPQPISNTSRANLNKLLTDYTEMKKAILHVYWEEFQKDPVGLMSRVAQPASKKIDQNKLKPEMDEKGNLTTAGFACSQCGQPLFVYKLEQVSEKGKAYTNYFGRCNVAEHEKLILLAQLKPEKDSDEAVTYSLGKFGQRALDFYSIHVTKESTHPVKPLAQIAGNRYASYPVGKALSDACMGTIASFLSKYQDIIIEHQKVVKGNQKRLESLRELAGKENLEYPSVTLPPQPHTKEGVDAYNEVIARVRWWVNLNLWQKLKLSRDDAKPLLRLKGFPSFPLVERQANEVDWWDMVCNVKKLINEKKEDGKVFWQNLAGYKRQEALRPYLSSEEDRKKGKKFARYQLGDLLLHLEKKHGEDWGKVYDEAWERIDKKVEGLSKHIKLEEERRSEDAQSKAALTDWLRAKASFVIEGLKEADKDEFCRCELKLQKWYGDLRGKPFAIEAENSILDISGFSKQYNCAFIWQKDGVKKLNLYLIINYFKGGKLRFKKIKPEAFEANRFYTVINKKSGEIVPMEVNFNFDDPNLIILPLAFGKRQGREFIWNDLLSLETGSLKLANGRVIEKTLYNRRTRQDEPALFVALTFERREVLDSSNIKPMNLIGVDRGENIPAVIALTDPEGCPLSRFKDSLGNPTHILRIGESYKEKQRTIQAKKEVEQRRAGGYSRKYASKAKNLADDMVRNTARDLLYYAVTQDAMLIFENLSRGFGRQGKRTFMAERQYTRMEDWLTAKLAYEGPLPSKTYLSKTLAQYTSKTCSNCGFTITSADYDRVLEKLKKTATGWMTTINGKELKVEGQITYYNRYKRQNVVKDLSVELDRLSEESVNNDISSWTKGRSGEALSLLKKRFSHRPVQEKFVCLNCGFETHADEQAALNIARSWLFLRSQEYKKYQTNKTTGNTDKRAFVETWQSFYRKKLKEVWKPAV

SEQ ID NO: 36386 - protein, 979 aa, synthetic construct
  REGION 1..979: note = engineered CasX variant
QEIKRINKIRRRLVKDSNTKKAGKTGPMKTLLVRVMTPDLRERLENLRKKPENIPQPISNTSRANLNKLLTDYTEMKKAILHVYWEEFQKDPVGLMSRVAQPASKKIDQNKLKPEMDEKGNLTTAGFACSQCGQPLFVYKLEQVSEKGKAYTNYFGRCNVAEHEKLILLAQLKPEKDSDEAVTYSLGKFGQRALDFYSIHVTKESTHPVKPLAQIAGNRYASHPVGKALSDACMGTIASFLSKYQDIIIEHQKVVKGNQKRLESLRELAGKENLEYPSVTLPPQPHTKEGVDAYNEVIARVRWWVNLNLWQKLKLSRDDAKPLLRLKGFPSFPLVERQANEVDWWDMVCNVKKLINEKKEDGKVFWQNLAGYKRQEALRPYLSSEEDRKKGKKFARYQLGDLLLHLEKKHGEDWGKVYDEAWERIDKKVEGLSKHIKLEEERRSEDAQSKAALTDWLRAKASFVIEGLKEADKDEFCRCELKLQKWYGDLRGKPFAIEAENSILDISGFSKQYNCAFIWQKDGVKKLNLYLIINYFKGGKLRFKKIKPEAFEANRFYTVINKKSGEIVPMEVNFNFDDPNLIILPLAFGKRQGREFIWNDLLSLETGSLKLANGRVIEKTLYNRRTRQDEPALFVALTFERREVLDSSNIKPMNLIGVDRGENIPAVIALTDPEGCPLSRFKDSLGNPTHILRIGESYKEKQRTIQAKKEVEQRRAGGYSRKYASKAKNLADDMVRNTARDLLYYAVTQDAMLIFENLSRGFGRQGKRTFMAERQYTRMEDWLTAKLAYEGPLPSKTYLSKTLAQYTSKTCSNCGFTITSADYDRVLEKLKKTATGWMTTINGKELKVEGQITYYNRYKRQNVVKDLSVELDRLSEESVNNDISSWTKGRSGEALSLLKKRFSHRPVQEKFVCLNCGFETHADEQAALNIARSWLFLRSQEYKKYQTNKTTGNTDKRAFVETWQSFYRKKLKEVWKPAV

SEQ ID NO: 36387 - protein, 979 aa, synthetic construct
  REGION 1..979: note = engineered CasX variant
QEIKRINKIRRRLVKDSNTKKAGKTGPMKTLLVRVMTPDLRERLENLRKKPENIPQPISNTSRANLNKLLTDYTEMKKAILHVYWEEFQKDPVGLMSRVAQPASKKIDQNKLKPEMDEKGNLTTAGFACSQCGQPLFVYKLEQVSEKGKAYTNYFGRCNVAEHEKLILLAQLKPEKDSDEAVTYSLGKFGQRALDFYSIHVTKESTHPVKPLAQIAGNRYASSPVGKALSDACMGTIASFLSKYQDIIIEHQKVVKGNQKRLESLRELAGKENLEYPSVTLPPQPHTKEGVDAYNEVIARVRWWVNLNLWQKLKLSRDDAKPLLRLKGFPSFPLVERQANEVDWWDMVCNVKKLINEKKEDGKVFWQNLAGYKRQEALRPYLSSEEDRKKGKKFARYQLGDLLLHLEKKHGEDWGKVYDEAWERIDKKVEGLSKHIKLEEERRSEDAQSKAALTDWLRAKASFVIEGLKEADKDEFCRCELKLQKWYGDLRGKPFAIEAENSILDISGFSKQYNCAFIWQKDGVKKLNLYLIINYFKGGKLRFKKIKPEAFEANRFYTVINKKSGEIVPMEVNFNFDDPNLIILPLAFGKRQGREFIWNDLLSLETGSLKLANGRVIEKTLYNRRTRQDEPALFVALTFERREVLDSSNIKPMNLIGVDRGENIPAVIALTDPEGCPLSRFKDSLGNPTHILRIGESYKEKQRTIQAKKEVEQRRAGGYSRKYASKAKNLADDMVRNTARDLLYYAVTQDAMLIFENLSRGFGRQGKRTFMAERQYTRMEDWLTAKLAYEGPLPSKTYLSKTLAQYTSKTCSNCGFTITSADYDRVLEKLKKTATGWMTTINGKELKVEGQITYYNRYKRQNVVKDLSVELDRLSEESVNNDISSWTKGRSGEALSLLKKRFSHRPVQEKFVCLNCGFETHADEQAALNIARSWLFLRSQEYKKYQTNKTTGNTDKRAFVETWQSFYRKKLKEVWKPAV

SEQ ID NO: 36388 - protein, 979 aa, synthetic construct
  REGION 1..979: note = engineered CasX variant
QEIKRINKIRRRLVKDSNTKKAGKTGPMKTLLVRVMTPDLRERLENLRKKPENIPQPISNTSRANLNKLLTDYTEMKKAILHVYWEEFQKDPVGLMSRVAQPASKKIDQNKLKPEMDEKGNLTTAGFACSQCGQPLFVYKLEQVSEKGKAYTNYFGRCNVAEHEKLILLAQLKPEKDSDEAVTYSLGKFGQRALDFYSIHVTKESTHPVKPLAQIAGNRYASTPVGKALSDACMGTIASFLSKYQDIIIEHQKVVKGNQKRLESLRELAGKENLEYPSVTLPPQPHTKEGVDAYNEVIARVRWWVNLNLWQKLKLSRDDAKPLLRLKGFPSFPLVERQANEVDWWDMVCNVKKLINEKKEDGKVFWQNLAGYKRQEALRPYLSSEEDRKKGKKFARYQLGDLLLHLEKKHGEDWGKVYDEAWERIDKKVEGLSKHIKLEEERRSEDAQSKAALTDWLRAKASFVIEGLKEADKDEFCRCELKLQKWYGDLRGKPFAIEAENSILDISGFSKQYNCAFIWQKDGVKKLNLYLIINYFKGGKLRFKKIKPEAFEANRFYTVINKKSGEIVPMEVNFNFDDPNLIILPLAFGKRQGREFIWNDLLSLETGSLKLANGRVIEKTLYNRRTRQDEPALFVALTFERREVLDSSNIKPMNLIGVDRGENIPAVIALTDPEGCPLSRFKDSLGNPTHILRIGESYKEKQRTIQAKKEVEQRRAGGYSRKYASKAKNLADDMVRNTARDLLYYAVTQDAMLIFENLSRGFGRQGKRTFMAERQYTRMEDWLTAKLAYEGPLPSKTYLSKTLAQYTSKTCSNCGFTITSADYDRVLEKLKKTATGWMTTINGKELKVEGQITYYNRYKRQNVVKDLSVELDRLSEESVNNDISSWTKGRSGEALSLLKKRFSHRPVQEKFVCLNCGFETHADEQAALNIARSWLFLRSQEYKKYQTNKTTGNTDKRAFVETWQSFYRKKLKEVWKPAV

SEQ ID NO: 36389 - protein, 979 aa, synthetic construct
  REGION 1..979: note = engineered CasX variant
QEIKRINKIRRRLVKDSNTKKAGKTGPMKTLLVRVMTPDLRERLENLRKKPENIPQPISNTSRANLNKLLTDYTEMKKAILHVYWEEFQKDPVGLMSRVAQPASKKIDQNKLKPEMDEKGNLTTAGFACSQCGQPLFVYKLEQVSEKGKAYTNYFGRCNVAEHEKLILLAQLKPEKDSDEAVTYSLGKFGQRALDFYSIHVTKESTHPVKPLAQIAGNRYASAPVGKALSDACMGTIASFLSKYQDIIIEHQKVVKGNQKRLESLRELAGKENLEYPSVTLPPQPHTKEGVDAYNEVIARVRWWVNLNLWQKLKLSRDDAKPLLRLKGFPSFPLVERQANEVDWWDMVCNVKKLINEKKEDGKVFWQNLAGYKRQEALRPYLSSEEDRKKGKKFARYQLGDLLLHLEKKHGEDWGKVYDEAWERIDKKVEGLSKHIKLEEERRSEDAQSKAALTDWLRAKASFVIEGLKEADKDEFCRCELKLQKWYGDLRGKPFAIEAENSILDISGFSKQYNCAFIWQKDGVKKLNLYLIINYFKGGKLRFKKIKPEAFEANRFYTVINKKSGEIVPMEVNFNFDDPNLIILPLAFGKRQGREFIWNDLLSLETGSLKLANGRVIEKTLYNRRTRQDEPALFVALTFERREVLDSSNIKPMNLIGVDRGENIPAVIALTDPEGCPLSRFKDSLGNPTHILRIGESYKEKQRTIQAKKEVEQRRAGGYSRKYASKAKNLADDMVRNTARDLLYYAVTQDAMLIFENLSRGFGRQGKRTFMAERQYTRMEDWLTAKLAYEGPLPSKTYLSKTLAQYTSKTCSNCGFTITSADYDRVLEKLKKTATGWMTTINGKELKVEGQITYYNRYKRQNVVKDLSVELDRLSEESVNNDISSWTKGRSGEALSLLKKRFSHRPVQEKFVCLNCGFETHADEQAALNIARSWLFLRSQEYKKYQTNKTTGNTDKRAFVETWQSFYRKKLKEVWKPAV

SEQ ID NO: 36390 - protein, 979 aa, synthetic construct
  REGION 1..979: note = engineered CasX variant
QEIKRINKIRRRLVKDSNTKKAGKTGPMKTLLVRVMTPDLRERLENLRKKPENIPQPISNTSRANLNKLLTDYTEMKKAILHVYWEEFQKDPVGLMSRVAQPASKKIDQNKLKPEMDEKGNLTTAGFACSQCGQPLFVYKLEQVSEKGKAYTNYFGRCNVAEHEKLILLAQLKPEKDSDEAVTYSLGKFGQRALDFYSIHVTKESTHPVKPLAQIAGNRYASVPVGKALSDACMGTIASFLSKYQDIIIEHQKVVKGNQKRLESLRELAGKENLEYPSVTLPPQPHTKEGVDAYNEVIARVRWWVNLNLWQKLKLSRDDAKPLLRLKGFPSFPLVERQANEVDWWDMVCNVKKLINEKKEDGKVFWQNLAGYKRQEALRPYLSSEEDRKKGKKFARYQLGDLLLHLEKKHGEDWGKVYDEAWERIDKKVEGLSKHIKLEEERRSEDAQSKAALTDWLRAKASFVIEGLKEADKDEFCRCELKLQKWYGDLRGKPFAIEAENSILDISGFSKQYNCAFIWQKDGVKKLNLYLIINYFKGGKLRFKKIKPEAFEANRFYTVINKKSGEIVPMEVNFNFDDPNLIILPLAFGKRQGREFIWNDLLSLETGSLKLANGRVIEKTLYNRRTRQDEPALFVALTFERREVLDSSNIKPMNLIGVDRGENIPAVIALTDPEGCPLSRFKDSLGNPTHILRIGESYKEKQRTIQAKKEVEQRRAGGYSRKYASKAKNLADDMVRNTARDLLYYAVTQDAMLIFENLSRGFGRQGKRTFMAERQYTRMEDWLTAKLAYEGPLPSKTYLSKTLAQYTSKTCSNCGFTITSADYDRVLEKLKKTATGWMTTINGKELKVEGQITYYNRYKRQNVVKDLSVELDRLSEESVNNDISSWTKGRSGEALSLLKKRFSHRPVQEKFVCLNCGFETHADEQAALNIARSWLFLRSQEYKKYQTNKTTGNTDKRAFVETWQSFYRKKLKEVWKPAV

SEQ ID NO: 36391 - protein, 979 aa, synthetic construct
  REGION 1..979: note = engineered CasX variant
QEIKRINKIRRRLVKDSNTKKAGKTGPMKTLLVRVMTPDLRERLENLRKKPENIPQPISNTSRANLNKLLTDYTEMKKAILHVYWEEFQKDPVGLMSRVAQPASKKIDQNKLKPEMDEKGNLTTAGFACSQCGQPLFVYKLEQVSEKGKAYTNYFGRCNVAEHEKLIKLAQLKPEKDSDEAVTYSLGKFGQRALDFYSIHVTKESTHPVKPLAQIAGNRYASGPVGKALSDACMGTIASFLSKYQDIIIEHQKVVKGNQKRLESLRELAGKENLEYPSVTLPPQPHTKEGVDAYNEVIARVRWWVNLNLWQKLKLSRDDAKPLLRLKGFPSFPLVERQANEVDWWDMVCNVKKLINEKKEDGKVFWQNLAGYKRQEALRPYLSSEEDRKKGKKFARYQLGDLLLHLEKKHGEDWGKVYDEAWERIDKKVEGLSKHIKLEEERRSEDAQSKAALTDWLRAKASFVIEGLKEADKDEFCRCELKLQKWYGDLRGKPFAIEAENSILDISGFSKQYNCAFIWQKDGVKKLNLYLIINYFKGGKLRFKKIKPEAFEANRFYTVINKKSGEIVPMEVNFNFDDPNLIILPLAFGKRQGREFIWNDLLSLETGSLKLANGRVIEKTLYNRRTRQDEPALFVALTFERREVLDSSNIKPMNLIGVDRGENIPAVIALTDPEGCPLSRFKDSLGNPTHILRIGESYKEKQRTIQAKKEVEQRRAGGYSRKYASKAKNLADDMVRNTARDLLYYAVTQDAMLIFENLSRGFGRQGKRTFMAERQYTRMEDWLTAKLAYEGPLPSKTYLSKTLAQYTSKTCSNCGFTITSADYDRVLEKLKKTATGWMTTINGKELKVEGQITYYNRYKRQNVVKDLSVELDRLSEESVNNDISSWTKGRSGEALSLLKKRFSHRPVQEKFVCLNCGFETHADEQAALNIARSWLFLRSQEYKKYQTNKTTGNTDKRAFVETWQSFYRKKLKEVWKPAV

SEQ ID NO: 36392 - protein, 978 aa, synthetic construct
  REGION 1..978: note = engineered CasX variant
QEIKRINKIRRRLVKDSNTKKAGKTGPMKTLLVRVMTPDLRERLENLRKKPENIPQPISNTSRANLNKLLTDYTEMKKAILHVYWEEFQKDPVGLMSRVAQPASKKIDQNKLKPEMDEKGNLTTAGFACSQCGQPLFVYKLEQVSEKGKAYTNYFGRCNVAEHEKLILLAQLKPEKDSDEAVTYSLGKFGQRALDFYSIHVTKESTHPVKPLAQIAGNRYASPVGKALSDACMGTIASFLSKYQDIIIEHQKVVKGNQKRLESLRELAGKENLEYPSVTLPPQPHTKEGVDAYNEVIARVRWWVNLNLWQKLKLSRDDAKPLLRLKGFPSFPLVERQANEVDWWDMVCNVKKLINEKKEDGKVFWQNLAGYKRQEALRPYLSSEEDRKKGKKFARYQLGDLLLHLEKKHGEDWGKVYDEAWERIDKKVEGLSKHIKLEEERRSEDAQSKAALTDWLRAKASFVIEGLKEADKDEFCRCELKLQKWYGDLRGKPFAIEAENSILDISGFSKQYNCAFIWQKDGVKKLNLYLIINYFKGGKLRFKKIKPEAFEANRFYTVINKKSGEIVPMEVNFNFDDPNLIILPLAFGKRQGREFIWNDLLSLETGSLKLANGRVIEKTLYNRRTRQDEPALFVALTFERREVLDSSNIKPMNLIGVDRGENIPAVIALTDPEGCPLSRFKDSLGNPTHILRIGESYKEKQRTIQAKKEVEQRRAGGYSRKYASKAKNLADDMVRNTARDLLYYAVTQDAMLIFENLSRGFGRQGKRTFMAERQYTRMEDWLTAKLAYEGPLPSKTYLSKTLAQYTSKTCSNCGFTITSADYDRVLEKLKKTATGWMTTINGKELKVEGQITYYNRYKRQNVVKDLSVELDRLSEESVNNDISSWTKGRSGEALSLLKKRFSHRPVQEKFVCLNCGFETHADEQAALNIARSWLFLRSQEYKKYQTNKTTGNTDKRAFVETWQSFYRKKLKEVWKPAV

SEQ ID NO: 36393 - protein, 979 aa, synthetic construct
  REGION 1..979: note = engineered CasX variant
QEIKRINKIRRRLVKDSNTKKAGKTGPMKTLLVRVMTPDLRERLENLRKKPENIPQPISNTSRANLNKLLTDYTEMKKAILHVYWEEFQKDPVGLMSRVAQPASKKIDQNKLKPEMDEKGNLTTAGFACSQCGQPLFVYKLEQVSEKGKAYTNYFGRCNVAEHEKLILLAQLKPEKDSDEAVTYSLGKFGQRALDFYSIHVTKESTHPVKPLAQIAGNRYASYPVGKALSDACMGTIASFLSKYQDIIIEHQKVVKGNQKRLESLRELAGKENLEYPSVTLPPQPHTKEGVDAYNEVIARVRWWVNLNLWQKLKLSRDDAKPLLRLKGFPSFPLVERQANEVDWWDMVCNVKKLINEKKEDGKVFWQNLAGYKRQEALRPYLSSEEDVRKKGKKFARYQLGDLLLHLEKKHGEDWGKVYDEAWERIDKKVEGLSKHIKLEEERRSEDAQSKAALTDWLRAKASFVIEGLKEADKDEFCRCELKLQKWYGDLRGKPFAIEAENSILDISGFSKQYNCAFIWQKDGVKKLNLYLIINYFKGGKLRFKKIKPEAFEANRFYTVINKKSGEIVPMEVNFNFDDPNLIILPLAFGKRQGREFIWNDLLSLETGSLKLANGRVIEKTLYNRRTRQDEPALFVALTFERREVLDSSNIKPMNLIGVDRGENIPAVIALTDPEGCPLSRFKDSLGNPTHILRIGESYKEKQRTIQAKKEVEQRRAGGYSRKYASKAKNLADDMVRNTARDLLYYAVTQDAMLIFENLSRGFGRQGKRTFMAERQYTRMEDWLTAKLAYEGLPSKTYLSKTLAQYTSKTCSNCGFTITSADYDRVLEKLKKTATGWMTTINGKELKVEGQITYYNRYKRQNVVKDLSVELDRLSEESVNNDISSWTKGRSGEALSLLKKRFSHRPVQEKFVCLNCGFETHADEQAALNIARSWLFLRSQEYKKYQTNKTTGNTDKRAFVETWQSFYRKKLKEVWKPAV

SEQ ID NO: 36394 - protein, 979 aa, synthetic construct
  REGION 1..979: note = engineered CasX variant
QEIKRINKIRRRLVKDSNTKKAGKTGPMKTLLVRVMTPDLRERLENLRKKPENIPQPISNTSRANLNKLLTDYTEMKKAILHVYWEEFQKDPVGLMSRVAQPASKKIDQNKLKPEMDEKGNLTTAGFACSQCGQPLFVYKLEQVSEKGKAYTNYFGRCNVAEHEKLILLAQLKPEKDSDEAVTYSLGKFGQRALDFYSIHVTKESTHPVKPLAQIAGNRYASHPVGKALSDACMGTIASFLSKYQDIIIEHQKVVKGNQKRLESLRELAGKENLEYPSVTLPPQPHTKEGVDAYNEVIARVRWWVNLNLWQKLKLSRDDAKPLLRLKGFPSFPLVERQANEVDWWDMVCNVKKLINEKKEDGKVFWQNLAGYKRQEALRPYLSSEEDVRKKGKKFARYQLGDLLLHLEKKHGEDWGKVYDEAWERIDKKVEGLSKHIKLEEERRSEDAQSKAALTDWLRAKASFVIEGLKEADKDEFCRCELKLQKWYGDLRGKPFAIEAENSILDISGFSKQYNCAFIWQKDGVKKLNLYLIINYFKGGKLRFKKIKPEAFEANRFYTVINKKSGEIVPMEVNFNFDDPNLIILPLAFGKRQGREFIWNDLLSLETGSLKLANGRVIEKTLYNRRTRQDEPALFVALTFERREVLDSSNIKPMNLIGVDRGENIPAVIALTDPEGCPLSRFKDSLGNPTHILRIGESYKEKQRTIQAKKEVEQRRAGGYSRKYASKAKNLADDMVRNTARDLLYYAVTQDAMLIFENLSRGFGRQGKRTFMAERQYTRMEDWLTAKLAYEGLPSKTYLSKTLAQYTSKTCSNCGFTITSADYDRVLEKLKKTATGWMTTINGKELKVEGQITYYNRYKRQNVVKDLSVELDRLSEESVNNDISSWTKGRSGEALSLLKKRFSHRPVQEKFVCLNCGFETHADEQAALNIARSWLFLRSQEYKKYQTNKTTGNTDKRAFVETWQSFYRKKLKEVWKPAV

SEQ ID NO: 36395 - protein, 979 aa, synthetic construct
  REGION 1..979: note = engineered CasX variant
QEIKRINKIRRRLVKDSNTKKAGKTGPMKTLLVRVMTPDLRERLENLRKKPENIPQPISNTSRANLNKLLTDYTEMKKAILHVYWEEFQKDPVGLMSRVAQPASKKIDQNKLKPEMDEKGNLTTAGFACSQCGQPLFVYKLEQVSEKGKAYTNYFGRCNVAEHEKLILLAQLKPEKDSDEAVTYSLGKFGQRALDFYSIHVTKESTHPVKPLAQIAGNRYASSPVGKALSDACMGTIASFLSKYQDIIIEHQKVVKGNQKRLESLRELAGKENLEYPSVTLPPQPHTKEGVDAYNEVIARVRWWVNLNLWQKLKLSRDDAKPLLRLKGFPSFPLVERQANEVDWWDMVCNVKKLINEKKEDGKVFWQNLAGYKRQEALRPYLSSEEDVRKKGKKFARYQLGDLLLHLEKKHGEDWGKVYDEAWERIDKKVEGLSKHIKLEEERRSEDAQSKAALTDWLRAKASFVIEGLKEADKDEFCRCELKLQKWYGDLRGKPFAIEAENSILDISGFSKQYNCAFIWQKDGVKKLNLYLIINYFKGGKLRFKKIKPEAFEANRFYTVINKKSGEIVPMEVNFNFDDPNLIILPLAFGKRQGREFIWNDLLSLETGSLKLANGRVIEKTLYNRRTRQDEPALFVALTFERREVLDSSNIKPMNLIGVDRGENIPAVIALTDPEGCPLSRFKDSLGNPTHILRIGESYKEKQRTIQAKKEVEQRRAGGYSRKYASKAKNLADDMVRNTARDLLYYAVTQDAMLIFENLSRGFGRQGKRTFMAERQYTRMEDWLTAKLAYEGLPSKTYLSKTLAQYTSKTCSNCGFTITSADYDRVLEKLKKTATGWMTTINGKELKVEGQITYYNRYKRQNVVKDLSVELDRLSEESVNNDISSWTKGRSGEALSLLKKRFSHRPVQEKFVCLNCGFETHADEQAALNIARSWLFLRSQEYKKYQTNKTTGNTDKRAFVETWQSFYRKKLKEVWKPAV

SEQ ID NO: 36396 - protein, 979 aa, synthetic construct
  REGION 1..979: note = engineered CasX variant
QEIKRINKIRRRLVKDSNTKKAGKTGPMKTLLVRVMTPDLRERLENLRKKPENIPQPISNTSRANLNKLLTDYTEMKKAILHVYWEEFQKDPVGLMSRVAQPASKKIDQNKLKPEMDEKGNLTTAGFACSQCGQPLFVYKLEQVSEKGKAYTNYFGRCNVAEHEKLILLAQLKPEKDSDEAVTYSLGKFGQRALDFYSIHVTKESTHPVKPLAQIAGNRYASTPVGKALSDACMGTIASFLSKYQDIIIEHQKVVKGNQKRLESLRELAGKENLEYPSVTLPPQPHTKEGVDAYNEVIARVRWWVNLNLWQKLKLSRDDAKPLLRLKGFPSFPLVERQANEVDWWDMVCNVKKLINEKKEDGKVFWQNLAGYKRQEALRPYLSSEEDVRKKGKKFARYQLGDLLLHLEKKHGEDWGKVYDEAWERIDKKVEGLSKHIKLEEERRSEDAQSKAALTDWLRAKASFVIEGLKEADKDEFCRCELKLQKWYGDLRGKPFAIEAENSILDISGFSKQYNCAFIWQKDGVKKLNLYLIINYFKGGKLRFKKIKPEAFEANRFYTVINKKSGEIVPMEVNFNFDDPNLIILPLAFGKRQGREFIWNDLLSLETGSLKLANGRVIEKTLYNRRTRQDEPALFVALTFERREVLDSSNIKPMNLIGVDRGENIPAVIALTDPEGCPLSRFKDSLGNPTHILRIGESYKEKQRTIQAKKEVEQRRAGGYSRKYASKAKNLADDMVRNTARDLLYYAVTQDAMLIFENLSRGFGRQGKRTFMAERQYTRMEDWLTAKLAYEGLPSKTYLSKTLAQYTSKTCSNCGFTITSADYDRVLEKLKKTATGWMTTINGKELKVEGQITYYNRYKRQNVVKDLSVELDRLSEESVNNDISSWTKGRSGEALSLLKKRFSHRPVQEKFVCLNCGFETHADEQAALNIARSWLFLRSQEYKKYQTNKTTGNTDKRAFVETWQSFYRKKLKEVWKPAV

SEQ ID NO: 36397 - protein, 979 aa, synthetic construct
  REGION 1..979: note = engineered CasX variant
QEIKRINKIRRRLVKDSNTKKAGKTGPMKTLLVRVMTPDLRERLENLRKKPENIPQPISNTSRANLNKLLTDYTEMKKAILHVYWEEFQKDPVGLMSRVAQPASKKIDQNKLKPEMDEKGNLTTAGFACSQCGQPLFVYKLEQVSEKGKAYTNYFGRCNVAEHEKLILLAQLKPEKDSDEAVTYSLGKFGQRALDFYSIHVTKESTHPVKPLAQIAGNRYASAPVGKALSDACMGTIASFLSKYQDIIIEHQKVVKGNQKRLESLRELAGKENLEYPSVTLPPQPHTKEGVDAYNEVIARVRWWVNLNLWQKLKLSRDDAKPLLRLKGFPSFPLVERQANEVDWWDMVCNVKKLINEKKEDGKVFWQNLAGYKRQEALRPYLSSEEDVRKKGKKFARYQLGDLLLHLEKKHGEDWGKVYDEAWERIDKKVEGLSKHIKLEEERRSEDAQSKAALTDWLRAKASFVIEGLKEADKDEFCRCELKLQKWYGDLRGKPFAIEAENSILDISGFSKQYNCAFIWQKDGVKKLNLYLIINYFKGGKLRFKKIKPEAFEANRFYTVINKKSGEIVPMEVNFNFDDPNLIILPLAFGKRQGREFIWNDLLSLETGSLKLANGRVIEKTLYNRRTRQDEPALFVALTFERREVLDSSNIKPMNLIGVDRGENIPAVIALTDPEGCPLSRFKDSLGNPTHILRIGESYKEKQRTIQAKKEVEQRRAGGYSRKYASKAKNLADDMVRNTARDLLYYAVTQDAMLIFENLSRGFGRQGKRTFMAERQYTRMEDWLTAKLAYEGLPSKTYLSKTLAQYTSKTCSNCGFTITSADYDRVLEKLKKTATGWMTTINGKELKVEGQITYYNRYKRQNVVKDLSVELDRLSEESVNNDISSWTKGRSGEALSLLKKRFSHRPVQEKFVCLNCGFETHADEQAALNIARSWLFLRSQEYKKYQTNKTTGNTDKRAFVETWQSFYRKKLKEVWKPAV

SEQ ID NO: 36398 - protein, 979 aa, synthetic construct
  REGION 1..979: note = engineered CasX variant
QEIKRINKIRRRLVKDSNTKKAGKTGPMKTLLVRVMTPDLRERLENLRKKPENIPQPISNTSRANLNKLLTDYTEMKKAILHVYWEEFQKDPVGLMSRVAQPASKKIDQNKLKPEMDEKGNLTTAGFACSQCGQPLFVYKLEQVSEKGKAYTNYFGRCNVAEHEKLILLAQLKPEKDSDEAVTYSLGKFGQRALDFYSIHVTKESTHPVKPLAQIAGNRYASVPVGKALSDACMGTIASFLSKYQDIIIEHQKVVKGNQKRLESLRELAGKENLEYPSVTLPPQPHTKEGVDAYNEVIARVRWWVNLNLWQKLKLSRDDAKPLLRLKGFPSFPLVERQANEVDWWDMVCNVKKLINEKKEDGKVFWQNLAGYKRQEALRPYLSSEEDVRKKGKKFARYQLGDLLLHLEKKHGEDWGKVYDEAWERIDKKVEGLSKHIKLEEERRSEDAQSKAALTDWLRAKASFVIEGLKEADKDEFCRCELKLQKWYGDLRGKPFAIEAENSILDISGFSKQYNCAFIWQKDGVKKLNLYLIINYFKGGKLRFKKIKPEAFEANRFYTVINKKSGEIVPMEVNFNFDDPNLIILPLAFGKRQGREFIWNDLLSLETGSLKLANGRVIEKTLYNRRTRQDEPALFVALTFERREVLDSSNIKPMNLIGVDRGENIPAVIALTDPEGCPLSRFKDSLGNPTHILRIGESYKEKQRTIQAKKEVEQRRAGGYSRKYASKAKNLADDMVRNTARDLLYYAVTQDAMLIFENLSRGFGRQGKRTFMAERQYTRMEDWLTAKLAYEGLPSKTYLSKTLAQYTSKTCSNCGFTITSADYDRVLEKLKKTATGWMTTINGKELKVEGQITYYNRYKRQNVVKDLSVELDRLSEESVNNDISSWTKGRSGEALSLLKKRFSHRPVQEKFVCLNCGFETHADEQAALNIARSWLFLRSQEYKKYQTNKTTGNTDKRAFVETWQSFYRKKLKEVWKPAV

SEQ ID NO: 36399 - protein, 979 aa, synthetic construct
  REGION 1..979: note = engineered CasX variant
QEIKRINKIRRRLVKDSNTKKAGKTGPMKTLLVRVMTPDLRERLENLRKKPENIPQPISNTSRANLNKLLTDYTEMKKAILHVYWEEFQKDPVGLMSRVAQPASKKIDQNKLKPEMDEKGNLTTAGFACSQCGQPLFVYKLEQVSEKGKAYTNYFGRCNVAEHEKLIKLAQLKPEKDSDEAVTYSLGKFGQRALDFYSIHVTKESTHPVKPLAQIAGNRYASGPVGKALSDACMGTIASFLSKYQDIIIEHQKVVKGNQKRLESLRELAGKENLEYPSVTLPPQPHTKEGVDAYNEVIARVRWWVNLNLWQKLKLSRDDAKPLLRLKGFPSFPLVERQANEVDWWDMVCNVKKLINEKKEDGKVFWQNLAGYKRQEALRPYLSSEEDVRKKGKKFARYQLGDLLLHLEKKHGEDWGKVYDEAWERIDKKVEGLSKHIKLEEERRSEDAQSKAALTDWLRAKASFVIEGLKEADKDEFCRCELKLQKWYGDLRGKPFAIEAENSILDISGFSKQYNCAFIWQKDGVKKLNLYLIINYFKGGKLRFKKIKPEAFEANRFYTVINKKSGEIVPMEVNFNFDDPNLIILPLAFGKRQGREFIWNDLLSLETGSLKLANGRVIEKTLYNRRTRQDEPALFVALTFERREVLDSSNIKPMNLIGVDRGENIPAVIALTDPEGCPLSRFKDSLGNPTHILRIGESYKEKQRTIQAKKEVEQRRAGGYSRKYASKAKNLADDMVRNTARDLLYYAVTQDAMLIFENLSRGFGRQGKRTFMAERQYTRMEDWLTAKLAYEGLPSKTYLSKTLAQYTSKTCSNCGFTITSADYDRVLEKLKKTATGWMTTINGKELKVEGQITYYNRYKRQNVVKDLSVELDRLSEESVNNDISSWTKGRSGEALSLLKKRFSHRPVQEKFVCLNCGFETHADEQAALNIARSWLFLRSQEYKKYQTNKTTGNTDKRAFVETWQSFYRKKLKEVWKPAV

SEQ ID NO: 36400 - protein, 978 aa, synthetic construct
  REGION 1..978: note = engineered CasX variant
QEIKRINKIRRRLVKDSNTKKAGKTGPMKTLLVRVMTPDLRERLENLRKKPENIPQPISNTSRANLNKLLTDYTEMKKAILHVYWEEFQKDPVGLMSRVAQPASKKIDQNKLKPEMDEKGNLTTAGFACSQCGQPLFVYKLEQVSEKGKAYTNYFGRCNVAEHEKLILLAQLKPEKDSDEAVTYSLGKFGQRALDFYSIHVTKESTHPVKPLAQIAGNRYASPVGKALSDACMGTIASFLSKYQDIIIEHQKVVKGNQKRLESLRELAGKENLEYPSVTLPPQPHTKEGVDAYNEVIARVRWWVNLNLWQKLKLSRDDAKPLLRLKGFPSFPLVERQANEVDWWDMVCNVKKLINEKKEDGKVFWQNLAGYKRQEALRPYLSSEEDVRKKGKKFARYQLGDLLLHLEKKHGEDWGKVYDEAWERIDKKVEGLSKHIKLEEERRSEDAQSKAALTDWLRAKASFVIEGLKEADKDEFCRCELKLQKWYGDLRGKPFAIEAENSILDISGFSKQYNCAFIWQKDGVKKLNLYLIINYFKGGKLRFKKIKPEAFEANRFYTVINKKSGEIVPMEVNFNFDDPNLIILPLAFGKRQGREFIWNDLLSLETGSLKLANGRVIEKTLYNRRTRQDEPALFVALTFERREVLDSSNIKPMNLIGVDRGENIPAVIALTDPEGCPLSRFKDSLGNPTHILRIGESYKEKQRTIQAKKEVEQRRAGGYSRKYASKAKNLADDMVRNTARDLLYYAVTQDAMLIFENLSRGFGRQGKRTFMAERQYTRMEDWLTAKLAYEGLPSKTYLSKTLAQYTSKTCSNCGFTITSADYDRVLEKLKKTATGWMTTINGKELKVEGQITYYNRYKRQNVVKDLSVELDRLSEESVNNDISSWTKGRSGEALSLLKKRFSHRPVQEKFVCLNCGFETHADEQAALNIARSWLFLRSQEYKKYQTNKTTGNTDKRAFVETWQSFYRKKLKEVWKPAV

SEQ ID NO: 36401 - protein, 978 aa, synthetic construct
  REGION 1..978: note = engineered CasX variant
QEIKRINKIRRRLVKDSNTKKAGKTGPMKTLLVRVMTPDLRERLENLRKKPENIPQPISNTSRANLNKLLTDYTEMKKAILHVYWEEFQKDPVGLMSRVAQPASKKIDQNKLKPEMDEKGNLTTAGFACSQCGQPLFVYKLEQVSEKGKAYTNYFGRCNVAEHEKLILLAQLKPEKDSDEAVTYSLGKFGQRALDFYSIHVTKESTHPVKPLAQIAGNRYASYPVGKALSDACMGTIASFLSKYQDIIIEHQKVVKGNQKRLESLRELAGKENLEYPSVTLPPQPHTKEGVDAYNEVIARVRWWVNLNLWQKLKLSRDDAKPLLRLKGFPSFPLVERQANEVDWWDMVCNVKKLINEKKEDGKVFWQNLAGYKRQEALRPYLSSEEDRKKGKKFARYQLGDLLLHLEKKHGEDWGKVYDEAWERIDKKVEGLSKHIKLEEERRSEDAQSKAALTDWLRAKASFVIEGLKEADKDEFCRCELKLQKWYGDLRGKPFAIEAENSILDISGFSKQYNCAFIWQKDGVKKLNLYLIINYFKGGKLRFKKIKPEAFEANRFYTVINKKSGEIVPMEVNFNFDDPNLIILPLAFGKRQGREFIWNDLLSLETGSLKLANGRVIEKTLYNRRTRQDEPALFVALTFERREVLDSSNIKPMNLIGVDRGENIPAVIALTDPEGCPLSRFKDSLGNPTHILRIGESYKEKQRTIQAKKEVEQRRAGGYSRKYASKAKNLADDMVRNTARDLLYYAVTQDAMLIFENLSRGFGRQGKRTFMAERQYTRMEDWLTAKLAYEGLPSKTYLSKTLAQYTSKTCSNCGFTITSADYDRMLEKLKKTATGWMTTINGKELKVEGQITYYNRYKRQNVVKDLSVELDRLSEESVNNDISSWTKGRSGEALSLLKKRFSHRPVQEKFVCLNCGFETHADEQAALNIARSWLFLRSQEYKKYQTNKTTGNTDKRAFVETWQSFYRKKLKEVWKPAV

SEQ ID NO: 36402 - protein, 978 aa, synthetic construct
  REGION 1..978: note = engineered CasX variant
QEIKRINKIRRRLVKDSNTKKAGKTGPMKTLLVRVMTPDLRERLENLRKKPENIPQPISNTSRANLNKLLTDYTEMKKAILHVYWEEFQKDPVGLMSRVAQPASKKIDQNKLKPEMDEKGNLTTAGFACSQCGQPLFVYKLEQVSEKGKAYTNYFGRCNVAEHEKLILLAQLKPEKDSDEAVTYSLGKFGQRALDFYSIHVTKESTHPVKPLAQIAGNRYASHPVGKALSDACMGTIASFLSKYQDIIIEHQKVVKGNQKRLESLRELAGKENLEYPSVTLPPQPHTKEGVDAYNEVIARVRWWVNLNLWQKLKLSRDDAKPLLRLKGFPSFPLVERQANEVDWWDMVCNVKKLINEKKEDGKVFWQNLAGYKRQEALRPYLSSEEDRKKGKKFARYQLGDLLLHLEKKHGEDWGKVYDEAWERIDKKVEGLSKHIKLEEERRSEDAQSKAALTDWLRAKASFVIEGLKEADKDEFCRCELKLQKWYGDLRGKPFAIEAENSILDISGFSKQYNCAFIWQKDGVKKLNLYLIINYFKGGKLRFKKIKPEAFEANRFYTVINKKSGEIVPMEVNFNFDDPNLIILPLAFGKRQGREFIWNDLLSLETGSLKLANGRVIEKTLYNRRTRQDEPALFVALTFERREVLDSSNIKPMNLIGVDRGENIPAVIALTDPEGCPLSRFKDSLGNPTHILRIGESYKEKQRTIQAKKEVEQRRAGGYSRKYASKAKNLADDMVRNTARDLLYYAVTQDAMLIFENLSRGFGRQGKRTFMAERQYTRMEDWLTAKLAYEGLPSKTYLSKTLAQYTSKTCSNCGFTITSADYDRMLEKLKKTATGWMTTINGKELKVEGQITYYNRYKRQNVVKDLSVELDRLSEESVNNDISSWTKGRSGEALSLLKKRFSHRPVQEKFVCLNCGFETHADEQAALNIARSWLFLRSQEYKKYQTNKTTGNTDKRAFVETWQSFYRKKLKEVWKPAV

SEQ ID NO: 36403 - protein, 978 aa, synthetic construct
  REGION 1..978: note = engineered CasX variant
QEIKRINKIRRRLVKDSNTKKAGKTGPMKTLLVRVMTPDLRERLENLRKKPENIPQPISNTSRANLNKLLTDYTEMKKAILHVYWEEFQKDPVGLMSRVAQPASKKIDQNKLKPEMDEKGNLTTAGFACSQCGQPLFVYKLEQVSEKGKAYTNYFGRCNVAEHEKLILLAQLKPEKDSDEAVTYSLGKFGQRALDFYSIHVTKESTHPVKPLAQIAGNRYASSPVGKALSDACMGTIASFLSKYQDIIIEHQKVVKGNQKRLESLRELAGKENLEYPSVTLPPQPHTKEGVDAYNEVIARVRWWVNLNLWQKLKLSRDDAKPLLRLKGFPSFPLVERQANEVDWWDMVCNVKKLINEKKEDGKVFWQNLAGYKRQEALRPYLSSEEDRKKGKKFARYQLGDLLLHLEKKHGEDWGKVYDEAWERIDKKVEGLSKHIKLEEERRSEDAQSKAALTDWLRAKASFVIEGLKEADKDEFCRCELKLQKWYGDLRGKPFAIEAENSILDISGFSKQYNCAFIWQKDGVKKLNLYLIINYFKGGKLRFKKIKPEAFEANRFYTVINKKSGEIVPMEVNFNFDDPNLIILPLAFGKRQGREFIWNDLLSLETGSLKLANGRVIEKTLYNRRTRQDEPALFVALTFERREVLDSSNIKPMNLIGVDRGENIPAVIALTDPEGCPLSRFKDSLGNPTHILRIGESYKEKQRTIQAKKEVEQRRAGGYSRKYASKAKNLADDMVRNTARDLLYYAVTQDAMLIFENLSRGFGRQGKRTFMAERQYTRMEDWLTAKLAYEGLPSKTYLSKTLAQYTSKTCSNCGFTITSADYDRMLEKLKKTATGWMTTINGKELKVEGQITYYNRYKRQNVVKDLSVELDRLSEESVNNDISSWTKGRSGEALSLLKKRFSHRPVQEKFVCLNCGFETHADEQAALNIARSWLFLRSQEYKKYQTNKTTGNTDKRAFVETWQSFYRKKLKEVWKPAV

SEQ ID NO: 36404 - protein, 978 aa, synthetic construct
  REGION 1..978: note = engineered CasX variant
QEIKRINKIRRRLVKDSNTKKAGKTGPMKTLLVRVMTPDLRERLENLRKKPENIPQPISNTSRANLNKLLTDYTEMKKAILHVYWEEFQKDPVGLMSRVAQPASKKIDQNKLKPEMDEKGNLTTAGFACSQCGQPLFVYKLEQVSEKGKAYTNYFGRCNVAEHEKLILLAQLKPEKDSDEAVTYSLGKFGQRALDFYSIHVTKESTHPVKPLAQIAGNRYASTPVGKALSDACMGTIASFLSKYQDIIIEHQKVVKGNQKRLESLRELAGKENLEYPSVTLPPQPHTKEGVDAYNEVIARVRWWVNLNLWQKLKLSRDDAKPLLRLKGFPSFPLVERQANEVDWWDMVCNVKKLINEKKEDGKVFWQNLAGYKRQEALRPYLSSEEDRKKGKKFARYQLGDLLLHLEKKHGEDWGKVYDEAWERIDKKVEGLSKHIKLEEERRSEDAQSKAALTDWLRAKASFVIEGLKEADKDEFCRCELKLQKWYGDLRGKPFAIEAENSILDISGFSKQYNCAFIWQKDGVKKLNLYLIINYFKGGKLRFKKIKPEAFEANRFYTVINKKSGEIVPMEVNFNFDDPNLIILPLAFGKRQGREFIWNDLLSLETGSLKLANGRVIEKTLYNRRTRQDEPALFVALTFERREVLDSSNIKPMNLIGVDRGENIPAVIALTDPEGCPLSRFKDSLGNPTHILRIGESYKEKQRTIQAKKEVEQRRAGGYSRKYASKAKNLADDMVRNTARDLLYYAVTQDAMLIFENLSRGFGRQGKRTFMAERQYTRMEDWLTAKLAYEGLPSKTYLSKTLAQYTSKTCSNCGFTITSADYDRMLEKLKKTATGWMTTINGKELKVEGQITYYNRYKRQNVVKDLSVELDRLSEESVNNDISSWTKGRSGEALSLLKKRFSHRPVQEKFVCLNCGFETHADEQAALNIARSWLFLRSQEYKKYQTNKTTGNTDKRAFVETWQSFYRKKLKEVWKPAV

SEQ ID NO: 36405 - protein, 978 aa, synthetic construct
  REGION 1..978: note = engineered CasX variant
QEIKRINKIRRRLVKDSNTKKAGKTGPMKTLLVRVMTPDLRERLENLRKKPENIPQPISNTSRANLNKLLTDYTEMKKAILHVYWEEFQKDPVGLMSRVAQPASKKIDQNKLKPEMDEKGNLTTAGFACSQCGQPLFVYKLEQVSEKGKAYTNYFGRCNVAEHEKLILLAQLKPEKDSDEAVTYSLGKFGQRALDFYSIHVTKESTHPVKPLAQIAGNRYASAPVGKALSDACMGTIASFLSKYQDIIIEHQKVVKGNQKRLESLRELAGKENLEYPSVTLPPQPHTKEGVDAYNEVIARVRWWVNLNLWQKLKLSRDDAKPLLRLKGFPSFPLVERQANEVDWWDMVCNVKKLINEKKEDGKVFWQNLAGYKRQEALRPYLSSEEDRKKGKKFARYQLGDLLLHLEKKHGEDWGKVYDEAWERIDKKVEGLSKHIKLEEERRSEDAQSKAALTDWLRAKASFVIEGLKEADKDEFCRCELKLQKWYGDLRGKPFAIEAENSILDISGFSKQYNCAFIWQKDGVKKLNLYLIINYFKGGKLRFKKIKPEAFEANRFYTVINKKSGEIVPMEVNFNFDDPNLIILPLAFGKRQGREFIWNDLLSLETGSLKLANGRVIEKTLYNRRTRQDEPALFVALTFERREVLDSSNIKPMNLIGVDRGENIPAVIALTDPEGCPLSRFKDSLGNPTHILRIGESYKEKQRTIQAKKEVEQRRAGGYSRKYASKAKNLADDMVRNTARDLLYYAVTQDAMLIFENLSRGFGRQGKRTFMAERQYTRMEDWLTAKLAYEGLPSKTYLSKTLAQYTSKTCSNCGFTITSADYDRMLEKLKKTATGWMTTINGKELKVEGQITYYNRYKRQNVVKDLSVELDRLSEESVNNDISSWTKGRSGEALSLLKKRFSHRPVQEKFVCLNCGFETHADEQAALNIARSWLFLRSQEYKKYQTNKTTGNTDKRAFVETWQSFYRKKLKEVWKPAV

SEQ ID NO: 36406 - protein, 978 aa, synthetic construct
  REGION 1..978: note = engineered CasX variant
QEIKRINKIRRRLVKDSNTKKAGKTGPMKTLLVRVMTPDLRERLENLRKKPENIPQPISNTSRANLNKLLTDYTEMKKAILHVYWEEFQKDPVGLMSRVAQPASKKIDQNKLKPEMDEKGNLTTAGFACSQCGQPLFVYKLEQVSEKGKAYTNYFGRCNVAEHEKLILLAQLKPEKDSDEAVTYSLGKFGQRALDFYSIHVTKESTHPVKPLAQIAGNRYASVPVGKALSDACMGTIASFLSKYQDIIIEHQKVVKGNQKRLESLRELAGKENLEYPSVTLPPQPHTKEGVDAYNEVIARVRWWVNLNLWQKLKLSRDDAKPLLRLKGFPSFPLVERQANEVDWWDMVCNVKKLINEKKEDGKVFWQNLAGYKRQEALRPYLSSEEDRKKGKKFARYQLGDLLLHLEKKHGEDWGKVYDEAWERIDKKVEGLSKHIKLEEERRSEDAQSKAALTDWLRAKASFVIEGLKEADKDEFCRCELKLQKWYGDLRGKPFAIEAENSILDISGFSKQYNCAFIWQKDGVKKLNLYLIINYFKGGKLRFKKIKPEAFEANRFYTVINKKSGEIVPMEVNFNFDDPNLIILPLAFGKRQGREFIWNDLLSLETGSLKLANGRVIEKTLYNRRTRQDEPALFVALTFERREVLDSSNIKPMNLIGVDRGENIPAVIALTDPEGCPLSRFKDSLGNPTHILRIGESYKEKQRTIQAKKEVEQRRAGGYSRKYASKAKNLADDMVRNTARDLLYYAVTQDAMLIFENLSRGFGRQGKRTFMAERQYTRMEDWLTAKLAYEGLPSKTYLSKTLAQYTSKTCSNCGFTITSADYDRMLEKLKKTATGWMTTINGKELKVEGQITYYNRYKRQNVVKDLSVELDRLSEESVNNDISSWTKGRSGEALSLLKKRFSHRPVQEKFVCLNCGFETHADEQAALNIARSWLFLRSQEYKKYQTNKTTGNTDKRAFVETWQSFYRKKLKEVWKPAV

SEQ ID NO: 36407 - protein, 978 aa, synthetic construct
  REGION 1..978: note = engineered CasX variant
QEIKRINKIRRRLVKDSNTKKAGKTGPMKTLLVRVMTPDLRERLENLRKKPENIPQPISNTSRANLNKLLTDYTEMKKAILHVYWEEFQKDPVGLMSRVAQPASKKIDQNKLKPEMDEKGNLTTAGFACSQCGQPLFVYKLEQVSEKGKAYTNYFGRCNVAEHEKLIKLAQLKPEKDSDEAVTYSLGKFGQRALDFYSIHVTKESTHPVKPLAQIAGNRYASGPVGKALSDACMGTIASFLSKYQDIIIEHQKVVKGNQKRLESLRELAGKENLEYPSVTLPPQPHTKEGVDAYNEVIARVRWWVNLNLWQKLKLSRDDAKPLLRLKGFPSFPLVERQANEVDWWDMVCNVKKLINEKKEDGKVFWQNLAGYKRQEALRPYLSSEEDRKKGKKFARYQLGDLLLHLEKKHGEDWGKVYDEAWERIDKKVEGLSKHIKLEEERRSEDAQSKAALTDWLRAKASFVIEGLKEADKDEFCRCELKLQKWYGDLRGKPFAIEAENSILDISGFSKQYNCAFIWQKDGVKKLNLYLIINYFKGGKLRFKKIKPEAFEANRFYTVINKKSGEIVPMEVNFNFDDPNLIILPLAFGKRQGREFIWNDLLSLETGSLKLANGRVIEKTLYNRRTRQDEPALFVALTFERREVLDSSNIKPMNLIGVDRGENIPAVIALTDPEGCPLSRFKDSLGNPTHILRIGESYKEKQRTIQAKKEVEQRRAGGYSRKYASKAKNLADDMVRNTARDLLYYAVTQDAMLIFENLSRGFGRQGKRTFMAERQYTRMEDWLTAKLAYEGLPSKTYLSKTLAQYTSKTCSNCGFTITSADYDRMLEKLKKTATGWMTTINGKELKVEGQITYYNRYKRQNVVKDLSVELDRLSEESVNNDISSWTKGRSGEALSLLKKRFSHRPVQEKFVCLNCGFETHADEQAALNIARSWLFLRSQEYKKYQTNKTTGNTDKRAFVETWQSFYRKKLKEVWKPAV

SEQ ID NO: 36408 - protein, 977 aa, synthetic construct
  REGION 1..977: note = engineered CasX variant
QEIKRINKIRRRLVKDSNTKKAGKTGPMKTLLVRVMTPDLRERLENLRKKPENIPQPISNTSRANLNKLLTDYTEMKKAILHVYWEEFQKDPVGLMSRVAQPASKKIDQNKLKPEMDEKGNLTTAGFACSQCGQPLFVYKLEQVSEKGKAYTNYFGRCNVAEHEKLILLAQLKPEKDSDEAVTYSLGKFGQRALDFYSIHVTKESTHPVKPLAQIAGNRYASPVGKALSDACMGTIASFLSKYQDIIIEHQKVVKGNQKRLESLRELAGKENLEYPSVTLPPQPHTKEGVDAYNEVIARVRWWVNLNLWQKLKLSRDDAKPLLRLKGFPSFPLVERQANEVDWWDMVCNVKKLINEKKEDGKVFWQNLAGYKRQEALRPYLSSEEDRKKGKKFARYQLGDLLLHLEKKHGEDWGKVYDEAWERIDKKVEGLSKHIKLEEERRSEDAQSKAALTDWLRAKASFVIEGLKEADKDEFCRCELKLQKWYGDLRGKPFAIEAENSILDISGFSKQYNCAFIWQKDGVKKLNLYLIINYFKGGKLRFKKIKPEAFEANRFYTVINKKSGEIVPMEVNFNFDDPNLIILPLAFGKRQGREFIWNDLLSLETGSLKLANGRVIEKTLYNRRTRQDEPALFVALTFERREVLDSSNIKPMNLIGVDRGENIPAVIALTDPEGCPLSRFKDSLGNPTHILRIGESYKEKQRTIQAKKEVEQRRAGGYSRKYASKAKNLADDMVRNTARDLLYYAVTQDAMLIFENLSRGFGRQGKRTFMAERQYTRMEDWLTAKLAYEGLPSKTYLSKTLAQYTSKTCSNCGFTITSADYDRMLEKLKKTATGWMTTINGKELKVEGQITYYNRYKRQNVVKDLSVELDRLSEESVNNDISSWTKGRSGEALSLLKKRFSHRPVQEKFVCLNCGFETHADEQAALNIARSWLFLRSQEYKKYQTNKTTGNTDKRAFVETWQSFYRKKLKEVWKPAV

SEQ ID NO: 36409 - protein, 978 aa, synthetic construct
  REGION 1..978: note = engineered CasX variant
QEIKRINKIRRRLVKDSNTKKAGKTGPMKTLLVRVMTPDLRERLENLRKKPENIPQPISNTSRANLNKLLTDYTEMKKAILHVYWEEFQKDPVGLMSRVAQPASKKIDQNKLKPEMDEKGNLTTAGFACSQCGQPLFVYKLEQVSEKGKAYTNYFGRCNVAEHEKLILLAQLKPEKDSDEAVTYSLGKFGQRALDFYSIHVTKESTHPVKPLAQIAGNRYASYPVGKALSDACMGTIASFLSKYQDIIIEHQKVVKGNQKRLESLRELAGKENLEYPSVTLPPQPHTKEGVDAYNEVIARVRWWVNLNLWQKLKLSRDDAKPLLRLKGFPSFPLVERQANEVDWWDMVCNVKKLINEKKEDGKVFWQNLAGYKRQEALRPYLSSEEDRKKGKKFARYQLGDLLLHLEKKHGEDWGKVYDEAWERIDKKVEGLSKHIKLEEERRSEDAQSKAALTDWLRAKASFVIEGLKEADKDEFCRCELKLQKWYGDLRGKPFAIEAENSILDISGFSKQYNCAFIWQKDGVKKLNLYLIINYFKGGKLRFKKIKPEAFEANRFYTVINKKSGEIVPMEVNFNFDDPNLIILPLAFGKRQGREFIWNDLLSLETGSLKLANGRVIEKTLYNRRTRQDEPALFVALTFERREVLDSSNIKPMNLIGVDRGENIPAVIALTDPEGCPLSRFKDSLGNPTHILRIGESYKEKQRTIQAKKEVEQRRAGGYSRKYASKAKNLADDMVRNTARDLLYYAVTQDAMLIFENLSRGFGRQGKRTFMAERQYTRMEDWLTAKLAYEGLPSKTYLSKTLAQYTSKTCSNCGFTITSADYDRVLEKLKKTATGWMTTINGKELKVEGQITYYNRYKRQNVVKDLSVELDRLSEESVNNDISSWTKGRQGEALSLLKKRFSHRPVQEKFVCLNCGFETHADEQAALNIARSWLFLRSQEYKKYQTNKTTGNTDKRAFVETWQSFYRKKLKEVWKPAV

SEQ ID NO: 36410 - protein, 978 aa, synthetic construct
  REGION 1..978: note = engineered CasX variant
QEIKRINKIRRRLVKDSNTKKAGKTGPMKTLLVRVMTPDLRERLENLRKKPENIPQPISNTSRANLNKLLTDYTEMKKAILHVYWEEFQKDPVGLMSRVAQPASKKIDQNKLKPEMDEKGNLTTAGFACSQCGQPLFVYKLEQVSEKGKAYTNYFGRCNVAEHEKLILLAQLKPEKDSDEAVTYSLGKFGQRALDFYSIHVTKESTHPVKPLAQIAGNRYASHPVGKALSDACMGTIASFLSKYQDIIIEHQKVVKGNQKRLESLRELAGKENLEYPSVTLPPQPHTKEGVDAYNEVIARVRWWVNLNLWQKLKLSRDDAKPLLRLKGFPSFPLVERQANEVDWWDMVCNVKKLINEKKEDGKVFWQNLAGYKRQEALRPYLSSEEDRKKGKKFARYQLGDLLLHLEKKHGEDWGKVYDEAWERIDKKVEGLSKHIKLEEERRSEDAQSKAALTDWLRAKASFVIEGLKEADKDEFCRCELKLQKWYGDLRGKPFAIEAENSILDISGFSKQYNCAFIWQKDGVKKLNLYLIINYFKGGKLRFKKIKPEAFEANRFYTVINKKSGEIVPMEVNFNFDDPNLIILPLAFGKRQGREFIWNDLLSLETGSLKLANGRVIEKTLYNRRTRQDEPALFVALTFERREVLDSSNIKPMNLIGVDRGENIPAVIALTDPEGCPLSRFKDSLGNPTHILRIGESYKEKQRTIQAKKEVEQRRAGGYSRKYASKAKNLADDMVRNTARDLLYYAVTQDAMLIFENLSRGFGRQGKRTFMAERQYTRMEDWLTAKLAYEGLPSKTYLSKTLAQYTSKTCSNCGFTITSADYDRVLEKLKKTATGWMTTINGKELKVEGQITYYNRYKRQNVVKDLSVELDRLSEESVNNDISSWTKGRQGEALSLLKKRFSHRPVQEKFVCLNCGFETHADEQAALNIARSWLFLRSQEYKKYQTNKTTGNTDKRAFVETWQSFYRKKLKEVWKPAV

SEQ ID NO: 36411 - protein, 978 aa, synthetic construct
  REGION 1..978: note = engineered CasX variant
QEIKRINKIRRRLVKDSNTKKAGKTGPMKTLLVRVMTPDLRERLENLRKKPENIPQPISNTSRANLNKLLTDYTEMKKAILHVYWEEFQKDPVGLMSRVAQPASKKIDQNKLKPEMDEKGNLTTAGFACSQCGQPLFVYKLEQVSEKGKAYTNYFGRCNVAEHEKLILLAQLKPEKDSDEAVTYSLGKFGQRALDFYSIHVTKESTHPVKPLAQIAGNRYASSPVGKALSDACMGTIASFLSKYQDIIIEHQKVVKGNQKRLESLRELAGKENLEYPSVTLPPQPHTKEGVDAYNEVIARVRWWVNLNLWQKLKLSRDDAKPLLRLKGFPSFPLVERQANEVDWWDMVCNVKKLINEKKEDGKVFWQNLAGYKRQEALRPYLSSEEDRKKGKKFARYQLGDLLLHLEKKHGEDWGKVYDEAWERIDKKVEGLSKHIKLEEERRSEDAQSKAALTDWLRAKASFVIEGLKEADKDEFCRCELKLQKWYGDLRGKPFAIEAENSILDISGFSKQYNCAFIWQKDGVKKLNLYLIINYFKGGKLRFKKIKPEAFEANRFYTVINKKSGEIVPMEVNFNFDDPNLIILPLAFGKRQGREFIWNDLLSLETGSLKLANGRVIEKTLYNRRTRQDEPALFVALTFERREVLDSSNIKPMNLIGVDRGENIPAVIALTDPEGCPLSRFKDSLGNPTHILRIGESYKEKQRTIQAKKEVEQRRAGGYSRKYASKAKNLADDMVRNTARDLLYYAVTQDAMLIFENLSRGFGRQGKRTFMAERQYTRMEDWLTAKLAYEGLPSKTYLSKTLAQYTSKTCSNCGFTITSADYDRVLEKLKKTATGWMTTINGKELKVEGQITYYNRYKRQNVVKDLSVELDRLSEESVNNDISSWTKGRQGEALSLLKKRFSHRPVQEKFVCLNCGFETHADEQAALNIARSWLFLRSQEYKKYQTNKTTGNTDKRAFVETWQSFYRKKLKEVWKPAV

SEQ ID NO: 36412 - protein, 978 aa, synthetic construct
  REGION 1..978: note = engineered CasX variant
QEIKRINKIRRRLVKDSNTKKAGKTGPMKTLLVRVMTPDLRERLENLRKKPENIPQPISNTSRANLNKLLTDYTEMKKAILHVYWEEFQKDPVGLMSRVAQPASKKIDQNKLKPEMDEKGNLTTAGFACSQCGQPLFVYKLEQVSEKGKAYTNYFGRCNVAEHEKLILLAQLKPEKDSDEAVTYSLGKFGQRALDFYSIHVTKESTHPVKPLAQIAGNRYASTPVGKALSDACMGTIASFLSKYQDIIIEHQKVVKGNQKRLESLRELAGKENLEYPSVTLPPQPHTKEGVDAYNEVIARVRWWVNLNLWQKLKLSRDDAKPLLRLKGFPSFPLVERQANEVDWWDMVCNVKKLINEKKEDGKVFWQNLAGYKRQEALRPYLSSEEDRKKGKKFARYQLGDLLLHLEKKHGEDWGKVYDEAWERIDKKVEGLSKHIKLEEERRSEDAQSKAALTDWLRAKASFVIEGLKEADKDEFCRCELKLQKWYGDLRGKPFAIEAENSILDISGFSKQYNCAFIWQKDGVKKLNLYLIINYFKGGKLRFKKIKPEAFEANRFYTVINKKSGEIVPMEVNFNFDDPNLIILPLAFGKRQGREFIWNDLLSLETGSLKLANGRVIEKTLYNRRTRQDEPALFVALTFERREVLDSSNIKPMNLIGVDRGENIPAVIALTDPEGCPLSRFKDSLGNPTHILRIGESYKEKQRTIQAKKEVEQRRAGGYSRKYASKAKNLADDMVRNTARDLLYYAVTQDAMLIFENLSRGFGRQGKRTFMAERQYTRMEDWLTAKLAYEGLPSKTYLSKTLAQYTSKTCSNCGFTITSADYDRVLEKLKKTATGWMTTINGKELKVEGQITYYNRYKRQNVVKDLSVELDRLSEESVNNDISSWTKGRQGEALSLLKKRFSHRPVQEKFVCLNCGFETHADEQAALNIARSWLFLRSQEYKKYQTNKTTGNTDKRAFVETWQSFYRKKLKEVWKPAV

SEQ ID NO: 36413 - protein, 978 aa, synthetic construct
  REGION 1..978: note = engineered CasX variant
QEIKRINKIRRRLVKDSNTKKAGKTGPMKTLLVRVMTPDLRERLENLRKKPENIPQPISNTSRANLNKLLTDYTEMKKAILHVYWEEFQKDPVGLMSRVAQPASKKIDQNKLKPEMDEKGNLTTAGFACSQCGQPLFVYKLEQVSEKGKAYTNYFGRCNVAEHEKLILLAQLKPEKDSDEAVTYSLGKFGQRALDFYSIHVTKESTHPVKPLAQIAGNRYASAPVGKALSDACMGTIASFLSKYQDIIIEHQKVVKGNQKRLESLRELAGKENLEYPSVTLPPQPHTKEGVDAYNEVIARVRWWVNLNLWQKLKLSRDDAKPLLRLKGFPSFPLVERQANEVDWWDMVCNVKKLINEKKEDGKVFWQNLAGYKRQEALRPYLSSEEDRKKGKKFARYQLGDLLLHLEKKHGEDWGKVYDEAWERIDKKVEGLSKHIKLEEERRSEDAQSKAALTDWLRAKASFVIEGLKEADKDEFCRCELKLQKWYGDLRGKPFAIEAENSILDISGFSKQYNCAFIWQKDGVKKLNLYLIINYFKGGKLRFKKIKPEAFEANRFYTVINKKSGEIVPMEVNFNFDDPNLIILPLAFGKRQGREFIWNDLLSLETGSLKLANGRVIEKTLYNRRTRQDEPALFVALTFERREVLDSSNIKPMNLIGVDRGENIPAVIALTDPEGCPLSRFKDSLGNPTHILRIGESYKEKQRTIQAKKEVEQRRAGGYSRKYASKAKNLADDMVRNTARDLLYYAVTQDAMLIFENLSRGFGRQGKRTFMAERQYTRMEDWLTAKLAYEGLPSKTYLSKTLAQYTSKTCSNCGFTITSADYDRVLEKLKKTATGWMTTINGKELKVEGQITYYNRYKRQNVVKDLSVELDRLSEESVNNDISSWTKGRQGEALSLLKKRFSHRPVQEKFVCLNCGFETHADEQAALNIARSWLFLRSQEYKKYQTNKTTGNTDKRAFVETWQSFYRKKLKEVWKPAV

SEQ ID NO: 36414 - protein, 978 aa, synthetic construct
  REGION 1..978: note = engineered CasX variant
QEIKRINKIRRRLVKDSNTKKAGKTGPMKTLLVRVMTPDLRERLENLRKKPENIPQPISNTSRANLNKLLTDYTEMKKAILHVYWEEFQKDPVGLMSRVAQPASKKIDQNKLKPEMDEKGNLTTAGFACSQCGQPLFVYKLEQVSEKGKAYTNYFGRCNVAEHEKLILLAQLKPEKDSDEAVTYSLGKFGQRALDFYSIHVTKESTHPVKPLAQIAGNRYASVPVGKALSDACMGTIASFLSKYQDIIIEHQKVVKGNQKRLESLRELAGKENLEYPSVTLPPQPHTKEGVDAYNEVIARVRWWVNLNLWQKLKLSRDDAKPLLRLKGFPSFPLVERQANEVDWWDMVCNVKKLINEKKEDGKVFWQNLAGYKRQEALRPYLSSEEDRKKGKKFARYQLGDLLLHLEKKHGEDWGKVYDEAWERIDKKVEGLSKHIKLEEERRSEDAQSKAALTDWLRAKASFVIEGLKEADKDEFCRCELKLQKWYGDLRGKPFAIEAENSILDISGFSKQYNCAFIWQKDGVKKLNLYLIINYFKGGKLRFKKIKPEAFEANRFYTVINKKSGEIVPMEVNFNFDDPNLIILPLAFGKRQGREFIWNDLLSLETGSLKLANGRVIEKTLYNRRTRQDEPALFVALTFERREVLDSSNIKPMNLIGVDRGENIPAVIALTDPEGCPLSRFKDSLGNPTHILRIGESYKEKQRTIQAKKEVEQRRAGGYSRKYASKAKNLADDMVRNTARDLLYYAVTQDAMLIFENLSRGFGRQGKRTFMAERQYTRMEDWLTAKLAYEGLPSKTYLSKTLAQYTSKTCSNCGFTITSADYDRVLEKLKKTATGWMTTINGKELKVEGQITYYNRYKRQNVVKDLSVELDRLSEESVNNDISSWTKGRQGEALSLLKKRFSHRPVQEKFVCLNCGFETHADEQAALNIARSWLFLRSQEYKKYQTNKTTGNTDKRAFVETWQSFYRKKLKEVWKPAV

SEQ ID NO: 36415 - protein, 978 aa, synthetic construct
  REGION 1..978: note = engineered CasX variant
QEIKRINKIRRRLVKDSNTKKAGKTGPMKTLLVRVMTPDLRERLENLRKKPENIPQPISNTSRANLNKLLTDYTEMKKAILHVYWEEFQKDPVGLMSRVAQPASKKIDQNKLKPEMDEKGNLTTAGFACSQCGQPLFVYKLEQVSEKGKAYTNYFGRCNVAEHEKLIKLAQLKPEKDSDEAVTYSLGKFGQRALDFYSIHVTKESTHPVKPLAQIAGNRYASGPVGKALSDACMGTIASFLSKYQDIIIEHQKVVKGNQKRLESLRELAGKENLEYPSVTLPPQPHTKEGVDAYNEVIARVRWWVNLNLWQKLKLSRDDAKPLLRLKGFPSFPLVERQANEVDWWDMVCNVKKLINEKKEDGKVFWQNLAGYKRQEALRPYLSSEEDRKKGKKFARYQLGDLLLHLEKKHGEDWGKVYDEAWERIDKKVEGLSKHIKLEEERRSEDAQSKAALTDWLRAKASFVIEGLKEADKDEFCRCELKLQKWYGDLRGKPFAIEAENSILDISGFSKQYNCAFIWQKDGVKKLNLYLIINYFKGGKLRFKKIKPEAFEANRFYTVINKKSGEIVPMEVNFNFDDPNLIILPLAFGKRQGREFIWNDLLSLETGSLKLANGRVIEKTLYNRRTRQDEPALFVALTFERREVLDSSNIKPMNLIGVDRGENIPAVIALTDPEGCPLSRFKDSLGNPTHILRIGESYKEKQRTIQAKKEVEQRRAGGYSRKYASKAKNLADDMVRNTARDLLYYAVTQDAMLIFENLSRGFGRQGKRTFMAERQYTRMEDWLTAKLAYEGLPSKTYLSKTLAQYTSKTCSNCGFTITSADYDRVLEKLKKTATGWMTTINGKELKVEGQITYYNRYKRQNVVKDLSVELDRLSEESVNNDISSWTKGRQGEALSLLKKRFSHRPVQEKFVCLNCGFETHADEQAALNIARSWLFLRSQEYKKYQTNKTTGNTDKRAFVETWQSFYRKKLKEVWKPAV

SEQ ID NO: 36416 - protein, 977 aa, synthetic construct
  REGION 1..977: note = engineered CasX variant
QEIKRINKIRRRLVKDSNTKKAGKTGPMKTLLVRVMTPDLRERLENLRKKPENIPQPISNTSRANLNKLLTDYTEMKKAILHVYWEEFQKDPVGLMSRVAQPASKKIDQNKLKPEMDEKGNLTTAGFACSQCGQPLFVYKLEQVSEKGKAYTNYFGRCNVAEHEKLILLAQLKPEKDSDEAVTYSLGKFGQRALDFYSIHVTKESTHPVKPLAQIAGNRYASPVGKALSDACMGTIASFLSKYQDIIIEHQKVVKGNQKRLESLRELAGKENLEYPSVTLPPQPHTKEGVDAYNEVIARVRWWVNLNLWQKLKLSRDDAKPLLRLKGFPSFPLVERQANEVDWWDMVCNVKKLINEKKEDGKVFWQNLAGYKRQEALRPYLSSEEDRKKGKKFARYQLGDLLLHLEKKHGEDWGKVYDEAWERIDKKVEGLSKHIKLEEERRSEDAQSKAALTDWLRAKASFVIEGLKEADKDEFCRCELKLQKWYGDLRGKPFAIEAENSILDISGFSKQYNCAFIWQKDGVKKLNLYLIINYFKGGKLRFKKIKPEAFEANRFYTVINKKSGEIVPMEVNFNFDDPNLIILPLAFGKRQGREFIWNDLLSLETGSLKLANGRVIEKTLYNRRTRQDEPALFVALTFERREVLDSSNIKPMNLIGVDRGENIPAVIALTDPEGCPLSRFKDSLGNPTHILRIGESYKEKQRTIQAKKEVEQRRAGGYSRKYASKAKNLADDMVRNTARDLLYYAVTQDAMLIFENLSRGFGRQGKRTFMAERQYTRMEDWLTAKLAYEGLPSKTYLSKTLAQYTSKTCSNCGFTITSADYDRVLEKLKKTATGWMTTINGKELKVEGQITYYNRYKRQNVVKDLSVELDRLSEESVNNDISSWTKGRQGEALSLLKKRFSHRPVQEKFVCLNCGFETHADEQAALNIARSWLFLRSQEYKKYQTNKTTGNTDKRAFVETWQSFYRKKLKEVWKPAV

SEQ ID NO: 36417 - protein, 978 aa, synthetic construct
  REGION 1..978: note = engineered CasX variant
QEIKRINKIRRRLVKDSNTKKAGKTGPMKTLLVRVMTPDLRERLENLRKKPENIPQPISNTSRANLNKLLTDYTEMKKAILHVYWEEFQKDPVGLMSRVAQPASKKIDQNKLKPEMDEKGNLTTAGFACSQCGQPLFVYKLEQVSEKGKAYTNYFGRCNVAEHEKLILLAQLKPEKDSDEAVTYSLGKFGQRALDFYSIHVTKESTHPVKPLAQIAGNRYASYPVGKALSDACMGTIASFLSKYQDIIIEHQKVVKGNQKRLESLRELAGKENLEYPSVTLPPQPHTKEGVDAYNEVIARVRWWVNLNLWQKLKLSRDDAKPLLRLKGFPSFPLVERQANEVDWWDMVCNVKKLINEKKEDGKVFWQNLAGYKRQEALRPYLSSEEDRKKGKKFARYQLGDLLLHLEKKHGEDWGKVYDEAWERIDKKVEGLSKHIKLEEERRSEDAQSKAALTDWLRAKASFVIEGLKEADKDEFCRCELKLQKWYGDLRGKPFAIEAENSILDISGFSKQYNCAFIWQKDGVKKLNLYLIINYFKGGKLRFKKIKPEAFEANRFYTVINKKSGEIVPMEVNFNFDDPNLIILPLAFGKRQGREFIWNDLLSLETGSLKLANGRVIEKTLYNRRTRQDEPALFVALTFERREVLDSSNIKPMNLIGVDRGENIPAVIALTDPEGCPLSRFKDSLGNPTHILRIGESYKEKQRTIQAKKEVEQRRAGGYSRKYASKAKNLADDMVRNTARDLLYYAVTQDAMLIFENLSRGFGRQGKRTFMAERQYTRMEDWLTAKLAYEGLPSKTYLSKTLAQYTSKTCSNCGFTITSADYDRVLEKLKKTATGWMTTINGKELKVEGQITYYNRYKRQNVVKDLSVELDRLSEESVNNDISSWTKGRSGEALSLLKKRFSHRPVQEKFVCLNCEFETHADEQAALNIARSWLFLRSQEYKKYQTNKTTGNTDKRAFVETWQSFYRKKLKEVWKPAV

SEQ ID NO: 36418 - protein, 978 aa, synthetic construct
  REGION 1..978: note = engineered CasX variant
QEIKRINKIRRRLVKDSNTKKAGKTGPMKTLLVRVMTPDLRERLENLRKKPENIPQPISNTSRANLNKLLTDYTEMKKAILHVYWEEFQKDPVGLMSRVAQPASKKIDQNKLKPEMDEKGNLTTAGFACSQCGQPLFVYKLEQVSEKGKAYTNYFGRCNVAEHEKLILLAQLKPEKDSDEAVTYSLGKFGQRALDFYSIHVTKESTHPVKPLAQIAGNRYASHPVGKALSDACMGTIASFLSKYQDIIIEHQKVVKGNQKRLESLRELAGKENLEYPSVTLPPQPHTKEGVDAYNEVIARVRWWVNLNLWQKLKLSRDDAKPLLRLKGFPSFPLVERQANEVDWWDMVCNVKKLINEKKEDGKVFWQNLAGYKRQEALRPYLSSEEDRKKGKKFARYQLGDLLLHLEKKHGEDWGKVYDEAWERIDKKVEGLSKHIKLEEERRSEDAQSKAALTDWLRAKASFVIEGLKEADKDEFCRCELKLQKWYGDLRGKPFAIEAENSILDISGFSKQYNCAFIWQKDGVKKLNLYLIINYFKGGKLRFKKIKPEAFEANRFYTVINKKSGEIVPMEVNFNFDDPNLIILPLAFGKRQGREFIWNDLLSLETGSLKLANGRVIEKTLYNRRTRQDEPALFVALTFERREVLDSSNIKPMNLIGVDRGENIPAVIALTDPEGCPLSRFKDSLGNPTHILRIGESYKEKQRTIQAKKEVEQRRAGGYSRKYASKAKNLADDMVRNTARDLLYYAVTQDAMLIFENLSRGFGRQGKRTFMAERQYTRMEDWLTAKLAYEGLPSKTYLSKTLAQYTSKTCSNCGFTITSADYDRVLEKLKKTATGWMTTINGKELKVEGQITYYNRYKRQNVVKDLSVELDRLSEESVNNDISSWTKGRSGEALSLLKKRFSHRPVQEKFVCLNCEFETHADEQAALNIARSWLFLRSQEYKKYQTNKTTGNTDKRAFVETWQSFYRKKLKEVWKPAV

SEQ ID NO: 36419 - protein, 978 aa, synthetic construct
  REGION 1..978: note = engineered CasX variant
QEIKRINKIRRRLVKDSNTKKAGKTGPMKTLLVRVMTPDLRERLENLRKKPENIPQPISNTSRANLNKLLTDYTEMKKAILHVYWEEFQKDPVGLMSRVAQPASKKIDQNKLKPEMDEKGNLTTAGFACSQCGQPLFVYKLEQVSEKGKAYTNYFGRCNVAEHEKLILLAQLKPEKDSDEAVTYSLGKFGQRALDFYSIHVTKESTHPVKPLAQIAGNRYASSPVGKALSDACMGTIASFLSKYQDIIIEHQKVVKGNQKRLESLRELAGKENLEYPSVTLPPQPHTKEGVDAYNEVIARVRWWVNLNLWQKLKLSRDDAKPLLRLKGFPSFPLVERQANEVDWWDMVCNVKKLINEKKEDGKVFWQNLAGYKRQEALRPYLSSEEDRKKGKKFARYQLGDLLLHLEKKHGEDWGKVYDEAWERIDKKVEGLSKHIKLEEERRSEDAQSKAALTDWLRAKASFVIEGLKEADKDEFCRCELKLQKWYGDLRGKPFAIEAENSILDISGFSKQYNCAFIWQKDGVKKLNLYLIINYFKGGKLRFKKIKPEAFEANRFYTVINKKSGEIVPMEVNFNFDDPNLIILPLAFGKRQGREFIWNDLLSLETGSLKLANGRVIEKTLYNRRTRQDEPALFVALTFERREVLDSSNIKPMNLIGVDRGENIPAVIALTDPEGCPLSRFKDSLGNPTHILRIGESYKEKQRTIQAKKEVEQRRAGGYSRKYASKAKNLADDMVRNTARDLLYYAVTQDAMLIFENLSRGFGRQGKRTFMAERQYTRMEDWLTAKLAYEGLPSKTYLSKTLAQYTSKTCSNCGFTITSADYDRVLEKLKKTATGWMTTINGKELKVEGQITYYNRYKRQNVVKDLSVELDRLSEESVNNDISSWTKGRSGEALSLLKKRFSHRPVQEKFVCLNCEFETHADEQAALNIARSWLFLRSQEYKKYQTNKTTGNTDKRAFVETWQSFYRKKLKEVWKPAV

SEQ ID NO: 36420 - protein, 978 aa, synthetic construct
  REGION 1..978: note = engineered CasX variant
QEIKRINKIRRRLVKDSNTKKAGKTGPMKTLLVRVMTPDLRERLENLRKKPENIPQPISNTSRANLNKLLTDYTEMKKAILHVYWEEFQKDPVGLMSRVAQPASKKIDQNKLKPEMDEKGNLTTAGFACSQCGQPLFVYKLEQVSEKGKAYTNYFGRCNVAEHEKLILLAQLKPEKDSDEAVTYSLGKFGQRALDFYSIHVTKESTHPVKPLAQIAGNRYASTPVGKALSDACMGTIASFLSKYQDIIIEHQKVVKGNQKRLESLRELAGKENLEYPSVTLPPQPHTKEGVDAYNEVIARVRWWVNLNLWQKLKLSRDDAKPLLRLKGFPSFPLVERQANEVDWWDMVCNVKKLINEKKEDGKVFWQNLAGYKRQEALRPYLSSEEDRKKGKKFARYQLGDLLLHLEKKHGEDWGKVYDEAWERIDKKVEGLSKHIKLEEERRSEDAQSKAALTDWLRAKASFVIEGLKEADKDEFCRCELKLQKWYGDLRGKPFAIEAENSILDISGFSKQYNCAFIWQKDGVKKLNLYLIINYFKGGKLRFKKIKPEAFEANRFYTVINKKSGEIVPMEVNFNFDDPNLIILPLAFGKRQGREFIWNDLLSLETGSLKLANGRVIEKTLYNRRTRQDEPALFVALTFERREVLDSSNIKPMNLIGVDRGENIPAVIALTDPEGCPLSRFKDSLGNPTHILRIGESYKEKQRTIQAKKEVEQRRAGGYSRKYASKAKNLADDMVRNTARDLLYYAVTQDAMLIFENLSRGFGRQGKRTFMAERQYTRMEDWLTAKLAYEGLPSKTYLSKTLAQYTSKTCSNCGFTITSADYDRVLEKLKKTATGWMTTINGKELKVEGQITYYNRYKRQNVVKDLSVELDRLSEESVNNDISSWTKGRSGEALSLLKKRFSHRPVQEKFVCLNCEFETHADEQAALNIARSWLFLRSQEYKKYQTNKTTGNTDKRAFVETWQSFYRKKLKEVWKPAV

SEQ ID NO: 36421 - protein, 978 aa, synthetic construct
  REGION 1..978: note = engineered CasX variant
QEIKRINKIRRRLVKDSNTKKAGKTGPMKTLLVRVMTPDLRERLENLRKKPENIPQPISNTSRANLNKLLTDYTEMKKAILHVYWEEFQKDPVGLMSRVAQPASKKIDQNKLKPEMDEKGNLTTAGFACSQCGQPLFVYKLEQVSEKGKAYTNYFGRCNVAEHEKLILLAQLKPEKDSDEAVTYSLGKFGQRALDFYSIHVTKESTHPVKPLAQIAGNRYASAPVGKALSDACMGTIASFLSKYQDIIIEHQKVVKGNQKRLESLRELAGKENLEYPSVTLPPQPHTKEGVDAYNEVIARVRWWVNLNLWQKLKLSRDDAKPLLRLKGFPSFPLVERQANEVDWWDMVCNVKKLINEKKEDGKVFWQNLAGYKRQEALRPYLSSEEDRKKGKKFARYQLGDLLLHLEKKHGEDWGKVYDEAWERIDKKVEGLSKHIKLEEERRSEDAQSKAALTDWLRAKASFVIEGLKEADKDEFCRCELKLQKWYGDLRGKPFAIEAENSILDISGFSKQYNCAFIWQKDGVKKLNLYLIINYFKGGKLRFKKIKPEAFEANRFYTVINKKSGEIVPMEVNFNFDDPNLIILPLAFGKRQGREFIWNDLLSLETGSLKLANGRVIEKTLYNRRTRQDEPALFVALTFERREVLDSSNIKPMNLIGVDRGENIPAVIALTDPEGCPLSRFKDSLGNPTHILRIGESYKEKQRTIQAKKEVEQRRAGGYSRKYASKAKNLADDMVRNTARDLLYYAVTQDAMLIFENLSRGFGRQGKRTFMAERQYTRMEDWLTAKLAYEGLPSKTYLSKTLAQYTSKTCSNCGFTITSADYDRVLEKLKKTATGWMTTINGKELKVEGQITYYNRYKRQNVVKDLSVELDRLSEESVNNDISSWTKGRSGEALSLLKKRFSHRPVQEKFVCLNCEFETHADEQAALNIARSWLFLRSQEYKKYQTNKTTGNTDKRAFVETWQSFYRKKLKEVWKPAV

SEQ ID NO: 36422 - protein, 978 aa, synthetic construct
  REGION 1..978: note = engineered CasX variant
QEIKRINKIRRRLVKDSNTKKAGKTGPMKTLLVRVMTPDLRERLENLRKKPENIPQPISNTSRANLNKLLTDYTEMKKAILHVYWEEFQKDPVGLMSRVAQPASKKIDQNKLKPEMDEKGNLTTAGFACSQCGQPLFVYKLEQVSEKGKAYTNYFGRCNVAEHEKLILLAQLKPEKDSDEAVTYSLGKFGQRALDFYSIHVTKESTHPVKPLAQIAGNRYASVPVGKALSDACMGTIASFLSKYQDIIIEHQKVVKGNQKRLESLRELAGKENLEYPSVTLPPQPHTKEGVDAYNEVIARVRWWVNLNLWQKLKLSRDDAKPLLRLKGFPSFPLVERQANEVDWWDMVCNVKKLINEKKEDGKVFWQNLAGYKRQEALRPYLSSEEDRKKGKKFARYQLGDLLLHLEKKHGEDWGKVYDEAWERIDKKVEGLSKHIKLEEERRSEDAQSKAALTDWLRAKASFVIEGLKEADKDEFCRCELKLQKWYGDLRGKPFAIEAENSILDISGFSKQYNCAFIWQKDGVKKLNLYLIINYFKGGKLRFKKIKPEAFEANRFYTVINKKSGEIVPMEVNFNFDDPNLIILPLAFGKRQGREFIWNDLLSLETGSLKLANGRVIEKTLYNRRTRQDEPALFVALTFERREVLDSSNIKPMNLIGVDRGENIPAVIALTDPEGCPLSRFKDSLGNPTHILRIGESYKEKQRTIQAKKEVEQRRAGGYSRKYASKAKNLADDMVRNTARDLLYYAVTQDAMLIFENLSRGFGRQGKRTFMAERQYTRMEDWLTAKLAYEGLPSKTYLSKTLAQYTSKTCSNCGFTITSADYDRVLEKLKKTATGWMTTINGKELKVEGQITYYNRYKRQNVVKDLSVELDRLSEESVNNDISSWTKGRSGEALSLLKKRFSHRPVQEKFVCLNCEFETHADEQAALNIARSWLFLRSQEYKKYQTNKTTGNTDKRAFVETWQSFYRKKLKEVWKPAV

SEQ ID NO: 36423 - protein, 978 aa, synthetic construct
  REGION 1..978: note = engineered CasX variant
QEIKRINKIRRRLVKDSNTKKAGKTGPMKTLLVRVMTPDLRERLENLRKKPENIPQPISNTSRANLNKLLTDYTEMKKAILHVYWEEFQKDPVGLMSRVAQPASKKIDQNKLKPEMDEKGNLTTAGFACSQCGQPLFVYKLEQVSEKGKAYTNYFGRCNVAEHEKLIKLAQLKPEKDSDEAVTYSLGKFGQRALDFYSIHVTKESTHPVKPLAQIAGNRYASGPVGKALSDACMGTIASFLSKYQDIIIEHQKVVKGNQKRLESLRELAGKENLEYPSVTLPPQPHTKEGVDAYNEVIARVRWWVNLNLWQKLKLSRDDAKPLLRLKGFPSFPLVERQANEVDWWDMVCNVKKLINEKKEDGKVFWQNLAGYKRQEALRPYLSSEEDRKKGKKFARYQLGDLLLHLEKKHGEDWGKVYDEAWERIDKKVEGLSKHIKLEEERRSEDAQSKAALTDWLRAKASFVIEGLKEADKDEFCRCELKLQKWYGDLRGKPFAIEAENSILDISGFSKQYNCAFIWQKDGVKKLNLYLIINYFKGGKLRFKKIKPEAFEANRFYTVINKKSGEIVPMEVNFNFDDPNLIILPLAFGKRQGREFIWNDLLSLETGSLKLANGRVIEKTLYNRRTRQDEPALFVALTFERREVLDSSNIKPMNLIGVDRGENIPAVIALTDPEGCPLSRFKDSLGNPTHILRIGESYKEKQRTIQAKKEVEQRRAGGYSRKYASKAKNLADDMVRNTARDLLYYAVTQDAMLIFENLSRGFGRQGKRTFMAERQYTRMEDWLTAKLAYEGLPSKTYLSKTLAQYTSKTCSNCGFTITSADYDRVLEKLKKTATGWMTTINGKELKVEGQITYYNRYKRQNVVKDLSVELDRLSEESVNNDISSWTKGRSGEALSLLKKRFSHRPVQEKFVCLNCEFETHADEQAALNIARSWLFLRSQEYKKYQTNKTTGNTDKRAFVETWQSFYRKKLKEVWKPAV

SEQ ID NO: 36424 - protein, 977 aa, synthetic construct
  REGION 1..977: note = engineered CasX variant
QEIKRINKIRRRLVKDSNTKKAGKTGPMKTLLVRVMTPDLRERLENLRKKPENIPQPISNTSRANLNKLLTDYTEMKKAILHVYWEEFQKDPVGLMSRVAQPASKKIDQNKLKPEMDEKGNLTTAGFACSQCGQPLFVYKLEQVSEKGKAYTNYFGRCNVAEHEKLILLAQLKPEKDSDEAVTYSLGKFGQRALDFYSIHVTKESTHPVKPLAQIAGNRYASPVGKALSDACMGTIASFLSKYQDIIIEHQKVVKGNQKRLESLRELAGKENLEYPSVTLPPQPHTKEGVDAYNEVIARVRWWVNLNLWQKLKLSRDDAKPLLRLKGFPSFPLVERQANEVDWWDMVCNVKKLINEKKEDGKVFWQNLAGYKRQEALRPYLSSEEDRKKGKKFARYQLGDLLLHLEKKHGEDWGKVYDEAWERIDKKVEGLSKHIKLEEERRSEDAQSKAALTDWLRAKASFVIEGLKEADKDEFCRCELKLQKWYGDLRGKPFAIEAENSILDISGFSKQYNCAFIWQKDGVKKLNLYLIINYFKGGKLRFKKIKPEAFEANRFYTVINKKSGEIVPMEVNFNFDDPNLIILPLAFGKRQGREFIWNDLLSLETGSLKLANGRVIEKTLYNRRTRQDEPALFVALTFERREVLDSSNIKPMNLIGVDRGENIPAVIALTDPEGCPLSRFKDSLGNPTHILRIGESYKEKQRTIQAKKEVEQRRAGGYSRKYASKAKNLADDMVRNTARDLLYYAVTQDAMLIFENLSRGFGRQGKRTFMAERQYTRMEDWLTAKLAYEGLPSKTYLSKTLAQYTSKTCSNCGFTITSADYDRVLEKLKKTATGWMTTINGKELKVEGQITYYNRYKRQNVVKDLSVELDRLSEESVNNDISSWTKGRSGEALSLLKKRFSHRPVQEKFVCLNCEFETHADEQAALNIARSWLFLRSQEYKKYQTNKTTGNTDKRAFVETWQSFYRKKLKEVWKPAV

SEQ ID NO: 36425 - protein, 979 aa, synthetic construct
  REGION 1..979: note = engineered CasX variant
QEIKRINKIRRRLVKDSNTKKAGKTGPMKTLLVRVMTPDLRERLENLRKKPENIPQPISNTSRANLNKLLTDYTEMKKAILHVYWEEFQKDPVGLMSRVAQPASKKIDQNKLKPEMDEKGNLTTAGFACSQCGQPLFVYKLEQVSEKGKAYTNYFGRCNVAEHEKLILLAQLKPEKDSDEAVTYSLGKFGQRALDFYSIHVTKESTHPVKPLAQIAGNRYASYPVGKALSDACMGTIASFLSKYQDIIIEHQKVVKGNQKRLESLRELAGKENLEYPSVTLPPQPHTKEGVDAYNEVIARVRWWVNLNLWQKLKLSRDDAKPLLRLKGFPSFPLVERQANEVDWWDMVCNVKKLINEKKEDGKVFWQNLAGYKRQEALRPYLSSEEDRKKGKKFARYQLGDLLLHLEKKHGEDWGKVYDEAWERIDKKVEGLSKHIKLEEERRSEDAQSKAALTDWLRAKASFVIEGLKEADKDEFCRCELKLQKWYGDLRGKPFAIEAENSILDISGFSKQYNCAFIWQKDGVKKLNLYLIINYFKGGKLRFKKIKPEAFEANRFYTVINKKSGEIVPMEVNFNFDDPNLIILPLAFGKRQGREFIWNDLLSLETGSLKLANGRVIEKTLYNRRTRQDEPALFVALTFERREVLDSSNIKPMNLIGVDRGENIPAVIALTDPEGCPLSRFKDSLGNPTHILRIGESYKEKQRTIQAKKEVEQRRAGGYSRKYASKAKNLADDMVRNTARDLLYYAVTQDAMLIFENLSRGFGRQGKRTFMAERQYTRMEDWLTAKLAYEGLPSKTYLSKTLAQYTSKTCSNCGFTITSADYDRVLEKLKKTATGWMTTINGKELKVEGQITYYNRYKRQNVVKDLSVELDRLSEESVNNDISSWTKGRSGEALSLLKKRFSHRPVQEKFVCLNCGFETHADEQAALNIARSWLFLRSQEYKKYQTNKTSTGNTDKRAFVETWQSFYRKKLKEVWKPAV

SEQ ID NO: 36426 - protein, 979 aa, synthetic construct
  REGION 1..979: note = engineered CasX variant
QEIKRINKIRRRLVKDSNTKKAGKTGPMKTLLVRVMTPDLRERLENLRKKPENIPQPISNTSRANLNKLLTDYTEMKKAILHVYWEEFQKDPVGLMSRVAQPASKKIDQNKLKPEMDEKGNLTTAGFACSQCGQPLFVYKLEQVSEKGKAYTNYFGRCNVAEHEKLILLAQLKPEKDSDEAVTYSLGKFGQRALDFYSIHVTKESTHPVKPLAQIAGNRYASHPVGKALSDACMGTIASFLSKYQDIIIEHQKVVKGNQKRLESLRELAGKENLEYPSVTLPPQPHTKEGVDAYNEVIARVRWWVNLNLWQKLKLSRDDAKPLLRLKGFPSFPLVERQANEVDWWDMVCNVKKLINEKKEDGKVFWQNLAGYKRQEALRPYLSSEEDRKKGKKFARYQLGDLLLHLEKKHGEDWGKVYDEAWERIDKKVEGLSKHIKLEEERRSEDAQSKAALTDWLRAKASFVIEGLKEADKDEFCRCELKLQKWYGDLRGKPFAIEAENSILDISGFSKQYNCAFIWQKDGVKKLNLYLIINYFKGGKLRFKKIKPEAFEANRFYTVINKKSGEIVPMEVNFNFDDPNLIILPLAFGKRQGREFIWNDLLSLETGSLKLANGRVIEKTLYNRRTRQDEPALFVALTFERREVLDSSNIKPMNLIGVDRGENIPAVIALTDPEGCPLSRFKDSLGNPTHILRIGESYKEKQRTIQAKKEVEQRRAGGYSRKYASKAKNLADDMVRNTARDLLYYAVTQDAMLIFENLSRGFGRQGKRTFMAERQYTRMEDWLTAKLAYEGLPSKTYLSKTLAQYTSKTCSNCGFTITSADYDRVLEKLKKTATGWMTTINGKELKVEGQITYYNRYKRQNVVKDLSVELDRLSEESVNNDISSWTKGRSGEALSLLKKRFSHRPVQEKFVCLNCGFETHADEQAALNIARSWLFLRSQEYKKYQTNKTSTGNTDKRAFVETWQSFYRKKLKEVWKPAV

SEQ ID NO: 36427 - protein, 979 aa, synthetic construct
  REGION 1..979: note = engineered CasX variant
QEIKRINKIRRRLVKDSNTKKAGKTGPMKTLLVRVMTPDLRERLENLRKKPENIPQPISNTSRANLNKLLTDYTEMKKAILHVYWEEFQKDPVGLMSRVAQPASKKIDQNKLKPEMDEKGNLTTAGFACSQCGQPLFVYKLEQVSEKGKAYTNYFGRCNVAEHEKLILLAQLKPEKDSDEAVTYSLGKFGQRALDFYSIHVTKESTHPVKPLAQIAGNRYASSPVGKALSDACMGTIASFLSKYQDIIIEHQKVVKGNQKRLESLRELAGKENLEYPSVTLPPQPHTKEGVDAYNEVIARVRWWVNLNLWQKLKLSRDDAKPLLRLKGFPSFPLVERQANEVDWWDMVCNVKKLINEKKEDGKVFWQNLAGYKRQEALRPYLSSEEDRKKGKKFARYQLGDLLLHLEKKHGEDWGKVYDEAWERIDKKVEGLSKHIKLEEERRSEDAQSKAALTDWLRAKASFVIEGLKEADKDEFCRCELKLQKWYGDLRGKPFAIEAENSILDISGFSKQYNCAFIWQKDGVKKLNLYLIINYFKGGKLRFKKIKPEAFEANRFYTVINKKSGEIVPMEVNFNFDDPNLIILPLAFGKRQGREFIWNDLLSLETGSLKLANGRVIEKTLYNRRTRQDEPALFVALTFERREVLDSSNIKPMNLIGVDRGENIPAVIALTDPEGCPLSRFKDSLGNPTHILRIGESYKEKQRTIQAKKEVEQRRAGGYSRKYASKAKNLADDMVRNTARDLLYYAVTQDAMLIFENLSRGFGRQGKRTFMAERQYTRMEDWLTAKLAYEGLPSKTYLSKTLAQYTSKTCSNCGFTITSADYDRVLEKLKKTATGWMTTINGKELKVEGQITYYNRYKRQNVVKDLSVELDRLSEESVNNDISSWTKGRSGEALSLLKKRFSHRPVQEKFVCLNCGFETHADEQAALNIARSWLFLRSQEYKKYQTNKTSTGNTDKRAFVETWQSFYRKKLKEVWKPAV

SEQ ID NO: 36428 - protein, 979 aa, synthetic construct
  REGION 1..979: note = engineered CasX variant
QEIKRINKIRRRLVKDSNTKKAGKTGPMKTLLVRVMTPDLRERLENLRKKPENIPQPISNTSRANLNKLLTDYTEMKKAILHVYWEEFQKDPVGLMSRVAQPASKKIDQNKLKPEMDEKGNLTTAGFACSQCGQPLFVYKLEQVSEKGKAYTNYFGRCNVAEHEKLILLAQLKPEKDSDEAVTYSLGKFGQRALDFYSIHVTKESTHPVKPLAQIAGNRYASTPVGKALSDACMGTIASFLSKYQDIIIEHQKVVKGNQKRLESLRELAGKENLEYPSVTLPPQPHTKEGVDAYNEVIARVRWWVNLNLWQKLKLSRDDAKPLLRLKGFPSFPLVERQANEVDWWDMVCNVKKLINEKKEDGKVFWQNLAGYKRQEALRPYLSSEEDRKKGKKFARYQLGDLLLHLEKKHGEDWGKVYDEAWERIDKKVEGLSKHIKLEEERRSEDAQSKAALTDWLRAKASFVIEGLKEADKDEFCRCELKLQKWYGDLRGKPFAIEAENSILDISGFSKQYNCAFIWQKDGVKKLNLYLIINYFKGGKLRFKKIKPEAFEANRFYTVINKKSGEIVPMEVNFNFDDPNLIILPLAFGKRQGREFIWNDLLSLETGSLKLANGRVIEKTLYNRRTRQDEPALFVALTFERREVLDSSNIKPMNLIGVDRGENIPAVIALTDPEGCPLSRFKDSLGNPTHILRIGESYKEKQRTIQAKKEVEQRRAGGYSRKYASKAKNLADDMVRNTARDLLYYAVTQDAMLIFENLSRGFGRQGKRTFMAERQYTRMEDWLTAKLAYEGLPSKTYLSKTLAQYTSKTCSNCGFTITSADYDRVLEKLKKTATGWMTTINGKELKVEGQITYYNRYKRQNVVKDLSVELDRLSEESVNNDISSWTKGRSGEALSLLKKRFSHRPVQEKFVCLNCGFETHADEQAALNIARSWLFLRSQEYKKYQTNKTSTGNTDKRAFVETWQSFYRKKLKEVWKPAV

SEQ ID NO: 36429 - protein, 979 aa, synthetic construct
  REGION 1..979: note = engineered CasX variant
QEIKRINKIRRRLVKDSNTKKAGKTGPMKTLLVRVMTPDLRERLENLRKKPENIPQPISNTSRANLNKLLTDYTEMKKAILHVYWEEFQKDPVGLMSRVAQPASKKIDQNKLKPEMDEKGNLTTAGFACSQCGQPLFVYKLEQVSEKGKAYTNYFGRCNVAEHEKLILLAQLKPEKDSDEAVTYSLGKFGQRALDFYSIHVTKESTHPVKPLAQIAGNRYASAPVGKALSDACMGTIASFLSKYQDIIIEHQKVVKGNQKRLESLRELAGKENLEYPSVTLPPQPHTKEGVDAYNEVIARVRWWVNLNLWQKLKLSRDDAKPLLRLKGFPSFPLVERQANEVDWWDMVCNVKKLINEKKEDGKVFWQNLAGYKRQEALRPYLSSEEDRKKGKKFARYQLGDLLLHLEKKHGEDWGKVYDEAWERIDKKVEGLSKHIKLEEERRSEDAQSKAALTDWLRAKASFVIEGLKEADKDEFCRCELKLQKWYGDLRGKPFAIEAENSILDISGFSKQYNCAFIWQKDGVKKLNLYLIINYFKGGKLRFKKIKPEAFEANRFYTVINKKSGEIVPMEVNFNFDDPNLIILPLAFGKRQGREFIWNDLLSLETGSLKLANGRVIEKTLYNRRTRQDEPALFVALTFERREVLDSSNIKPMNLIGVDRGENIPAVIALTDPEGCPLSRFKDSLGNPTHILRIGESYKEKQRTIQAKKEVEQRRAGGYSRKYASKAKNLADDMVRNTARDLLYYAVTQDAMLIFENLSRGFGRQGKRTFMAERQYTRMEDWLTAKLAYEGLPSKTYLSKTLAQYTSKTCSNCGFTITSADYDRVLEKLKKTATGWMTTINGKELKVEGQITYYNRYKRQNVVKDLSVELDRLSEESVNNDISSWTKGRSGEALSLLKKRFSHRPVQEKFVCLNCGFETHADEQAALNIARSWLFLRSQEYKKYQTNKTSTGNTDKRAFVETWQSFYRKKLKEVWKPAV

SEQ ID NO: 36430 - protein, 979 aa, synthetic construct
  REGION 1..979: note = engineered CasX variant
QEIKRINKIRRRLVKDSNTKKAGKTGPMKTLLVRVMTPDLRERLENLRKKPENIPQPISNTSRANLNKLLTDYTEMKKAILHVYWEEFQKDPVGLMSRVAQPASKKIDQNKLKPEMDEKGNLTTAGFACSQCGQPLFVYKLEQVSEKGKAYTNYFGRCNVAEHEKLILLAQLKPEKDSDEAVTYSLGKFGQRALDFYSIHVTKESTHPVKPLAQIAGNRYASVPVGKALSDACMGTIASFLSKYQDIIIEHQKVVKGNQKRLESLRELAGKENLEYPSVTLPPQPHTKEGVDAYNEVIARVRWWVNLNLWQKLKLSRDDAKPLLRLKGFPSFPLVERQANEVDWWDMVCNVKKLINEKKEDGKVFWQNLAGYKRQEALRPYLSSEEDRKKGKKFARYQLGDLLLHLEKKHGEDWGKVYDEAWERIDKKVEGLSKHIKLEEERRSEDAQSKAALTDWLRAKASFVIEGLKEADKDEFCRCELKLQKWYGDLRGKPFAIEAENSILDISGFSKQYNCAFIWQKDGVKKLNLYLIINYFKGGKLRFKKIKPEAFEANRFYTVINKKSGEIVPMEVNFNFDDPNLIILPLAFGKRQGREFIWNDLLSLETGSLKLANGRVIEKTLYNRRTRQDEPALFVALTFERREVLDSSNIKPMNLIGVDRGENIPAVIALTDPEGCPLSRFKDSLGNPTHILRIGESYKEKQRTIQAKKEVEQRRAGGYSRKYASKAKNLADDMVRNTARDLLYYAVTQDAMLIFENLSRGFGRQGKRTFMAERQYTRMEDWLTAKLAYEGLPSKTYLSKTLAQYTSKTCSNCGFTITSADYDRVLEKLKKTATGWMTTINGKELKVEGQITYYNRYKRQNVVKDLSVELDRLSEESVNNDISSWTKGRSGEALSLLKKRFSHRPVQEKFVCLNCGFETHADEQAALNIARSWLFLRSQEYKKYQTNKTSTGNTDKRAFVETWQSFYRKKLKEVWKPAV

SEQ ID NO: 36431 - protein, 979 aa, synthetic construct
  REGION 1..979: note = engineered CasX variant
QEIKRINKIRRRLVKDSNTKKAGKTGPMKTLLVRVMTPDLRERLENLRKKPENIPQPISNTSRANLNKLLTDYTEMKKAILHVYWEEFQKDPVGLMSRVAQPASKKIDQNKLKPEMDEKGNLTTAGFACSQCGQPLFVYKLEQVSEKGKAYTNYFGRCNVAEHEKLIKLAQLKPEKDSDEAVTYSLGKFGQRALDFYSIHVTKESTHPVKPLAQIAGNRYASGPVGKALSDACMGTIASFLSKYQDIIIEHQKVVKGNQKRLESLRELAGKENLEYPSVTLPPQPHTKEGVDAYNEVIARVRWWVNLNLWQKLKLSRDDAKPLLRLKGFPSFPLVERQANEVDWWDMVCNVKKLINEKKEDGKVFWQNLAGYKRQEALRPYLSSEEDRKKGKKFARYQLGDLLLHLEKKHGEDWGKVYDEAWERIDKKVEGLSKHIKLEEERRSEDAQSKAALTDWLRAKASFVIEGLKEADKDEFCRCELKLQKWYGDLRGKPFAIEAENSILDISGFSKQYNCAFIWQKDGVKKLNLYLIINYFKGGKLRFKKIKPEAFEANRFYTVINKKSGEIVPMEVNFNFDDPNLIILPLAFGKRQGREFIWNDLLSLETGSLKLANGRVIEKTLYNRRTRQDEPALFVALTFERREVLDSSNIKPMNLIGVDRGENIPAVIALTDPEGCPLSRFKDSLGNPTHILRIGESYKEKQRTIQAKKEVEQRRAGGYSRKYASKAKNLADDMVRNTARDLLYYAVTQDAMLIFENLSRGFGRQGKRTFMAERQYTRMEDWLTAKLAYEGLPSKTYLSKTLAQYTSKTCSNCGFTITSADYDRVLEKLKKTATGWMTTINGKELKVEGQITYYNRYKRQNVVKDLSVELDRLSEESVNNDISSWTKGRSGEALSLLKKRFSHRPVQEKFVCLNCGFETHADEQAALNIARSWLFLRSQEYKKYQTNKTSTGNTDKRAFVETWQSFYRKKLKEVWKPAV

SEQ ID NO: 36432 - protein, 978 aa, synthetic construct
  REGION 1..978: note = engineered CasX variant
QEIKRINKIRRRLVKDSNTKKAGKTGPMKTLLVRVMTPDLRERLENLRKKPENIPQPISNTSRANLNKLLTDYTEMKKAILHVYWEEFQKDPVGLMSRVAQPASKKIDQNKLKPEMDEKGNLTTAGFACSQCGQPLFVYKLEQVSEKGKAYTNYFGRCNVAEHEKLILLAQLKPEKDSDEAVTYSLGKFGQRALDFYSIHVTKESTHPVKPLAQIAGNRYASPVGKALSDACMGTIASFLSKYQDIIIEHQKVVKGNQKRLESLRELAGKENLEYPSVTLPPQPHTKEGVDAYNEVIARVRWWVNLNLWQKLKLSRDDAKPLLRLKGFPSFPLVERQANEVDWWDMVCNVKKLINEKKEDGKVFWQNLAGYKRQEALRPYLSSEEDRKKGKKFARYQLGDLLLHLEKKHGEDWGKVYDEAWERIDKKVEGLSKHIKLEEERRSEDAQSKAALTDWLRAKASFVIEGLKEADKDEFCRCELKLQKWYGDLRGKPFAIEAENSILDISGFSKQYNCAFIWQKDGVKKLNLYLIINYFKGGKLRFKKIKPEAFEANRFYTVINKKSGEIVPMEVNFNFDDPNLIILPLAFGKRQGREFIWNDLLSLETGSLKLANGRVIEKTLYNRRTRQDEPALFVALTFERREVLDSSNIKPMNLIGVDRGENIPAVIALTDPEGCPLSRFKDSLGNPTHILRIGESYKEKQRTIQAKKEVEQRRAGGYSRKYASKAKNLADDMVRNTARDLLYYAVTQDAMLIFENLSRGFGRQGKRTFMAERQYTRMEDWLTAKLAYEGLPSKTYLSKTLAQYTSKTCSNCGFTITSADYDRVLEKLKKTATGWMTTINGKELKVEGQITYYNRYKRQNVVKDLSVELDRLSEESVNNDISSWTKGRSGEALSLLKKRFSHRPVQEKFVCLNCGFETHADEQAALNIARSWLFLRSQEYKKYQTNKTSTGNTDKRAFVETWQSFYRKKLKEVWKPAV

SEQ ID NO: 36433 - protein, 979 aa, synthetic construct
  REGION 1..979: note = engineered CasX variant
QEIKRINKIRRRLVKDSNTKKAGKTGPMKTLLVRVMTPDLRERLENLRKKPENIPQPISNTSRANLNKLLTDYTEMKKAILHVYWEEFQKDPVGLMSRVAQPASKKIDQNKLKPEMDEKGNLTTAGFACSQCGQPLFVYKLEQVSEKGKAYTNYFGRCNVAEHEKLILLAQLKPEKDSDEAVTYSLGKFGQRALDFYSIHVTKESTHPVKPLAQIAGNRYASYPVGKALSDACMGTIASFLSKYQDIIIEHQKVVKGNQKRLESLRELAGKENLEYPSVTLPPQPHTKEGVDAYNEVIARVRWWVNLNLWQKLKLSRDDAKPLLRLKGFPSFPLVERQANEVDWWDMVCNVKKLINEKKEDGKVFWQNLAGYKRQEALRPYLSSEEDRKKGKKFARYQLGDLLLHLEKKHGEDWGKVYDEAWERIDKKVEGLSKHIKLEEERRSEDAQSKAALTDWLRAKASFVIEGLKEADKDEFCRCELKLQKWYGDLRGKPFAIEAENSILDISGFSKQYNCAFIWQKDGVKKLNLYLIINYFKGGKLRFKKIKPEAFEANRFYTVINKKSGEIVPMEVNFNFDDPNLIILPLAFGKRQGREFIWNDLLSLETGSLKLANGRVIEKTLYNRRTRQDEPALFVALTFERREVLDSSNIKPMNLIGVDRGENIPAVIALTDPEGCPLSRFKDSLGNPTHILRIGESYKEKQRTIQAKKEVEQRRAGGYSRKYASKAKNLADDMVRNTARDLLYYAVTQDAMLIFENLSRGFGRQGKRTFMAERQYTRMEDWLTAKLAYEGLPSKTYLSKTLAQYTSKTCSNCGFTITSADYDRVLEKLKKTATGWMTTINGKELKVEGQITYYNRYKRQNVVKDLSVELDRLSEESVNNDISSWTKGRSGEALSLLKKRFSHRPVQEKFVCLNCGFETHADEQAALNIARSWLFLRSQEYKKYQTNKTTGKNTDKRAFVETWQSFYRKKLKEVWKPAV

SEQ ID NO: 36434 - protein, 979 aa, synthetic construct
  REGION 1..979: note = engineered CasX variant
QEIKRINKIRRRLVKDSNTKKAGKTGPMKTLLVRVMTPDLRERLENLRKKPENIPQPISNTSRANLNKLLTDYTEMKKAILHVYWEEFQKDPVGLMSRVAQPASKKIDQNKLKPEMDEKGNLTTAGFACSQCGQPLFVYKLEQVSEKGKAYTNYFGRCNVAEHEKLILLAQLKPEKDSDEAVTYSLGKFGQRALDFYSIHVTKESTHPVKPLAQIAGNRYASHPVGKALSDACMGTIASFLSKYQDIIIEHQKVVKGNQKRLESLRELAGKENLEYPSVTLPPQPHTKEGVDAYNEVIARVRWWVNLNLWQKLKLSRDDAKPLLRLKGFPSFPLVERQANEVDWWDMVCNVKKLINEKKEDGKVFWQNLAGYKRQEALRPYLSSEEDRKKGKKFARYQLGDLLLHLEKKHGEDWGKVYDEAWERIDKKVEGLSKHIKLEEERRSEDAQSKAALTDWLRAKASFVIEGLKEADKDEFCRCELKLQKWYGDLRGKPFAIEAENSILDISGFSKQYNCAFIWQKDGVKKLNLYLIINYFKGGKLRFKKIKPEAFEANRFYTVINKKSGEIVPMEVNFNFDDPNLIILPLAFGKRQGREFIWNDLLSLETGSLKLANGRVIEKTLYNRRTRQDEPALFVALTFERREVLDSSNIKPMNLIGVDRGENIPAVIALTDPEGCPLSRFKDSLGNPTHILRIGESYKEKQRTIQAKKEVEQRRAGGYSRKYASKAKNLADDMVRNTARDLLYYAVTQDAMLIFENLSRGFGRQGKRTFMAERQYTRMEDWLTAKLAYEGLPSKTYLSKTLAQYTSKTCSNCGFTITSADYDRVLEKLKKTATGWMTTINGKELKVEGQITYYNRYKRQNVVKDLSVELDRLSEESVNNDISSWTKGRSGEALSLLKKRFSHRPVQEKFVCLNCGFETHADEQAALNIARSWLFLRSQEYKKYQTNKTTGKNTDKRAFVETWQSFYRKKLKEVWKPAV

SEQ ID NO: 36435 - protein, 979 aa, synthetic construct
  REGION 1..979: note = engineered CasX variant
QEIKRINKIRRRLVKDSNTKKAGKTGPMKTLLVRVMTPDLRERLENLRKKPENIPQPISNTSRANLNKLLTDYTEMKKAILHVYWEEFQKDPVGLMSRVAQPASKKIDQNKLKPEMDEKGNLTTAGFACSQCGQPLFVYKLEQVSEKGKAYTNYFGRCNVAEHEKLILLAQLKPEKDSDEAVTYSLGKFGQRALDFYSIHVTKESTHPVKPLAQIAGNRYASSPVGKALSDACMGTIASFLSKYQDIIIEHQKVVKGNQKRLESLRELAGKENLEYPSVTLPPQPHTKEGVDAYNEVIARVRWWVNLNLWQKLKLSRDDAKPLLRLKGFPSFPLVERQANEVDWWDMVCNVKKLINEKKEDGKVFWQNLAGYKRQEALRPYLSSEEDRKKGKKFARYQLGDLLLHLEKKHGEDWGKVYDEAWERIDKKVEGLSKHIKLEEERRSEDAQSKAALTDWLRAKASFVIEGLKEADKDEFCRCELKLQKWYGDLRGKPFAIEAENSILDISGFSKQYNCAFIWQKDGVKKLNLYLIINYFKGGKLRFKKIKPEAFEANRFYTVINKKSGEIVPMEVNFNFDDPNLIILPLAFGKRQGREFIWNDLLSLETGSLKLANGRVIEKTLYNRRTRQDEPALFVALTFERREVLDSSNIKPMNLIGVDRGENIPAVIALTDPEGCPLSRFKDSLGNPTHILRIGESYKEKQRTIQAKKEVEQRRAGGYSRKYASKAKNLADDMVRNTARDLLYYAVTQDAMLIFENLSRGFGRQGKRTFMAERQYTRMEDWLTAKLAYEGLPSKTYLSKTLAQYTSKTCSNCGFTITSADYDRVLEKLKKTATGWMTTINGKELKVEGQITYYNRYKRQNVVKDLSVELDRLSEESVNNDISSWTKGRSGEALSLLKKRFSHRPVQEKFVCLNCGFETHADEQAALNIARSWLFLRSQEYKKYQTNKTTGKNTDKRAFVETWQSFYRKKLKEVWKPAV

SEQ ID NO: 36436 - protein, 979 aa, synthetic construct
  REGION 1..979: note = engineered CasX variant
QEIKRINKIRRRLVKDSNTKKAGKTGPMKTLLVRVMTPDLRERLENLRKKPENIPQPISNTSRANLNKLLTDYTEMKKAILHVYWEEFQKDPVGLMSRVAQPASKKIDQNKLKPEMDEKGNLTTAGFACSQCGQPLFVYKLEQVSEKGKAYTNYFGRCNVAEHEKLILLAQLKPEKDSDEAVTYSLGKFGQRALDFYSIHVTKESTHPVKPLAQIAGNRYASTPVGKALSDACMGTIASFLSKYQDIIIEHQKVVKGNQKRLESLRELAGKENLEYPSVTLPPQPHTKEGVDAYNEVIARVRWWVNLNLWQKLKLSRDDAKPLLRLKGFPSFPLVERQANEVDWWDMVCNVKKLINEKKEDGKVFWQNLAGYKRQEALRPYLSSEEDRKKGKKFARYQLGDLLLHLEKKHGEDWGKVYDEAWERIDKKVEGLSKHIKLEEERRSEDAQSKAALTDWLRAKASFVIEGLKEADKDEFCRCELKLQKWYGDLRGKPFAIEAENSILDISGFSKQYNCAFIWQKDGVKKLNLYLIINYFKGGKLRFKKIKPEAFEANRFYTVINKKSGEIVPMEVNFNFDDPNLIILPLAFGKRQGREFIWNDLLSLETGSLKLANGRVIEKTLYNRRTRQDEPALFVALTFERREVLDSSNIKPMNLIGVDRGENIPAVIALTDPEGCPLSRFKDSLGNPTHILRIGESYKEKQRTIQAKKEVEQRRAGGYSRKYASKAKNLADDMVRNTARDLLYYAVTQDAMLIFENLSRGFGRQGKRTFMAERQYTRMEDWLTAKLAYEGLPSKTYLSKTLAQYTSKTCSNCGFTITSADYDRVLEKLKKTATGWMTTINGKELKVEGQITYYNRYKRQNVVKDLSVELDRLSEESVNNDISSWTKGRSGEALSLLKKRFSHRPVQEKFVCLNCGFETHADEQAALNIARSWLFLRSQEYKKYQTNKTTGKNTDKRAFVETWQSFYRKKLKEVWKPAV

SEQ ID NO: 36437 - protein, 979 aa, synthetic construct
  REGION 1..979: note = engineered CasX variant
QEIKRINKIRRRLVKDSNTKKAGKTGPMKTLLVRVMTPDLRERLENLRKKPENIPQPISNTSRANLNKLLTDYTEMKKAILHVYWEEFQKDPVGLMSRVAQPASKKIDQNKLKPEMDEKGNLTTAGFACSQCGQPLFVYKLEQVSEKGKAYTNYFGRCNVAEHEKLILLAQLKPEKDSDEAVTYSLGKFGQRALDFYSIHVTKESTHPVKPLAQIAGNRYASAPVGKALSDACMGTIASFLSKYQDIIIEHQKVVKGNQKRLESLRELAGKENLEYPSVTLPPQPHTKEGVDAYNEVIARVRWWVNLNLWQKLKLSRDDAKPLLRLKGFPSFPLVERQANEVDWWDMVCNVKKLINEKKEDGKVFWQNLAGYKRQEALRPYLSSEEDRKKGKKFARYQLGDLLLHLEKKHGEDWGKVYDEAWERIDKKVEGLSKHIKLEEERRSEDAQSKAALTDWLRAKASFVIEGLKEADKDEFCRCELKLQKWYGDLRGKPFAIEAENSILDISGFSKQYNCAFIWQKDGVKKLNLYLIINYFKGGKLRFKKIKPEAFEANRFYTVINKKSGEIVPMEVNFNFDDPNLIILPLAFGKRQGREFIWNDLLSLETGSLKLANGRVIEKTLYNRRTRQDEPALFVALTFERREVLDSSNIKPMNLIGVDRGENIPAVIALTDPEGCPLSRFKDSLGNPTHILRIGESYKEKQRTIQAKKEVEQRRAGGYSRKYASKAKNLADDMVRNTARDLLYYAVTQDAMLIFENLSRGFGRQGKRTFMAERQYTRMEDWLTAKLAYEGLPSKTYLSKTLAQYTSKTCSNCGFTITSADYDRVLEKLKKTATGWMTTINGKELKVEGQITYYNRYKRQNVVKDLSVELDRLSEESVNNDISSWTKGRSGEALSLLKKRFSHRPVQEKFVCLNCGFETHADEQAALNIARSWLFLRSQEYKKYQTNKTTGKNTDKRAFVETWQSFYRKKLKEVWKPAV

SEQ ID NO: 36438 - protein, 979 aa, synthetic construct
  REGION 1..979: note = engineered CasX variant
QEIKRINKIRRRLVKDSNTKKAGKTGPMKTLLVRVMTPDLRERLENLRKKPENIPQPISNTSRANLNKLLTDYTEMKKAILHVYWEEFQKDPVGLMSRVAQPASKKIDQNKLKPEMDEKGNLTTAGFACSQCGQPLFVYKLEQVSEKGKAYTNYFGRCNVAEHEKLILLAQLKPEKDSDEAVTYSLGKFGQRALDFYSIHVTKESTHPVKPLAQIAGNRYASVPVGKALSDACMGTIASFLSKYQDIIIEHQKVVKGNQKRLESLRELAGKENLEYPSVTLPPQPHTKEGVDAYNEVIARVRWWVNLNLWQKLKLSRDDAKPLLRLKGFPSFPLVERQANEVDWWDMVCNVKKLINEKKEDGKVFWQNLAGYKRQEALRPYLSSEEDRKKGKKFARYQLGDLLLHLEKKHGEDWGKVYDEAWERIDKKVEGLSKHIKLEEERRSEDAQSKAALTDWLRAKASFVIEGLKEADKDEFCRCELKLQKWYGDLRGKPFAIEAENSILDISGFSKQYNCAFIWQKDGVKKLNLYLIINYFKGGKLRFKKIKPEAFEANRFYTVINKKSGEIVPMEVNFNFDDPNLIILPLAFGKRQGREFIWNDLLSLETGSLKLANGRVIEKTLYNRRTRQDEPALFVALTFERREVLDSSNIKPMNLIGVDRGENIPAVIALTDPEGCPLSRFKDSLGNPTHILRIGESYKEKQRTIQAKKEVEQRRAGGYSRKYASKAKNLADDMVRNTARDLLYYAVTQDAMLIFENLSRGFGRQGKRTFMAERQYTRMEDWLTAKLAYEGLPSKTYLSKTLAQYTSKTCSNCGFTITSADYDRVLEKLKKTATGWMTTINGKELKVEGQITYYNRYKRQNVVKDLSVELDRLSEESVNNDISSWTKGRSGEALSLLKKRFSHRPVQEKFVCLNCGFETHADEQAALNIARSWLFLRSQEYKKYQTNKTTGKNTDKRAFVETWQSFYRKKLKEVWKPAV

SEQ ID NO: 36439 - protein, 979 aa, synthetic construct
  REGION 1..979: note = engineered CasX variant
QEIKRINKIRRRLVKDSNTKKAGKTGPMKTLLVRVMTPDLRERLENLRKKPENIPQPISNTSRANLNKLLTDYTEMKKAILHVYWEEFQKDPVGLMSRVAQPASKKIDQNKLKPEMDEKGNLTTAGFACSQCGQPLFVYKLEQVSEKGKAYTNYFGRCNVAEHEKLIKLAQLKPEKDSDEAVTYSLGKFGQRALDFYSIHVTKESTHPVKPLAQIAGNRYASGPVGKALSDACMGTIASFLSKYQDIIIEHQKVVKGNQKRLESLRELAGKENLEYPSVTLPPQPHTKEGVDAYNEVIARVRWWVNLNLWQKLKLSRDDAKPLLRLKGFPSFPLVERQANEVDWWDMVCNVKKLINEKKEDGKVFWQNLAGYKRQEALRPYLSSEEDRKKGKKFARYQLGDLLLHLEKKHGEDWGKVYDEAWERIDKKVEGLSKHIKLEEERRSEDAQSKAALTDWLRAKASFVIEGLKEADKDEFCRCELKLQKWYGDLRGKPFAIEAENSILDISGFSKQYNCAFIWQKDGVKKLNLYLIINYFKGGKLRFKKIKPEAFEANRFYTVINKKSGEIVPMEVNFNFDDPNLIILPLAFGKRQGREFIWNDLLSLETGSLKLANGRVIEKTLYNRRTRQDEPALFVALTFERREVLDSSNIKPMNLIGVDRGENIPAVIALTDPEGCPLSRFKDSLGNPTHILRIGESYKEKQRTIQAKKEVEQRRAGGYSRKYASKAKNLADDMVRNTARDLLYYAVTQDAMLIFENLSRGFGRQGKRTFMAERQYTRMEDWLTAKLAYEGLPSKTYLSKTLAQYTSKTCSNCGFTITSADYDRVLEKLKKTATGWMTTINGKELKVEGQITYYNRYKRQNVVKDLSVELDRLSEESVNNDISSWTKGRSGEALSLLKKRFSHRPVQEKFVCLNCGFETHADEQAALNIARSWLFLRSQEYKKYQTNKTTGKNTDKRAFVETWQSFYRKKLKEVWKPAV

SEQ ID NO: 36440 - protein, 978 aa, synthetic construct
  REGION 1..978: note = engineered CasX variant
QEIKRINKIRRRLVKDSNTKKAGKTGPMKTLLVRVMTPDLRERLENLRKKPENIPQPISNTSRANLNKLLTDYTEMKKAILHVYWEEFQKDPVGLMSRVAQPASKKIDQNKLKPEMDEKGNLTTAGFACSQCGQPLFVYKLEQVSEKGKAYTNYFGRCNVAEHEKLILLAQLKPEKDSDEAVTYSLGKFGQRALDFYSIHVTKESTHPVKPLAQIAGNRYASPVGKALSDACMGTIASFLSKYQDIIIEHQKVVKGNQKRLESLRELAGKENLEYPSVTLPPQPHTKEGVDAYNEVIARVRWWVNLNLWQKLKLSRDDAKPLLRLKGFPSFPLVERQANEVDWWDMVCNVKKLINEKKEDGKVFWQNLAGYKRQEALRPYLSSEEDRKKGKKFARYQLGDLLLHLEKKHGEDWGKVYDEAWERIDKKVEGLSKHIKLEEERRSEDAQSKAALTDWLRAKASFVIEGLKEADKDEFCRCELKLQKWYGDLRGKPFAIEAENSILDISGFSKQYNCAFIWQKDGVKKLNLYLIINYFKGGKLRFKKIKPEAFEANRFYTVINKKSGEIVPMEVNFNFDDPNLIILPLAFGKRQGREFIWNDLLSLETGSLKLANGRVIEKTLYNRRTRQDEPALFVALTFERREVLDSSNIKPMNLIGVDRGENIPAVIALTDPEGCPLSRFKDSLGNPTHILRIGESYKEKQRTIQAKKEVEQRRAGGYSRKYASKAKNLADDMVRNTARDLLYYAVTQDAMLIFENLSRGFGRQGKRTFMAERQYTRMEDWLTAKLAYEGLPSKTYLSKTLAQYTSKTCSNCGFTITSADYDRVLEKLKKTATGWMTTINGKELKVEGQITYYNRYKRQNVVKDLSVELDRLSEESVNNDISSWTKGRSGEALSLLKKRFSHRPVQEKFVCLNCGFETHADEQAALNIARSWLFLRSQEYKKYQTNKTTGKNTDKRAFVETWQSFYRKKLKEVWKPAV

SEQ ID NO: 36441 - protein, 978 aa, synthetic construct
  REGION 1..978: note = engineered CasX variant
QEIKRINKIRRRLVKDSNTKKAGKTGPMKTLLVRVMTPDLRERLENLRKKPENIPQPISNTSRANLNKLLTDYTEMKKAILHVYWEEFQKDPVGLMSRVAQPASKKIDQNKLKPEMDEKGNLTTAGFACSQCGQPLFVYKLEQVSEKGKAYTNYFGRCNVAEHEKLILLAQLKPEKDSDEAVTYSLGKFGQRALDFYSIHVTKESTHPVKPLAQIAGNRYASYPVGKALSDACMGTIASFLSKYQDIIIEHQKVVKGNQKRLESLRELAGKENLEYPSVTLPPQPHTKEGVDAYNEVIARVRWWVNLNLWQKLKLSRDDAKPLLRLKKFPSFPLVERQANEVDWWDMVCNVKKLINEKKEDGKVFWQNLAGYKRQEALRPYLSSEEDRKKGKKFARYQLGDLLLHLEKKHGEDWGKVYDEAWERIDKKVEGLSKHIKLEEERRSEDAQSKAALTDWLRAKASFVIEGLKEADKDEFCRCELKLQKWYGDLRGKPFAIEAENSILDISGFSKQYNCAFIWQKDGVKKLNLYLIINYFKGGKLRFKKIKPEAFEANRFYTVINKKSGEIVPMEVNFNFDDPNLIILPLAFGKRQGREFIWNDLLSLETGSLKLANGRVIEKTLYNRRTRQDEPALFVALTFERREVLDSSNIKPMNLIGVDRGENIPAVIALTDPEGCPLSRFKDSLGNPTHILRIGESYKEKQRTIQAKKEVEQRRAGGYSRKYASKAKNLADDMVRNTARDLLYYAVTQDAMLIFENLSRGFGRQGKRTFMAERQYTRMEDWLTAKLAYEGLPSKTYLSKTLAQYTSKTCSNCGFTITSADYDRVLEKLKKTATGWMTTINGKELKVEGQITYYNRYKRQNVVKDLSVELDRLSEESVNNDISSWTKGRSGEALSLLKKRFSHRPVQEKFVCLNCGFETHADEQAALNIARSWLFLRSQEYKKYQTNKTTGNTDKRAFVETWQSFYRKKLKEVWKPAV

SEQ ID NO: 36442 - protein, 978 aa, synthetic construct
  REGION 1..978: note = engineered CasX variant
QEIKRINKIRRRLVKDSNTKKAGKTGPMKTLLVRVMTPDLRERLENLRKKPENIPQPISNTSRANLNKLLTDYTEMKKAILHVYWEEFQKDPVGLMSRVAQPASKKIDQNKLKPEMDEKGNLTTAGFACSQCGQPLFVYKLEQVSEKGKAYTNYFGRCNVAEHEKLILLAQLKPEKDSDEAVTYSLGKFGQRALDFYSIHVTKESTHPVKPLAQIAGNRYASHPVGKALSDACMGTIASFLSKYQDIIIEHQKVVKGNQKRLESLRELAGKENLEYPSVTLPPQPHTKEGVDAYNEVIARVRWWVNLNLWQKLKLSRDDAKPLLRLKKFPSFPLVERQANEVDWWDMVCNVKKLINEKKEDGKVFWQNLAGYKRQEALRPYLSSEEDRKKGKKFARYQLGDLLLHLEKKHGEDWGKVYDEAWERIDKKVEGLSKHIKLEEERRSEDAQSKAALTDWLRAKASFVIEGLKEADKDEFCRCELKLQKWYGDLRGKPFAIEAENSILDISGFSKQYNCAFIWQKDGVKKLNLYLIINYFKGGKLRFKKIKPEAFEANRFYTVINKKSGEIVPMEVNFNFDDPNLIILPLAFGKRQGREFIWNDLLSLETGSLKLANGRVIEKTLYNRRTRQDEPALFVALTFERREVLDSSNIKPMNLIGVDRGENIPAVIALTDPEGCPLSRFKDSLGNPTHILRIGESYKEKQRTIQAKKEVEQRRAGGYSRKYASKAKNLADDMVRNTARDLLYYAVTQDAMLIFENLSRGFGRQGKRTFMAERQYTRMEDWLTAKLAYEGLPSKTYLSKTLAQYTSKTCSNCGFTITSADYDRVLEKLKKTATGWMTTINGKELKVEGQITYYNRYKRQNVVKDLSVELDRLSEESVNNDISSWTKGRSGEALSLLKKRFSHRPVQEKFVCLNCGFETHADEQAALNIARSWLFLRSQEYKKYQTNKTTGNTDKRAFVETWQSFYRKKLKEVWKPAV

SEQ ID NO: 36443 - protein, 978 aa, synthetic construct
  REGION 1..978: note = engineered CasX variant
QEIKRINKIRRRLVKDSNTKKAGKTGPMKTLLVRVMTPDLRERLENLRKKPENIPQPISNTSRANLNKLLTDYTEMKKAILHVYWEEFQKDPVGLMSRVAQPASKKIDQNKLKPEMDEKGNLTTAGFACSQCGQPLFVYKLEQVSEKGKAYTNYFGRCNVAEHEKLILLAQLKPEKDSDEAVTYSLGKFGQRALDFYSIHVTKESTHPVKPLAQIAGNRYASSPVGKALSDACMGTIASFLSKYQDIIIEHQKVVKGNQKRLESLRELAGKENLEYPSVTLPPQPHTKEGVDAYNEVIARVRWWVNLNLWQKLKLSRDDAKPLLRLKKFPSFPLVERQANEVDWWDMVCNVKKLINEKKEDGKVFWQNLAGYKRQEALRPYLSSEEDRKKGKKFARYQLGDLLLHLEKKHGEDWGKVYDEAWERIDKKVEGLSKHIKLEEERRSEDAQSKAALTDWLRAKASFVIEGLKEADKDEFCRCELKLQKWYGDLRGKPFAIEAENSILDISGFSKQYNCAFIWQKDGVKKLNLYLIINYFKGGKLRFKKIKPEAFEANRFYTVINKKSGEIVPMEVNFNFDDPNLIILPLAFGKRQGREFIWNDLLSLETGSLKLANGRVIEKTLYNRRTRQDEPALFVALTFERREVLDSSNIKPMNLIGVDRGENIPAVIALTDPEGCPLSRFKDSLGNPTHILRIGESYKEKQRTIQAKKEVEQRRAGGYSRKYASKAKNLADDMVRNTARDLLYYAVTQDAMLIFENLSRGFGRQGKRTFMAERQYTRMEDWLTAKLAYEGLPSKTYLSKTLAQYTSKTCSNCGFTITSADYDRVLEKLKKTATGWMTTINGKELKVEGQITYYNRYKRQNVVKDLSVELDRLSEESVNNDISSWTKGRSGEALSLLKKRFSHRPVQEKFVCLNCGFETHADEQAALNIARSWLFLRSQEYKKYQTNKTTGNTDKRAFVETWQSFYRKKLKEVWKPAV

SEQ ID NO: 36444 - protein, 978 aa, synthetic construct
  REGION 1..978: note = engineered CasX variant
QEIKRINKIRRRLVKDSNTKKAGKTGPMKTLLVRVMTPDLRERLENLRKKPENIPQPISNTSRANLNKLLTDYTEMKKAILHVYWEEFQKDPVGLMSRVAQPASKKIDQNKLKPEMDEKGNLTTAGFACSQCGQPLFVYKLEQVSEKGKAYTNYFGRCNVAEHEKLILLAQLKPEKDSDEAVTYSLGKFGQRALDFYSIHVTKESTHPVKPLAQIAGNRYASTPVGKALSDACMGTIASFLSKYQDIIIEHQKVVKGNQKRLESLRELAGKENLEYPSVTLPPQPHTKEGVDAYNEVIARVRWWVNLNLWQKLKLSRDDAKPLLRLKKFPSFPLVERQANEVDWWDMVCNVKKLINEKKEDGKVFWQNLAGYKRQEALRPYLSSEEDRKKGKKFARYQLGDLLLHLEKKHGEDWGKVYDEAWERIDKKVEGLSKHIKLEEERRSEDAQSKAALTDWLRAKASFVIEGLKEADKDEFCRCELKLQKWYGDLRGKPFAIEAENSILDISGFSKQYNCAFIWQKDGVKKLNLYLIINYFKGGKLRFKKIKPEAFEANRFYTVINKKSGEIVPMEVNFNFDDPNLIILPLAFGKRQGREFIWNDLLSLETGSLKLANGRVIEKTLYNRRTRQDEPALFVALTFERREVLDSSNIKPMNLIGVDRGENIPAVIALTDPEGCPLSRFKDSLGNPTHILRIGESYKEKQRTIQAKKEVEQRRAGGYSRKYASKAKNLADDMVRNTARDLLYYAVTQDAMLIFENLSRGFGRQGKRTFMAERQYTRMEDWLTAKLAYEGLPSKTYLSKTLAQYTSKTCSNCGFTITSADYDRVLEKLKKTATGWMTTINGKELKVEGQITYYNRYKRQNVVKDLSVELDRLSEESVNNDISSWTKGRSGEALSLLKKRFSHRPVQEKFVCLNCGFETHADEQAALNIARSWLFLRSQEYKKYQTNKTTGNTDKRAFVETWQSFYRKKLKEVWKPAV

SEQ ID NO: 36445 - protein, 978 aa, synthetic construct
  REGION 1..978: note = engineered CasX variant
QEIKRINKIRRRLVKDSNTKKAGKTGPMKTLLVRVMTPDLRERLENLRKKPENIPQPISNTSRANLNKLLTDYTEMKKAILHVYWEEFQKDPVGLMSRVAQPASKKIDQNKLKPEMDEKGNLTTAGFACSQCGQPLFVYKLEQVSEKGKAYTNYFGRCNVAEHEKLILLAQLKPEKDSDEAVTYSLGKFGQRALDFYSIHVTKESTHPVKPLAQIAGNRYASAPVGKALSDACMGTIASFLSKYQDIIIEHQKVVKGNQKRLESLRELAGKENLEYPSVTLPPQPHTKEGVDAYNEVIARVRWWVNLNLWQKLKLSRDDAKPLLRLKKFPSFPLVERQANEVDWWDMVCNVKKLINEKKEDGKVFWQNLAGYKRQEALRPYLSSEEDRKKGKKFARYQLGDLLLHLEKKHGEDWGKVYDEAWERIDKKVEGLSKHIKLEEERRSEDAQSKAALTDWLRAKASFVIEGLKEADKDEFCRCELKLQKWYGDLRGKPFAIEAENSILDISGFSKQYNCAFIWQKDGVKKLNLYLIINYFKGGKLRFKKIKPEAFEANRFYTVINKKSGEIVPMEVNFNFDDPNLIILPLAFGKRQGREFIWNDLLSLETGSLKLANGRVIEKTLYNRRTRQDEPALFVALTFERREVLDSSNIKPMNLIGVDRGENIPAVIALTDPEGCPLSRFKDSLGNPTHILRIGESYKEKQRTIQAKKEVEQRRAGGYSRKYASKAKNLADDMVRNTARDLLYYAVTQDAMLIFENLSRGFGRQGKRTFMAERQYTRMEDWLTAKLAYEGLPSKTYLSKTLAQYTSKTCSNCGFTITSADYDRVLEKLKKTATGWMTTINGKELKVEGQITYYNRYKRQNVVKDLSVELDRLSEESVNNDISSWTKGRSGEALSLLKKRFSHRPVQEKFVCLNCGFETHADEQAALNIARSWLFLRSQEYKKYQTNKTTGNTDKRAFVETWQSFYRKKLKEVWKPAV

SEQ ID NO: 36446 - protein, 978 aa, synthetic construct
  REGION 1..978: note = engineered CasX variant
QEIKRINKIRRRLVKDSNTKKAGKTGPMKTLLVRVMTPDLRERLENLRKKPENIPQPISNTSRANLNKLLTDYTEMKKAILHVYWEEFQKDPVGLMSRVAQPASKKIDQNKLKPEMDEKGNLTTAGFACSQCGQPLFVYKLEQVSEKGKAYTNYFGRCNVAEHEKLILLAQLKPEKDSDEAVTYSLGKFGQRALDFYSIHVTKESTHPVKPLAQIAGNRYASVPVGKALSDACMGTIASFLSKYQDIIIEHQKVVKGNQKRLESLRELAGKENLEYPSVTLPPQPHTKEGVDAYNEVIARVRWWVNLNLWQKLKLSRDDAKPLLRLKKFPSFPLVERQANEVDWWDMVCNVKKLINEKKEDGKVFWQNLAGYKRQEALRPYLSSEEDRKKGKKFARYQLGDLLLHLEKKHGEDWGKVYDEAWERIDKKVEGLSKHIKLEEERRSEDAQSKAALTDWLRAKASFVIEGLKEADKDEFCRCELKLQKWYGDLRGKPFAIEAENSILDISGFSKQYNCAFIWQKDGVKKLNLYLIINYFKGGKLRFKKIKPEAFEANRFYTVINKKSGEIVPMEVNFNFDDPNLIILPLAFGKRQGREFIWNDLLSLETGSLKLANGRVIEKTLYNRRTRQDEPALFVALTFERREVLDSSNIKPMNLIGVDRGENIPAVIALTDPEGCPLSRFKDSLGNPTHILRIGESYKEKQRTIQAKKEVEQRRAGGYSRKYASKAKNLADDMVRNTARDLLYYAVTQDAMLIFENLSRGFGRQGKRTFMAERQYTRMEDWLTAKLAYEGLPSKTYLSKTLAQYTSKTCSNCGFTITSADYDRVLEKLKKTATGWMTTINGKELKVEGQITYYNRYKRQNVVKDLSVELDRLSEESVNNDISSWTKGRSGEALSLLKKRFSHRPVQEKFVCLNCGFETHADEQAALNIARSWLFLRSQEYKKYQTNKTTGNTDKRAFVETWQSFYRKKLKEVWKPAV

SEQ ID NO: 36447 - protein, 978 aa, synthetic construct
  REGION 1..978: note = engineered CasX variant
QEIKRINKIRRRLVKDSNTKKAGKTGPMKTLLVRVMTPDLRERLENLRKKPENIPQPISNTSRANLNKLLTDYTEMKKAILHVYWEEFQKDPVGLMSRVAQPASKKIDQNKLKPEMDEKGNLTTAGFACSQCGQPLFVYKLEQVSEKGKAYTNYFGRCNVAEHEKLIKLAQLKPEKDSDEAVTYSLGKFGQRALDFYSIHVTKESTHPVKPLAQIAGNRYASGPVGKALSDACMGTIASFLSKYQDIIIEHQKVVKGNQKRLESLRELAGKENLEYPSVTLPPQPHTKEGVDAYNEVIARVRWWVNLNLWQKLKLSRDDAKPLLRLKKFPSFPLVERQANEVDWWDMVCNVKKLINEKKEDGKVFWQNLAGYKRQEALRPYLSSEEDRKKGKKFARYQLGDLLLHLEKKHGEDWGKVYDEAWERIDKKVEGLSKHIKLEEERRSEDAQSKAALTDWLRAKASFVIEGLKEADKDEFCRCELKLQKWYGDLRGKPFAIEAENSILDISGFSKQYNCAFIWQKDGVKKLNLYLIINYFKGGKLRFKKIKPEAFEANRFYTVINKKSGEIVPMEVNFNFDDPNLIILPLAFGKRQGREFIWNDLLSLETGSLKLANGRVIEKTLYNRRTRQDEPALFVALTFERREVLDSSNIKPMNLIGVDRGENIPAVIALTDPEGCPLSRFKDSLGNPTHILRIGESYKEKQRTIQAKKEVEQRRAGGYSRKYASKAKNLADDMVRNTARDLLYYAVTQDAMLIFENLSRGFGRQGKRTFMAERQYTRMEDWLTAKLAYEGLPSKTYLSKTLAQYTSKTCSNCGFTITSADYDRVLEKLKKTATGWMTTINGKELKVEGQITYYNRYKRQNVVKDLSVELDRLSEESVNNDISSWTKGRSGEALSLLKKRFSHRPVQEKFVCLNCGFETHADEQAALNIARSWLFLRSQEYKKYQTNKTTGNTDKRAFVETWQSFYRKKLKEVWKPAV

SEQ ID NO: 36448 - protein, 977 aa, synthetic construct
  REGION 1..977: note = engineered CasX variant
QEIKRINKIRRRLVKDSNTKKAGKTGPMKTLLVRVMTPDLRERLENLRKKPENIPQPISNTSRANLNKLLTDYTEMKKAILHVYWEEFQKDPVGLMSRVAQPASKKIDQNKLKPEMDEKGNLTTAGFACSQCGQPLFVYKLEQVSEKGKAYTNYFGRCNVAEHEKLILLAQLKPEKDSDEAVTYSLGKFGQRALDFYSIHVTKESTHPVKPLAQIAGNRYASPVGKALSDACMGTIASFLSKYQDIIIEHQKVVKGNQKRLESLRELAGKENLEYPSVTLPPQPHTKEGVDAYNEVIARVRWWVNLNLWQKLKLSRDDAKPLLRLKKFPSFPLVERQANEVDWWDMVCNVKKLINEKKEDGKVFWQNLAGYKRQEALRPYLSSEEDRKKGKKFARYQLGDLLLHLEKKHGEDWGKVYDEAWERIDKKVEGLSKHIKLEEERRSEDAQSKAALTDWLRAKASFVIEGLKEADKDEFCRCELKLQKWYGDLRGKPFAIEAENSILDISGFSKQYNCAFIWQKDGVKKLNLYLIINYFKGGKLRFKKIKPEAFEANRFYTVINKKSGEIVPMEVNFNFDDPNLIILPLAFGKRQGREFIWNDLLSLETGSLKLANGRVIEKTLYNRRTRQDEPALFVALTFERREVLDSSNIKPMNLIGVDRGENIPAVIALTDPEGCPLSRFKDSLGNPTHILRIGESYKEKQRTIQAKKEVEQRRAGGYSRKYASKAKNLADDMVRNTARDLLYYAVTQDAMLIFENLSRGFGRQGKRTFMAERQYTRMEDWLTAKLAYEGLPSKTYLSKTLAQYTSKTCSNCGFTITSADYDRVLEKLKKTATGWMTTINGKELKVEGQITYYNRYKRQNVVKDLSVELDRLSEESVNNDISSWTKGRSGEALSLLKKRFSHRPVQEKFVCLNCGFETHADEQAALNIARSWLFLRSQEYKKYQTNKTTGNTDKRAFVETWQSFYRKKLKEVWKPAV

SEQ ID NO: 36449 - protein, 978 aa, synthetic construct
  REGION 1..978: note = engineered CasX variant
QEIKRINKIRRRLVKDSNTKKAGKTGPMKTLLVRVMTPDLRERLENLRKKPENIPQPISNTSRANLNKLLTDYTEMKKAILHVYWEEFQKDPVGLMSRVAQPASKKIDQNKLKPEMDEKGNLTTAGFACSQCGQPLFVYKLEQVSEKGKAYTNYFGRCNVAEHEKLILLAQLKPEKDSDEAVTYSLGKFGQRALDFYSIHVTKESTHPVKPLAQIAGNRYASYPVGKALSDACMGTIASFLSKYQDIIIEHQKVVKGNQKRLESLRELAGKENLEYPSVTLPPQPHTKEGVDAYNEVIARVRWWVNLNLWQKLKLSRDDAKPLLRLKGFPSFPLVERQANEVDWWDMVCNVKKLINEKKEDGKVFWQNLAGYKRQEALRPYLSSEEDRKKGKKFARYQLGDLLLHLEKKHGEDWGKVYDEAWERIDKKVEGLSKHIKLEEERRSEDAQSKAALTDWLRAKASFVIEGLKEADKDEFCRCELKLQKWYGDLRGKPFAIEAENSILDISGFSKQYNCAFIWQKDGVKKLNLYLIINYFKGGKLRFKKIKPEAFEANRFYTVINKKSGEIVPMEVNFNFDDPNLIILPLAFGKRQGREFIWNDLLSLETGSLKLANGRVIEKTLYNRRTRQDEPALFVALTFERREVLDSSNIKPMNLIGVDRGENIPAVIALTDPEGCPLSRFKDSLGNPTHILRIGERYKEKQRTIQAKKEVEQRRAGGYSRKYASKAKNLADDMVRNTARDLLYYAVTQDAMLIFENLSRGFGRQGKRTFMAERQYTRMEDWLTAKLAYEGLPSKTYLSKTLAQYTSKTCSNCGFTITSADYDRVLEKLKKTATGWMTTINGKELKVEGQITYYNRYKRQNVVKDLSVELDRLSEESVNNDISSWTKGRSGEALSLLKKRFSHRPVQEKFVCLNCGFETHADEQAALNIARSWLFLRSQEYKKYQTNKTTGNTDKRAFVETWQSFYRKKLKEVWKPAV

SEQ ID NO: 36450 - protein, 978 aa, synthetic construct
  REGION 1..978: note = engineered CasX variant
QEIKRINKIRRRLVKDSNTKKAGKTGPMKTLLVRVMTPDLRERLENLRKKPENIPQPISNTSRANLNKLLTDYTEMKKAILHVYWEEFQKDPVGLMSRVAQPASKKIDQNKLKPEMDEKGNLTTAGFACSQCGQPLFVYKLEQVSEKGKAYTNYFGRCNVAEHEKLILLAQLKPEKDSDEAVTYSLGKFGQRALDFYSIHVTKESTHPVKPLAQIAGNRYASHPVGKALSDACMGTIASFLSKYQDIIIEHQKVVKGNQKRLESLRELAGKENLEYPSVTLPPQPHTKEGVDAYNEVIARVRWWVNLNLWQKLKLSRDDAKPLLRLKGFPSFPLVERQANEVDWWDMVCNVKKLINEKKEDGKVFWQNLAGYKRQEALRPYLSSEEDRKKGKKFARYQLGDLLLHLEKKHGEDWGKVYDEAWERIDKKVEGLSKHIKLEEERRSEDAQSKAALTDWLRAKASFVIEGLKEADKDEFCRCELKLQKWYGDLRGKPFAIEAENSILDISGFSKQYNCAFIWQKDGVKKLNLYLIINYFKGGKLRFKKIKPEAFEANRFYTVINKKSGEIVPMEVNFNFDDPNLIILPLAFGKRQGREFIWNDLLSLETGSLKLANGRVIEKTLYNRRTRQDEPALFVALTFERREVLDSSNIKPMNLIGVDRGENIPAVIALTDPEGCPLSRFKDSLGNPTHILRIGERYKEKQRTIQAKKEVEQRRAGGYSRKYASKAKNLADDMVRNTARDLLYYAVTQDAMLIFENLSRGFGRQGKRTFMAERQYTRMEDWLTAKLAYEGLPSKTYLSKTLAQYTSKTCSNCGFTITSADYDRVLEKLKKTATGWMTTINGKELKVEGQITYYNRYKRQNVVKDLSVELDRLSEESVNNDISSWTKGRSGEALSLLKKRFSHRPVQEKFVCLNCGFETHADEQAALNIARSWLFLRSQEYKKYQTNKTTGNTDKRAFVETWQSFYRKKLKEVWKPAV

SEQ ID NO: 36451 - protein, 978 aa, synthetic construct
  REGION 1..978: note = engineered CasX variant
QEIKRINKIRRRLVKDSNTKKAGKTGPMKTLLVRVMTPDLRERLENLRKKPENIPQPISNTSRANLNKLLTDYTEMKKAILHVYWEEFQKDPVGLMSRVAQPASKKIDQNKLKPEMDEKGNLTTAGFACSQCGQPLFVYKLEQVSEKGKAYTNYFGRCNVAEHEKLILLAQLKPEKDSDEAVTYSLGKFGQRALDFYSIHVTKESTHPVKPLAQIAGNRYASSPVGKALSDACMGTIASFLSKYQDIIIEHQKVVKGNQKRLESLRELAGKENLEYPSVTLPPQPHTKEGVDAYNEVIARVRWWVNLNLWQKLKLSRDDAKPLLRLKGFPSFPLVERQANEVDWWDMVCNVKKLINEKKEDGKVFWQNLAGYKRQEALRPYLSSEEDRKKGKKFARYQLGDLLLHLEKKHGEDWGKVYDEAWERIDKKVEGLSKHIKLEEERRSEDAQSKAALTDWLRAKASFVIEGLKEADKDEFCRCELKLQKWYGDLRGKPFAIEAENSILDISGFSKQYNCAFIWQKDGVKKLNLYLIINYFKGGKLRFKKIKPEAFEANRFYTVINKKSGEIVPMEVNFNFDDPNLIILPLAFGKRQGREFIWNDLLSLETGSLKLANGRVIEKTLYNRRTRQDEPALFVALTFERREVLDSSNIKPMNLIGVDRGENIPAVIALTDPEGCPLSRFKDSLGNPTHILRIGERYKEKQRTIQAKKEVEQRRAGGYSRKYASKAKNLADDMVRNTARDLLYYAVTQDAMLIFENLSRGFGRQGKRTFMAERQYTRMEDWLTAKLAYEGLPSKTYLSKTLAQYTSKTCSNCGFTITSADYDRVLEKLKKTATGWMTTINGKELKVEGQITYYNRYKRQNVVKDLSVELDRLSEESVNNDISSWTKGRSGEALSLLKKRFSHRPVQEKFVCLNCGFETHADEQAALNIARSWLFLRSQEYKKYQTNKTTGNTDKRAFVETWQSFYRKKLKEVWKPAV

SEQ ID NO: 36452 - protein, 978 aa, synthetic construct
  REGION 1..978: note = engineered CasX variant
QEIKRINKIRRRLVKDSNTKKAGKTGPMKTLLVRVMTPDLRERLENLRKKPENIPQPISNTSRANLNKLLTDYTEMKKAILHVYWEEFQKDPVGLMSRVAQPASKKIDQNKLKPEMDEKGNLTTAGFACSQCGQPLFVYKLEQVSEKGKAYTNYFGRCNVAEHEKLILLAQLKPEKDSDEAVTYSLGKFGQRALDFYSIHVTKESTHPVKPLAQIAGNRYASTPVGKALSDACMGTIASFLSKYQDIIIEHQKVVKGNQKRLESLRELAGKENLEYPSVTLPPQPHTKEGVDAYNEVIARVRWWVNLNLWQKLKLSRDDAKPLLRLKGFPSFPLVERQANEVDWWDMVCNVKKLINEKKEDGKVFWQNLAGYKRQEALRPYLSSEEDRKKGKKFARYQLGDLLLHLEKKHGEDWGKVYDEAWERIDKKVEGLSKHIKLEEERRSEDAQSKAALTDWLRAKASFVIEGLKEADKDEFCRCELKLQKWYGDLRGKPFAIEAENSILDISGFSKQYNCAFIWQKDGVKKLNLYLIINYFKGGKLRFKKIKPEAFEANRFYTVINKKSGEIVPMEVNFNFDDPNLIILPLAFGKRQGREFIWNDLLSLETGSLKLANGRVIEKTLYNRRTRQDEPALFVALTFERREVLDSSNIKPMNLIGVDRGENIPAVIALTDPEGCPLSRFKDSLGNPTHILRIGERYKEKQRTIQAKKEVEQRRAGGYSRKYASKAKNLADDMVRNTARDLLYYAVTQDAMLIFENLSRGFGRQGKRTFMAERQYTRMEDWLTAKLAYEGLPSKTYLSKTLAQYTSKTCSNCGFTITSADYDRVLEKLKKTATGWMTTINGKELKVEGQITYYNRYKRQNVVKDLSVELDRLSEESVNNDISSWTKGRSGEALSLLKKRFSHRPVQEKFVCLNCGFETHADEQAALNIARSWLFLRSQEYKKYQTNKTTGNTDKRAFVETWQSFYRKKLKEVWKPAV

SEQ ID NO: 36453 - protein, 978 aa, synthetic construct
  REGION 1..978: note = engineered CasX variant
QEIKRINKIRRRLVKDSNTKKAGKTGPMKTLLVRVMTPDLRERLENLRKKPENIPQPISNTSRANLNKLLTDYTEMKKAILHVYWEEFQKDPVGLMSRVAQPASKKIDQNKLKPEMDEKGNLTTAGFACSQCGQPLFVYKLEQVSEKGKAYTNYFGRCNVAEHEKLILLAQLKPEKDSDEAVTYSLGKFGQRALDFYSIHVTKESTHPVKPLAQIAGNRYASAPVGKALSDACMGTIASFLSKYQDIIIEHQKVVKGNQKRLESLRELAGKENLEYPSVTLPPQPHTKEGVDAYNEVIARVRWWVNLNLWQKLKLSRDDAKPLLRLKGFPSFPLVERQANEVDWWDMVCNVKKLINEKKEDGKVFWQNLAGYKRQEALRPYLSSEEDRKKGKKFARYQLGDLLLHLEKKHGEDWGKVYDEAWERIDKKVEGLSKHIKLEEERRSEDAQSKAALTDWLRAKASFVIEGLKEADKDEFCRCELKLQKWYGDLRGKPFAIEAENSILDISGFSKQYNCAFIWQKDGVKKLNLYLIINYFKGGKLRFKKIKPEAFEANRFYTVINKKSGEIVPMEVNFNFDDPNLIILPLAFGKRQGREFIWNDLLSLETGSLKLANGRVIEKTLYNRRTRQDEPALFVALTFERREVLDSSNIKPMNLIGVDRGENIPAVIALTDPEGCPLSRFKDSLGNPTHILRIGERYKEKQRTIQAKKEVEQRRAGGYSRKYASKAKNLADDMVRNTARDLLYYAVTQDAMLIFENLSRGFGRQGKRTFMAERQYTRMEDWLTAKLAYEGLPSKTYLSKTLAQYTSKTCSNCGFTITSADYDRVLEKLKKTATGWMTTINGKELKVEGQITYYNRYKRQNVVKDLSVELDRLSEESVNNDISSWTKGRSGEALSLLKKRFSHRPVQEKFVCLNCGFETHADEQAALNIARSWLFLRSQEYKKYQTNKTTGNTDKRAFVETWQSFYRKKLKEVWKPAV

SEQ ID NO: 36454 - protein, 978 aa, synthetic construct
  REGION 1..978: note = engineered CasX variant
QEIKRINKIRRRLVKDSNTKKAGKTGPMKTLLVRVMTPDLRERLENLRKKPENIPQPISNTSRANLNKLLTDYTEMKKAILHVYWEEFQKDPVGLMSRVAQPASKKIDQNKLKPEMDEKGNLTTAGFACSQCGQPLFVYKLEQVSEKGKAYTNYFGRCNVAEHEKLILLAQLKPEKDSDEAVTYSLGKFGQRALDFYSIHVTKESTHPVKPLAQIAGNRYASVPVGKALSDACMGTIASFLSKYQDIIIEHQKVVKGNQKRLESLRELAGKENLEYPSVTLPPQPHTKEGVDAYNEVIARVRWWVNLNLWQKLKLSRDDAKPLLRLKGFPSFPLVERQANEVDWWDMVCNVKKLINEKKEDGKVFWQNLAGYKRQEALRPYLSSEEDRKKGKKFARYQLGDLLLHLEKKHGEDWGKVYDEAWERIDKKVEGLSKHIKLEEERRSEDAQSKAALTDWLRAKASFVIEGLKEADKDEFCRCELKLQKWYGDLRGKPFAIEAENSILDISGFSKQYNCAFIWQKDGVKKLNLYLIINYFKGGKLRFKKIKPEAFEANRFYTVINKKSGEIVPMEVNFNFDDPNLIILPLAFGKRQGREFIWNDLLSLETGSLKLANGRVIEKTLYNRRTRQDEPALFVALTFERREVLDSSNIKPMNLIGVDRGENIPAVIALTDPEGCPLSRFKDSLGNPTHILRIGERYKEKQRTIQAKKEVEQRRAGGYSRKYASKAKNLADDMVRNTARDLLYYAVTQDAMLIFENLSRGFGRQGKRTFMAERQYTRMEDWLTAKLAYEGLPSKTYLSKTLAQYTSKTCSNCGFTITSADYDRVLEKLKKTATGWMTTINGKELKVEGQITYYNRYKRQNVVKDLSVELDRLSEESVNNDISSWTKGRSGEALSLLKKRFSHRPVQEKFVCLNCGFETHADEQAALNIARSWLFLRSQEYKKYQTNKTTGNTDKRAFVETWQSFYRKKLKEVWKPAV

SEQ ID NO: 36455 - protein, 978 aa, synthetic construct
  REGION 1..978: note = engineered CasX variant
QEIKRINKIRRRLVKDSNTKKAGKTGPMKTLLVRVMTPDLRERLENLRKKPENIPQPISNTSRANLNKLLTDYTEMKKAILHVYWEEFQKDPVGLMSRVAQPASKKIDQNKLKPEMDEKGNLTTAGFACSQCGQPLFVYKLEQVSEKGKAYTNYFGRCNVAEHEKLIKLAQLKPEKDSDEAVTYSLGKFGQRALDFYSIHVTKESTHPVKPLAQIAGNRYASGPVGKALSDACMGTIASFLSKYQDIIIEHQKVVKGNQKRLESLRELAGKENLEYPSVTLPPQPHTKEGVDAYNEVIARVRWWVNLNLWQKLKLSRDDAKPLLRLKGFPSFPLVERQANEVDWWDMVCNVKKLINEKKEDGKVFWQNLAGYKRQEALRPYLSSEEDRKKGKKFARYQLGDLLLHLEKKHGEDWGKVYDEAWERIDKKVEGLSKHIKLEEERRSEDAQSKAALTDWLRAKASFVIEGLKEADKDEFCRCELKLQKWYGDLRGKPFAIEAENSILDISGFSKQYNCAFIWQKDGVKKLNLYLIINYFKGGKLRFKKIKPEAFEANRFYTVINKKSGEIVPMEVNFNFDDPNLIILPLAFGKRQGREFIWNDLLSLETGSLKLANGRVIEKTLYNRRTRQDEPALFVALTFERREVLDSSNIKPMNLIGVDRGENIPAVIALTDPEGCPLSRFKDSLGNPTHILRIGERYKEKQRTIQAKKEVEQRRAGGYSRKYASKAKNLADDMVRNTARDLLYYAVTQDAMLIFENLSRGFGRQGKRTFMAERQYTRMEDWLTAKLAYEGLPSKTYLSKTLAQYTSKTCSNCGFTITSADYDRVLEKLKKTATGWMTTINGKELKVEGQITYYNRYKRQNVVKDLSVELDRLSEESVNNDISSWTKGRSGEALSLLKKRFSHRPVQEKFVCLNCGFETHADEQAALNIARSWLFLRSQEYKKYQTNKTTGNTDKRAFVETWQSFYRKKLKEVWKPAV

SEQ ID NO: 36456 - protein, 977 aa, synthetic construct
  REGION 1..977: note = engineered CasX variant
QEIKRINKIRRRLVKDSNTKKAGKTGPMKTLLVRVMTPDLRERLENLRKKPENIPQPISNTSRANLNKLLTDYTEMKKAILHVYWEEFQKDPVGLMSRVAQPASKKIDQNKLKPEMDEKGNLTTAGFACSQCGQPLFVYKLEQVSEKGKAYTNYFGRCNVAEHEKLILLAQLKPEKDSDEAVTYSLGKFGQRALDFYSIHVTKESTHPVKPLAQIAGNRYASPVGKALSDACMGTIASFLSKYQDIIIEHQKVVKGNQKRLESLRELAGKENLEYPSVTLPPQPHTKEGVDAYNEVIARVRWWVNLNLWQKLKLSRDDAKPLLRLKGFPSFPLVERQANEVDWWDMVCNVKKLINEKKEDGKVFWQNLAGYKRQEALRPYLSSEEDRKKGKKFARYQLGDLLLHLEKKHGEDWGKVYDEAWERIDKKVEGLSKHIKLEEERRSEDAQSKAALTDWLRAKASFVIEGLKEADKDEFCRCELKLQKWYGDLRGKPFAIEAENSILDISGFSKQYNCAFIWQKDGVKKLNLYLIINYFKGGKLRFKKIKPEAFEANRFYTVINKKSGEIVPMEVNFNFDDPNLIILPLAFGKRQGREFIWNDLLSLETGSLKLANGRVIEKTLYNRRTRQDEPALFVALTFERREVLDSSNIKPMNLIGVDRGENIPAVIALTDPEGCPLSRFKDSLGNPTHILRIGERYKEKQRTIQAKKEVEQRRAGGYSRKYASKAKNLADDMVRNTARDLLYYAVTQDAMLIFENLSRGFGRQGKRTFMAERQYTRMEDWLTAKLAYEGLPSKTYLSKTLAQYTSKTCSNCGFTITSADYDRVLEKLKKTATGWMTTINGKELKVEGQITYYNRYKRQNVVKDLSVELDRLSEESVNNDISSWTKGRSGEALSLLKKRFSHRPVQEKFVCLNCGFETHADEQAALNIARSWLFLRSQEYKKYQTNKTTGNTDKRAFVETWQSFYRKKLKEVWKPAV

SEQ ID NO: 36457 - protein, 978 aa, synthetic construct
  REGION 1..978: note = engineered CasX variant
QEIKRINKIRRRLVKDSNTKKAGKTGPMKTLLVRVMTPDLRERLENLRKKPENIPQPISNTSRANLNKLLTDYTEMKKAILHVYWEEFQKDPVGLMSRVAQPASKKIDQNKLKPEMDEKGNLTTAGFACSQCGQPLFVYKLEQVSEKGKAYTNYFGRCNVAEHEKLILLAQLKPEKDSDEAVTYSLGKFGQRALDFYSIHVTKESTHPVKPLAQIAGNRYASYPVGKALSDACMGTIASFLSKYQDIIIEHQKVVKGNQKRLESLRELAGKENLEYPSVTLPPQPHTKEGVDAYNEVIARVRWWVNLNLWQKLKLSRDDAKPLLRLKGFPSFPLVERQANEVDWWDMVCNVKKLINEKKEDGKVFWQNLAGYKRQEALRPYLSSEEDRKKGKKFARYQLGDLLLHLEKKHGEDWGKVYDEAWERIDKKVEGLSKHIKLEEERRSEDAQSKAALTDWLRAKASFVIEGLKEADKDEFCRCELKLQKWYGDLRGKPFAIEAENSILDISGFSKQYNCAFIWQKDGVKKLNLYLIINYFKGGKLRFKKIKPEAFEANRFYTVINKKSGEIVPMEVNFNFDDPNLIILPLAFGKRQGREFIWNDLLSLETGSLQLANGRVIEKTLYNRRTRQDEPALFVALTFERREVLDSSNIKPMNLIGVDRGENIPAVIALTDPEGCPLSRFKDSLGNPTHILRIGESYKEKQRTIQAKKEVEQRRAGGYSRKYASKAKNLADDMVRNTARDLLYYAVTQDAMLIFENLSRGFGRQGKRTFMAERQYTRMEDWLTAKLAYEGLPSKTYLSKTLAQYTSKTCSNCGFTITSADYDRVLEKLKKTATGWMTTINGKELKVEGQITYYNRYKRQNVVKDLSVELDRLSEESVNNDISSWTKGRSGEALSLLKKRFSHRPVQEKFVCLNCGFETHADEQAALNIARSWLFLRSQEYKKYQTNKTTGNTDKRAFVETWQSFYRKKLKEVWKPAV

SEQ ID NO: 36458 - protein, 978 aa, synthetic construct
  REGION 1..978: note = engineered CasX variant
QEIKRINKIRRRLVKDSNTKKAGKTGPMKTLLVRVMTPDLRERLENLRKKPENIPQPISNTSRANLNKLLTDYTEMKKAILHVYWEEFQKDPVGLMSRVAQPASKKIDQNKLKPEMDEKGNLTTAGFACSQCGQPLFVYKLEQVSEKGKAYTNYFGRCNVAEHEKLILLAQLKPEKDSDEAVTYSLGKFGQRALDFYSIHVTKESTHPVKPLAQIAGNRYASHPVGKALSDACMGTIASFLSKYQDIIIEHQKVVKGNQKRLESLRELAGKENLEYPSVTLPPQPHTKEGVDAYNEVIARVRWWVNLNLWQKLKLSRDDAKPLLRLKGFPSFPLVERQANEVDWWDMVCNVKKLINEKKEDGKVFWQNLAGYKRQEALRPYLSSEEDRKKGKKFARYQLGDLLLHLEKKHGEDWGKVYDEAWERIDKKVEGLSKHIKLEEERRSEDAQSKAALTDWLRAKASFVIEGLKEADKDEFCRCELKLQKWYGDLRGKPFAIEAENSILDISGFSKQYNCAFIWQKDGVKKLNLYLIINYFKGGKLRFKKIKPEAFEANRFYTVINKKSGEIVPMEVNFNFDDPNLIILPLAFGKRQGREFIWNDLLSLETGSLQLANGRVIEKTLYNRRTRQDEPALFVALTFERREVLDSSNIKPMNLIGVDRGENIPAVIALTDPEGCPLSRFKDSLGNPTHILRIGESYKEKQRTIQAKKEVEQRRAGGYSRKYASKAKNLADDMVRNTARDLLYYAVTQDAMLIFENLSRGFGRQGKRTFMAERQYTRMEDWLTAKLAYEGLPSKTYLSKTLAQYTSKTCSNCGFTITSADYDRVLEKLKKTATGWMTTINGKELKVEGQITYYNRYKRQNVVKDLSVELDRLSEESVNNDISSWTKGRSGEALSLLKKRFSHRPVQEKFVCLNCGFETHADEQAALNIARSWLFLRSQEYKKYQTNKTTGNTDKRAFVETWQSFYRKKLKEVWKPAV

SEQ ID NO: 36459 - protein, 978 aa, synthetic construct
  REGION 1..978: note = engineered CasX variant
QEIKRINKIRRRLVKDSNTKKAGKTGPMKTLLVRVMTPDLRERLENLRKKPENIPQPISNTSRANLNKLLTDYTEMKKAILHVYWEEFQKDPVGLMSRVAQPASKKIDQNKLKPEMDEKGNLTTAGFACSQCGQPLFVYKLEQVSEKGKAYTNYFGRCNVAEHEKLILLAQLKPEKDSDEAVTYSLGKFGQRALDFYSIHVTKESTHPVKPLAQIAGNRYASSPVGKALSDACMGTIASFLSKYQDIIIEHQKVVKGNQKRLESLRELAGKENLEYPSVTLPPQPHTKEGVDAYNEVIARVRWWVNLNLWQKLKLSRDDAKPLLRLKGFPSFPLVERQANEVDWWDMVCNVKKLINEKKEDGKVFWQNLAGYKRQEALRPYLSSEEDRKKGKKFARYQLGDLLLHLEKKHGEDWGKVYDEAWERIDKKVEGLSKHIKLEEERRSEDAQSKAALTDWLRAKASFVIEGLKEADKDEFCRCELKLQKWYGDLRGKPFAIEAENSILDISGFSKQYNCAFIWQKDGVKKLNLYLIINYFKGGKLRFKKIKPEAFEANRFYTVINKKSGEIVPMEVNFNFDDPNLIILPLAFGKRQGREFIWNDLLSLETGSLQLANGRVIEKTLYNRRTRQDEPALFVALTFERREVLDSSNIKPMNLIGVDRGENIPAVIALTDPEGCPLSRFKDSLGNPTHILRIGESYKEKQRTIQAKKEVEQRRAGGYSRKYASKAKNLADDMVRNTARDLLYYAVTQDAMLIFENLSRGFGRQGKRTFMAERQYTRMEDWLTAKLAYEGLPSKTYLSKTLAQYTSKTCSNCGFTITSADYDRVLEKLKKTATGWMTTINGKELKVEGQITYYNRYKRQNVVKDLSVELDRLSEESVNNDISSWTKGRSGEALSLLKKRFSHRPVQEKFVCLNCGFETHADEQAALNIARSWLFLRSQEYKKYQTNKTTGNTDKRAFVETWQSFYRKKLKEVWKPAV

SEQ ID NO: 36460 - protein, 978 aa, synthetic construct
  REGION 1..978: note = engineered CasX variant
QEIKRINKIRRRLVKDSNTKKAGKTGPMKTLLVRVMTPDLRERLENLRKKPENIPQPISNTSRANLNKLLTDYTEMKKAILHVYWEEFQKDPVGLMSRVAQPASKKIDQNKLKPEMDEKGNLTTAGFACSQCGQPLFVYKLEQVSEKGKAYTNYFGRCNVAEHEKLILLAQLKPEKDSDEAVTYSLGKFGQRALDFYSIHVTKESTHPVKPLAQIAGNRYASTPVGKALSDACMGTIASFLSKYQDIIIEHQKVVKGNQKRLESLRELAGKENLEYPSVTLPPQPHTKEGVDAYNEVIARVRWWVNLNLWQKLKLSRDDAKPLLRLKGFPSFPLVERQANEVDWWDMVCNVKKLINEKKEDGKVFWQNLAGYKRQEALRPYLSSEEDRKKGKKFARYQLGDLLLHLEKKHGEDWGKVYDEAWERIDKKVEGLSKHIKLEEERRSEDAQSKAALTDWLRAKASFVIEGLKEADKDEFCRCELKLQKWYGDLRGKPFAIEAENSILDISGFSKQYNCAFIWQKDGVKKLNLYLIINYFKGGKLRFKKIKPEAFEANRFYTVINKKSGEIVPMEVNFNFDDPNLIILPLAFGKRQGREFIWNDLLSLETGSLQLANGRVIEKTLYNRRTRQDEPALFVALTFERREVLDSSNIKPMNLIGVDRGENIPAVIALTDPEGCPLSRFKDSLGNPTHILRIGESYKEKQRTIQAKKEVEQRRAGGYSRKYASKAKNLADDMVRNTARDLLYYAVTQDAMLIFENLSRGFGRQGKRTFMAERQYTRMEDWLTAKLAYEGLPSKTYLSKTLAQYTSKTCSNCGFTITSADYDRVLEKLKKTATGWMTTINGKELKVEGQITYYNRYKRQNVVKDLSVELDRLSEESVNNDISSWTKGRSGEALSLLKKRFSHRPVQEKFVCLNCGFETHADEQAALNIARSWLFLRSQEYKKYQTNKTTGNTDKRAFVETWQSFYRKKLKEVWKPAV

SEQ ID NO: 36461 - protein, 978 aa, synthetic construct
  REGION 1..978: note = engineered CasX variant
QEIKRINKIRRRLVKDSNTKKAGKTGPMKTLLVRVMTPDLRERLENLRKKPENIPQPISNTSRANLNKLLTDYTEMKKAILHVYWEEFQKDPVGLMSRVAQPASKKIDQNKLKPEMDEKGNLTTAGFACSQCGQPLFVYKLEQVSEKGKAYTNYFGRCNVAEHEKLILLAQLKPEKDSDEAVTYSLGKFGQRALDFYSIHVTKESTHPVKPLAQIAGNRYASAPVGKALSDACMGTIASFLSKYQDIIIEHQKVVKGNQKRLESLRELAGKENLEYPSVTLPPQPHTKEGVDAYNEVIARVRWWVNLNLWQKLKLSRDDAKPLLRLKGFPSFPLVERQANEVDWWDMVCNVKKLINEKKEDGKVFWQNLAGYKRQEALRPYLSSEEDRKKGKKFARYQLGDLLLHLEKKHGEDWGKVYDEAWERIDKKVEGLSKHIKLEEERRSEDAQSKAALTDWLRAKASFVIEGLKEADKDEFCRCELKLQKWYGDLRGKPFAIEAENSILDISGFSKQYNCAFIWQKDGVKKLNLYLIINYFKGGKLRFKKIKPEAFEANRFYTVINKKSGEIVPMEVNFNFDDPNLIILPLAFGKRQGREFIWNDLLSLETGSLQLANGRVIEKTLYNRRTRQDEPALFVALTFERREVLDSSNIKPMNLIGVDRGENIPAVIALTDPEGCPLSRFKDSLGNPTHILRIGESYKEKQRTIQAKKEVEQRRAGGYSRKYASKAKNLADDMVRNTARDLLYYAVTQDAMLIFENLSRGFGRQGKRTFMAERQYTRMEDWLTAKLAYEGLPSKTYLSKTLAQYTSKTCSNCGFTITSADYDRVLEKLKKTATGWMTTINGKELKVEGQITYYNRYKRQNVVKDLSVELDRLSEESVNNDISSWTKGRSGEALSLLKKRFSHRPVQEKFVCLNCGFETHADEQAALNIARSWLFLRSQEYKKYQTNKTTGNTDKRAFVETWQSFYRKKLKEVWKPAV

SEQ ID NO: 36462 - protein, 978 aa, synthetic construct
  REGION 1..978: note = engineered CasX variant
QEIKRINKIRRRLVKDSNTKKAGKTGPMKTLLVRVMTPDLRERLENLRKKPENIPQPISNTSRANLNKLLTDYTEMKKAILHVYWEEFQKDPVGLMSRVAQPASKKIDQNKLKPEMDEKGNLTTAGFACSQCGQPLFVYKLEQVSEKGKAYTNYFGRCNVAEHEKLILLAQLKPEKDSDEAVTYSLGKFGQRALDFYSIHVTKESTHPVKPLAQIAGNRYASVPVGKALSDACMGTIASFLSKYQDIIIEHQKVVKGNQKRLESLRELAGKENLEYPSVTLPPQPHTKEGVDAYNEVIARVRWWVNLNLWQKLKLSRDDAKPLLRLKGFPSFPLVERQANEVDWWDMVCNVKKLINEKKEDGKVFWQNLAGYKRQEALRPYLSSEEDRKKGKKFARYQLGDLLLHLEKKHGEDWGKVYDEAWERIDKKVEGLSKHIKLEEERRSEDAQSKAALTDWLRAKASFVIEGLKEADKDEFCRCELKLQKWYGDLRGKPFAIEAENSILDISGFSKQYNCAFIWQKDGVKKLNLYLIINYFKGGKLRFKKIKPEAFEANRFYTVINKKSGEIVPMEVNFNFDDPNLIILPLAFGKRQGREFIWNDLLSLETGSLQLANGRVIEKTLYNRRTRQDEPALFVALTFERREVLDSSNIKPMNLIGVDRGENIPAVIALTDPEGCPLSRFKDSLGNPTHILRIGESYKEKQRTIQAKKEVEQRRAGGYSRKYASKAKNLADDMVRNTARDLLYYAVTQDAMLIFENLSRGFGRQGKRTFMAERQYTRMEDWLTAKLAYEGLPSKTYLSKTLAQYTSKTCSNCGFTITSADYDRVLEKLKKTATGWMTTINGKELKVEGQITYYNRYKRQNVVKDLSVELDRLSEESVNNDISSWTKGRSGEALSLLKKRFSHRPVQEKFVCLNCGFETHADEQAALNIARSWLFLRSQEYKKYQTNKTTGNTDKRAFVETWQSFYRKKLKEVWKPAV

SEQ ID NO: 36463 - protein, 978 aa, synthetic construct
  REGION 1..978: note = engineered CasX variant
QEIKRINKIRRRLVKDSNTKKAGKTGPMKTLLVRVMTPDLRERLENLRKKPENIPQPISNTSRANLNKLLTDYTEMKKAILHVYWEEFQKDPVGLMSRVAQPASKKIDQNKLKPEMDEKGNLTTAGFACSQCGQPLFVYKLEQVSEKGKAYTNYFGRCNVAEHEKLIKLAQLKPEKDSDEAVTYSLGKFGQRALDFYSIHVTKESTHPVKPLAQIAGNRYASGPVGKALSDACMGTIASFLSKYQDIIIEHQKVVKGNQKRLESLRELAGKENLEYPSVTLPPQPHTKEGVDAYNEVIARVRWWVNLNLWQKLKLSRDDAKPLLRLKGFPSFPLVERQANEVDWWDMVCNVKKLINEKKEDGKVFWQNLAGYKRQEALRPYLSSEEDRKKGKKFARYQLGDLLLHLEKKHGEDWGKVYDEAWERIDKKVEGLSKHIKLEEERRSEDAQSKAALTDWLRAKASFVIEGLKEADKDEFCRCELKLQKWYGDLRGKPFAIEAENSILDISGFSKQYNCAFIWQKDGVKKLNLYLIINYFKGGKLRFKKIKPEAFEANRFYTVINKKSGEIVPMEVNFNFDDPNLIILPLAFGKRQGREFIWNDLLSLETGSLQLANGRVIEKTLYNRRTRQDEPALFVALTFERREVLDSSNIKPMNLIGVDRGENIPAVIALTDPEGCPLSRFKDSLGNPTHILRIGESYKEKQRTIQAKKEVEQRRAGGYSRKYASKAKNLADDMVRNTARDLLYYAVTQDAMLIFENLSRGFGRQGKRTFMAERQYTRMEDWLTAKLAYEGLPSKTYLSKTLAQYTSKTCSNCGFTITSADYDRVLEKLKKTATGWMTTINGKELKVEGQITYYNRYKRQNVVKDLSVELDRLSEESVNNDISSWTKGRSGEALSLLKKRFSHRPVQEKFVCLNCGFETHADEQAALNIARSWLFLRSQEYKKYQTNKTTGNTDKRAFVETWQSFYRKKLKEVWKPAV

SEQ ID NO: 36464 - protein, 977 aa, synthetic construct
  REGION 1..977: note = engineered CasX variant
QEIKRINKIRRRLVKDSNTKKAGKTGPMKTLLVRVMTPDLRERLENLRKKPENIPQPISNTSRANLNKLLTDYTEMKKAILHVYWEEFQKDPVGLMSRVAQPASKKIDQNKLKPEMDEKGNLTTAGFACSQCGQPLFVYKLEQVSEKGKAYTNYFGRCNVAEHEKLILLAQLKPEKDSDEAVTYSLGKFGQRALDFYSIHVTKESTHPVKPLAQIAGNRYASPVGKALSDACMGTIASFLSKYQDIIIEHQKVVKGNQKRLESLRELAGKENLEYPSVTLPPQPHTKEGVDAYNEVIARVRWWVNLNLWQKLKLSRDDAKPLLRLKGFPSFPLVERQANEVDWWDMVCNVKKLINEKKEDGKVFWQNLAGYKRQEALRPYLSSEEDRKKGKKFARYQLGDLLLHLEKKHGEDWGKVYDEAWERIDKKVEGLSKHIKLEEERRSEDAQSKAALTDWLRAKASFVIEGLKEADKDEFCRCELKLQKWYGDLRGKPFAIEAENSILDISGFSKQYNCAFIWQKDGVKKLNLYLIINYFKGGKLRFKKIKPEAFEANRFYTVINKKSGEIVPMEVNFNFDDPNLIILPLAFGKRQGREFIWNDLLSLETGSLQLANGRVIEKTLYNRRTRQDEPALFVALTFERREVLDSSNIKPMNLIGVDRGENIPAVIALTDPEGCPLSRFKDSLGNPTHILRIGESYKEKQRTIQAKKEVEQRRAGGYSRKYASKAKNLADDMVRNTARDLLYYAVTQDAMLIFENLSRGFGRQGKRTFMAERQYTRMEDWLTAKLAYEGLPSKTYLSKTLAQYTSKTCSNCGFTITSADYDRVLEKLKKTATGWMTTINGKELKVEGQITYYNRYKRQNVVKDLSVELDRLSEESVNNDISSWTKGRSGEALSLLKKRFSHRPVQEKFVCLNCGFETHADEQAALNIARSWLFLRSQEYKKYQTNKTTGNTDKRAFVETWQSFYRKKLKEVWKPAV

SEQ ID NO: 36465 - protein, 980 aa, synthetic construct
  REGION 1..980: note = engineered CasX variant
QEIKRINKIRRRLVKDSNTKKAGKTGPMKTLLVRVMTPDLRERLENLRKKPENIPQPISNTSRANLNKLLTDYTEMKKAILHVYWEEFQKDPVGLMSRVAQPASKKIDQNKLKPEMDEKGNLTTAGFACSQCGQPLFVYKLEQVSEKGKAYTNYFGRCNVAEHEKLILLAQLKPEKDSDEAVTYSLGKFGQRALDFYSIHVTKESTHPVKPLAQIAGNRYASYPVGKALSDACMGTIASFLSKYQDIIIEHQKVVKGNQKRLESLRELAGKENLEYPSVTLPPQPHTKEGVDAYNEVIARVRMWVNLNLWQKLKLSRDDAKPLLRLKGFPSFPLVERQQANAEVDWWDMVCNVKKLINEKKEDGKVFWQNLAGYKRQEALRPYLSSEEDRKKGKKFARYQLGDLLLHLEKKHGEDWGKVYDEAWERIDKKVEGLSKHIKLEEERRSEDAQSKAALTDWLRAKASFVIEGLKEADKDEFCRCELKLQKWYGDLRGKPFAIEAENSILDISGFSKQYNCAFIWQKDGVKKLNLYLIINYFKGGKLRFKKIKPEAFEANRFYTVINKKSGEIVPMEVNFNFDDPNLIILPLAFGKRQGREFIWNDLLSLETGSLKLANGRVIEKTLYNRRTRQDEPALFVALTFERREVLDSSNIKPMNLIGVDRGENIPAVIALTDPEGCPLSRFKDSLGNPTHILRIGESYKEKQRTIQAKKEVEQRRAGGYSRKYASKAKNLADDMVRNTARDLLYYAVTQDAMLIFENLSRGFGRQGKRTFMAERQYTRMEDWLTAKLAYEGLPSKTYLSKTLAQYTSKTCSNCGFTITSADYDRVLEKLKKTATGWMTTINGKELKVEGQITYYNRYKRQNVVKDLSVELDRLSEESVNNDISSWTKGRSGEALSLLKKRFSHRPVQEKFVCLNCGFETHADEQAALNIARSWLFLRSQEYKKYQTNKTTGNTDKRAFVETWQSFYRKKLKEVWKPAV

SEQ ID NO: 36466 - protein, 980 aa, synthetic construct
  REGION 1..980: note = engineered CasX variant
QEIKRINKIRRRLVKDSNTKKAGKTGPMKTLLVRVMTPDLRERLENLRKKPENIPQPISNTSRANLNKLLTDYTEMKKAILHVYWEEFQKDPVGLMSRVAQPASKKIDQNKLKPEMDEKGNLTTAGFACSQCGQPLFVYKLEQVSEKGKAYTNYFGRCNVAEHEKLILLAQLKPEKDSDEAVTYSLGKFGQRALDFYSIHVTKESTHPVKPLAQIAGNRYASHPVGKALSDACMGTIASFLSKYQDIIIEHQKVVKGNQKRLESLRELAGKENLEYPSVTLPPQPHTKEGVDAYNEVIARVRMWVNLNLWQKLKLSRDDAKPLLRLKGFPSFPLVERQQANAEVDWWDMVCNVKKLINEKKEDGKVFWQNLAGYKRQEALRPYLSSEEDRKKGKKFARYQLGDLLLHLEKKHGEDWGKVYDEAWERIDKKVEGLSKHIKLEEERRSEDAQSKAALTDWLRAKASFVIEGLKEADKDEFCRCELKLQKWYGDLRGKPFAIEAENSILDISGFSKQYNCAFIWQKDGVKKLNLYLIINYFKGGKLRFKKIKPEAFEANRFYTVINKKSGEIVPMEVNFNFDDPNLIILPLAFGKRQGREFIWNDLLSLETGSLKLANGRVIEKTLYNRRTRQDEPALFVALTFERREVLDSSNIKPMNLIGVDRGENIPAVIALTDPEGCPLSRFKDSLGNPTHILRIGESYKEKQRTIQAKKEVEQRRAGGYSRKYASKAKNLADDMVRNTARDLLYYAVTQDAMLIFENLSRGFGRQGKRTFMAERQYTRMEDWLTAKLAYEGLPSKTYLSKTLAQYTSKTCSNCGFTITSADYDRVLEKLKKTATGWMTTINGKELKVEGQITYYNRYKRQNVVKDLSVELDRLSEESVNNDISSWTKGRSGEALSLLKKRFSHRPVQEKFVCLNCGFETHADEQAALNIARSWLFLRSQEYKKYQTNKTTGNTDKRAFVETWQSFYRKKLKEVWKPAV

SEQ ID NO: 36467 - protein, 980 aa, synthetic construct
  REGION 1..980: note = engineered CasX variant
QEIKRINKIRRRLVKDSNTKKAGKTGPMKTLLVRVMTPDLRERLENLRKKPENIPQPISNTSRANLNKLLTDYTEMKKAILHVYWEEFQKDPVGLMSRVAQPASKKIDQNKLKPEMDEKGNLTTAGFACSQCGQPLFVYKLEQVSEKGKAYTNYFGRCNVAEHEKLILLAQLKPEKDSDEAVTYSLGKFGQRALDFYSIHVTKESTHPVKPLAQIAGNRYASSPVGKALSDACMGTIASFLSKYQDIIIEHQKVVKGNQKRLESLRELAGKENLEYPSVTLPPQPHTKEGVDAYNEVIARVRMWVNLNLWQKLKLSRDDAKPLLRLKGFPSFPLVERQQANAEVDWWDMVCNVKKLINEKKEDGKVFWQNLAGYKRQEALRPYLSSEEDRKKGKKFARYQLGDLLLHLEKKHGEDWGKVYDEAWERIDKKVEGLSKHIKLEEERRSEDAQSKAALTDWLRAKASFVIEGLKEADKDEFCRCELKLQKWYGDLRGKPFAIEAENSILDISGFSKQYNCAFIWQKDGVKKLNLYLIINYFKGGKLRFKKIKPEAFEANRFYTVINKKSGEIVPMEVNFNFDDPNLIILPLAFGKRQGREFIWNDLLSLETGSLKLANGRVIEKTLYNRRTRQDEPALFVALTFERREVLDSSNIKPMNLIGVDRGENIPAVIALTDPEGCPLSRFKDSLGNPTHILRIGESYKEKQRTIQAKKEVEQRRAGGYSRKYASKAKNLADDMVRNTARDLLYYAVTQDAMLIFENLSRGFGRQGKRTFMAERQYTRMEDWLTAKLAYEGLPSKTYLSKTLAQYTSKTCSNCGFTITSADYDRVLEKLKKTATGWMTTINGKELKVEGQITYYNRYKRQNVVKDLSVELDRLSEESVNNDISSWTKGRSGEALSLLKKRFSHRPVQEKFVCLNCGFETHADEQAALNIARSWLFLRSQEYKKYQTNKTTGNTDKRAFVETWQSFYRKKLKEVWKPAV

SEQ ID NO: 36468 - protein, 980 aa, synthetic construct
  REGION 1..980: note = engineered CasX variant
QEIKRINKIRRRLVKDSNTKKAGKTGPMKTLLVRVMTPDLRERLENLRKKPENIPQPISNTSRANLNKLLTDYTEMKKAILHVYWEEFQKDPVGLMSRVAQPASKKIDQNKLKPEMDEKGNLTTAGFACSQCGQPLFVYKLEQVSEKGKAYTNYFGRCNVAEHEKLILLAQLKPEKDSDEAVTYSLGKFGQRALDFYSIHVTKESTHPVKPLAQIAGNRYASTPVGKALSDACMGTIASFLSKYQDIIIEHQKVVKGNQKRLESLRELAGKENLEYPSVTLPPQPHTKEGVDAYNEVIARVRMWVNLNLWQKLKLSRDDAKPLLRLKGFPSFPLVERQQANAEVDWWDMVCNVKKLINEKKEDGKVFWQNLAGYKRQEALRPYLSSEEDRKKGKKFARYQLGDLLLHLEKKHGEDWGKVYDEAWERIDKKVEGLSKHIKLEEERRSEDAQSKAALTDWLRAKASFVIEGLKEADKDEFCRCELKLQKWYGDLRGKPFAIEAENSILDISGFSKQYNCAFIWQKDGVKKLNLYLIINYFKGGKLRFKKIKPEAFEANRFYTVINKKSGEIVPMEVNFNFDDPNLIILPLAFGKRQGREFIWNDLLSLETGSLKLANGRVIEKTLYNRRTRQDEPALFVALTFERREVLDSSNIKPMNLIGVDRGENIPAVIALTDPEGCPLSRFKDSLGNPTHILRIGESYKEKQRTIQAKKEVEQRRAGGYSRKYASKAKNLADDMVRNTARDLLYYAVTQDAMLIFENLSRGFGRQGKRTFMAERQYTRMEDWLTAKLAYEGLPSKTYLSKTLAQYTSKTCSNCGFTITSADYDRVLEKLKKTATGWMTTINGKELKVEGQITYYNRYKRQNVVKDLSVELDRLSEESVNNDISSWTKGRSGEALSLLKKRFSHRPVQEKFVCLNCGFETHADEQAALNIARSWLFLRSQEYKKYQTNKTTGNTDKRAFVETWQSFYRKKLKEVWKPAV

SEQ ID NO: 36469 - protein, 980 aa, synthetic construct
  REGION 1..980: note = engineered CasX variant
QEIKRINKIRRRLVKDSNTKKAGKTGPMKTLLVRVMTPDLRERLENLRKKPENIPQPISNTSRANLNKLLTDYTEMKKAILHVYWEEFQKDPVGLMSRVAQPASKKIDQNKLKPEMDEKGNLTTAGFACSQCGQPLFVYKLEQVSEKGKAYTNYFGRCNVAEHEKLILLAQLKPEKDSDEAVTYSLGKFGQRALDFYSIHVTKESTHPVKPLAQIAGNRYASAPVGKALSDACMGTIASFLSKYQDIIIEHQKVVKGNQKRLESLRELAGKENLEYPSVTLPPQPHTKEGVDAYNEVIARVRMWVNLNLWQKLKLSRDDAKPLLRLKGFPSFPLVERQQANAEVDWWDMVCNVKKLINEKKEDGKVFWQNLAGYKRQEALRPYLSSEEDRKKGKKFARYQLGDLLLHLEKKHGEDWGKVYDEAWERIDKKVEGLSKHIKLEEERRSEDAQSKAALTDWLRAKASFVIEGLKEADKDEFCRCELKLQKWYGDLRGKPFAIEAENSILDISGFSKQYNCAFIWQKDGVKKLNLYLIINYFKGGKLRFKKIKPEAFEANRFYTVINKKSGEIVPMEVNFNFDDPNLIILPLAFGKRQGREFIWNDLLSLETGSLKLANGRVIEKTLYNRRTRQDEPALFVALTFERREVLDSSNIKPMNLIGVDRGENIPAVIALTDPEGCPLSRFKDSLGNPTHILRIGESYKEKQRTIQAKKEVEQRRAGGYSRKYASKAKNLADDMVRNTARDLLYYAVTQDAMLIFENLSRGFGRQGKRTFMAERQYTRMEDWLTAKLAYEGLPSKTYLSKTLAQYTSKTCSNCGFTITSADYDRVLEKLKKTATGWMTTINGKELKVEGQITYYNRYKRQNVVKDLSVELDRLSEESVNNDISSWTKGRSGEALSLLKKRFSHRPVQEKFVCLNCGFETHADEQAALNIARSWLFLRSQEYKKYQTNKTTGNTDKRAFVETWQSFYRKKLKEVWKPAV

SEQ ID NO: 36470 - protein, 980 aa, synthetic construct
  REGION 1..980: note = engineered CasX variant
QEIKRINKIRRRLVKDSNTKKAGKTGPMKTLLVRVMTPDLRERLENLRKKPENIPQPISNTSRANLNKLLTDYTEMKKAILHVYWEEFQKDPVGLMSRVAQPASKKIDQNKLKPEMDEKGNLTTAGFACSQCGQPLFVYKLEQVSEKGKAYTNYFGRCNVAEHEKLILLAQLKPEKDSDEAVTYSLGKFGQRALDFYSIHVTKESTHPVKPLAQIAGNRYASVPVGKALSDACMGTIASFLSKYQDIIIEHQKVVKGNQKRLESLRELAGKENLEYPSVTLPPQPHTKEGVDAYNEVIARVRMWVNLNLWQKLKLSRDDAKPLLRLKGFPSFPLVERQQANAEVDWWDMVCNVKKLINEKKEDGKVFWQNLAGYKRQEALRPYLSSEEDRKKGKKFARYQLGDLLLHLEKKHGEDWGKVYDEAWERIDKKVEGLSKHIKLEEERRSEDAQSKAALTDWLRAKASFVIEGLKEADKDEFCRCELKLQKWYGDLRGKPFAIEAENSILDISGFSKQYNCAFIWQKDGVKKLNLYLIINYFKGGKLRFKKIKPEAFEANRFYTVINKKSGEIVPMEVNFNFDDPNLIILPLAFGKRQGREFIWNDLLSLETGSLKLANGRVIEKTLYNRRTRQDEPALFVALTFERREVLDSSNIKPMNLIGVDRGENIPAVIALTDPEGCPLSRFKDSLGNPTHILRIGESYKEKQRTIQAKKEVEQRRAGGYSRKYASKAKNLADDMVRNTARDLLYYAVTQDAMLIFENLSRGFGRQGKRTFMAERQYTRMEDWLTAKLAYEGLPSKTYLSKTLAQYTSKTCSNCGFTITSADYDRVLEKLKKTATGWMTTINGKELKVEGQITYYNRYKRQNVVKDLSVELDRLSEESVNNDISSWTKGRSGEALSLLKKRFSHRPVQEKFVCLNCGFETHADEQAALNIARSWLFLRSQEYKKYQTNKTTGNTDKRAFVETWQSFYRKKLKEVWKPAV

SEQ ID NO: 36471 - protein, 980 aa, synthetic construct
  REGION 1..980: note = engineered CasX variant
QEIKRINKIRRRLVKDSNTKKAGKTGPMKTLLVRVMTPDLRERLENLRKKPENIPQPISNTSRANLNKLLTDYTEMKKAILHVYWEEFQKDPVGLMSRVAQPASKKIDQNKLKPEMDEKGNLTTAGFACSQCGQPLFVYKLEQVSEKGKAYTNYFGRCNVAEHEKLIKLAQLKPEKDSDEAVTYSLGKFGQRALDFYSIHVTKESTHPVKPLAQIAGNRYASGPVGKALSDACMGTIASFLSKYQDIIIEHQKVVKGNQKRLESLRELAGKENLEYPSVTLPPQPHTKEGVDAYNEVIARVRMWVNLNLWQKLKLSRDDAKPLLRLKGFPSFPLVERQQANAEVDWWDMVCNVKKLINEKKEDGKVFWQNLAGYKRQEALRPYLSSEEDRKKGKKFARYQLGDLLLHLEKKHGEDWGKVYDEAWERIDKKVEGLSKHIKLEEERRSEDAQSKAALTDWLRAKASFVIEGLKEADKDEFCRCELKLQKWYGDLRGKPFAIEAENSILDISGFSKQYNCAFIWQKDGVKKLNLYLIINYFKGGKLRFKKIKPEAFEANRFYTVINKKSGEIVPMEVNFNFDDPNLIILPLAFGKRQGREFIWNDLLSLETGSLKLANGRVIEKTLYNRRTRQDEPALFVALTFERREVLDSSNIKPMNLIGVDRGENIPAVIALTDPEGCPLSRFKDSLGNPTHILRIGESYKEKQRTIQAKKEVEQRRAGGYSRKYASKAKNLADDMVRNTARDLLYYAVTQDAMLIFENLSRGFGRQGKRTFMAERQYTRMEDWLTAKLAYEGLPSKTYLSKTLAQYTSKTCSNCGFTITSADYDRVLEKLKKTATGWMTTINGKELKVEGQITYYNRYKRQNVVKDLSVELDRLSEESVNNDISSWTKGRSGEALSLLKKRFSHRPVQEKFVCLNCGFETHADEQAALNIARSWLFLRSQEYKKYQTNKTTGNTDKRAFVETWQSFYRKKLKEVWKPAV

SEQ ID NO: 36472 - protein, 979 aa, synthetic construct
  REGION 1..979: note = engineered CasX variant
QEIKRINKIRRRLVKDSNTKKAGKTGPMKTLLVRVMTPDLRERLENLRKKPENIPQPISNTSRANLNKLLTDYTEMKKAILHVYWEEFQKDPVGLMSRVAQPASKKIDQNKLKPEMDEKGNLTTAGFACSQCGQPLFVYKLEQVSEKGKAYTNYFGRCNVAEHEKLILLAQLKPEKDSDEAVTYSLGKFGQRALDFYSIHVTKESTHPVKPLAQIAGNRYASPVGKALSDACMGTIASFLSKYQDIIIEHQKVVKGNQKRLESLRELAGKENLEYPSVTLPPQPHTKEGVDAYNEVIARVRMWVNLNLWQKLKLSRDDAKPLLRLKGFPSFPLVERQQANAEVDWWDMVCNVKKLINEKKEDGKVFWQNLAGYKRQEALRPYLSSEEDRKKGKKFARYQLGDLLLHLEKKHGEDWGKVYDEAWERIDKKVEGLSKHIKLEEERRSEDAQSKAALTDWLRAKASFVIEGLKEADKDEFCRCELKLQKWYGDLRGKPFAIEAENSILDISGFSKQYNCAFIWQKDGVKKLNLYLIINYFKGGKLRFKKIKPEAFEANRFYTVINKKSGEIVPMEVNFNFDDPNLIILPLAFGKRQGREFIWNDLLSLETGSLKLANGRVIEKTLYNRRTRQDEPALFVALTFERREVLDSSNIKPMNLIGVDRGENIPAVIALTDPEGCPLSRFKDSLGNPTHILRIGESYKEKQRTIQAKKEVEQRRAGGYSRKYASKAKNLADDMVRNTARDLLYYAVTQDAMLIFENLSRGFGRQGKRTFMAERQYTRMEDWLTAKLAYEGLPSKTYLSKTLAQYTSKTCSNCGFTITSADYDRVLEKLKKTATGWMTTINGKELKVEGQITYYNRYKRQNVVKDLSVELDRLSEESVNNDISSWTKGRSGEALSLLKKRFSHRPVQEKFVCLNCGFETHADEQAALNIARSWLFLRSQEYKKYQTNKTTGNTDKRAFVETWQSFYRKKLKEVWKPAV

SEQ ID NO: 36473 - protein, 979 aa, synthetic construct
  REGION 1..979: note = engineered CasX variant
QEIKRINKIRRRLVKDSNTKKAGKTGPMKTLLVRVMTPDLRERLENLRKKPENIPQPISNTSRANLNKLLTDYTEMKKAILHVYWEEFQKDPVGLMSRVAQPASKKIDQNKLKPEMDEKGNLTTAGFACSQCGQPLFVYKLEQVSEKGKAYTNYFGRCNVAEHEKLILLAQLKPEKDSDEAVTYSLGKFGQRALDFYSIHVTKESTHPVKPLAQIAGNRYASYPVGKALSDACMGTIASFLSKYQDIIIEHQKVVKGNQKRLESLRELAGKENLEYPSVTLPPQPHTKEGVDAYNEVIARVRMWVNLNLWQKLKLSRDDAKPLLRLKGFPSFPLVERQQANEVDWWDMVCNVKKLINEKKEDGKVFWQNLAGYKRQEALRPYLSSEEDRKKGKKFARTQLGDLLLHLEKKHGEDWGKVYDEAWERIDKKVEGLSKHIKLEEERRSEDAQSKAALTDWLRAKASFVIEGLKEADKDEFCRCELKLQKWYGDLRGKPFAIEAENSILDISGFSKQYNCAFIWQKDGVKKLNLYLIINYFKGGKLRFKKIKPEAFEANRFYTVINKKSGEIVPMEVNFNFDDPNLIILPLAFGKRQGREFIWNDLLSLETGSLKLANGRVIEKTLYNRRTRQDEPALFVALTFERREVLDSSNIKPMNLIGVDRGENIPAVIALTDPEGCPLSRFKDSLGNPTHILRIGESYKEKQRTIQAKKEVEQRRAGGYSRKYASKAKNLADDMVRNTARDLLYYAVTQDAMLIFENLSRGFGRQGKRTFMAERQYTRMEDWLTAKLAYEGLPSKTYLSKTLAQYTSKTCSNCGFTITSADYDRVLEKLKKTATGWMTTINGKELKVEGQITYYNRYKRQNVVKDLSVELDRLSEESVNNDISSWTKGRSGEALSLLKKRFSHRPVQEKFVCLNCGFETHADEQAALNIARSWLFLRSQEYKKYQTNKTTGNTDKRAFVETWQSFYRKKLKEVWKPAV

SEQ ID NO: 36474 - protein, 979 aa, synthetic construct
  REGION 1..979: note = engineered CasX variant
QEIKRINKIRRRLVKDSNTKKAGKTGPMKTLLVRVMTPDLRERLENLRKKPENIPQPISNTSRANLNKLLTDYTEMKKAILHVYWEEFQKDPVGLMSRVAQPASKKIDQNKLKPEMDEKGNLTTAGFACSQCGQPLFVYKLEQVSEKGKAYTNYFGRCNVAEHEKLILLAQLKPEKDSDEAVTYSLGKFGQRALDFYSIHVTKESTHPVKPLAQIAGNRYASHPVGKALSDACMGTIASFLSKYQDIIIEHQKVVKGNQKRLESLRELAGKENLEYPSVTLPPQPHTKEGVDAYNEVIARVRMWVNLNLWQKLKLSRDDAKPLLRLKGFPSFPLVERQQANEVDWWDMVCNVKKLINEKKEDGKVFWQNLAGYKRQEALRPYLSSEEDRKKGKKFARTQLGDLLLHLEKKHGEDWGKVYDEAWERIDKKVEGLSKHIKLEEERRSEDAQSKAALTDWLRAKASFVIEGLKEADKDEFCRCELKLQKWYGDLRGKPFAIEAENSILDISGFSKQYNCAFIWQKDGVKKLNLYLIINYFKGGKLRFKKIKPEAFEANRFYTVINKKSGEIVPMEVNFNFDDPNLIILPLAFGKRQGREFIWNDLLSLETGSLKLANGRVIEKTLYNRRTRQDEPALFVALTFERREVLDSSNIKPMNLIGVDRGENIPAVIALTDPEGCPLSRFKDSLGNPTHILRIGESYKEKQRTIQAKKEVEQRRAGGYSRKYASKAKNLADDMVRNTARDLLYYAVTQDAMLIFENLSRGFGRQGKRTFMAERQYTRMEDWLTAKLAYEGLPSKTYLSKTLAQYTSKTCSNCGFTITSADYDRVLEKLKKTATGWMTTINGKELKVEGQITYYNRYKRQNVVKDLSVELDRLSEESVNNDISSWTKGRSGEALSLLKKRFSHRPVQEKFVCLNCGFETHADEQAALNIARSWLFLRSQEYKKYQTNKTTGNTDKRAFVETWQSFYRKKLKEVWKPAV

SEQ ID NO: 36475 - protein, 979 aa, synthetic construct
  REGION 1..979: note = engineered CasX variant
QEIKRINKIRRRLVKDSNTKKAGKTGPMKTLLVRVMTPDLRERLENLRKKPENIPQPISNTSRANLNKLLTDYTEMKKAILHVYWEEFQKDPVGLMSRVAQPASKKIDQNKLKPEMDEKGNLTTAGFACSQCGQPLFVYKLEQVSEKGKAYTNYFGRCNVAEHEKLILLAQLKPEKDSDEAVTYSLGKFGQRALDFYSIHVTKESTHPVKPLAQIAGNRYASSPVGKALSDACMGTIASFLSKYQDIIIEHQKVVKGNQKRLESLRELAGKENLEYPSVTLPPQPHTKEGVDAYNEVIARVRMWVNLNLWQKLKLSRDDAKPLLRLKGFPSFPLVERQQANEVDWWDMVCNVKKLINEKKEDGKVFWQNLAGYKRQEALRPYLSSEEDRKKGKKFARTQLGDLLLHLEKKHGEDWGKVYDEAWERIDKKVEGLSKHIKLEEERRSEDAQSKAALTDWLRAKASFVIEGLKEADKDEFCRCELKLQKWYGDLRGKPFAIEAENSILDISGFSKQYNCAFIWQKDGVKKLNLYLIINYFKGGKLRFKKIKPEAFEANRFYTVINKKSGEIVPMEVNFNFDDPNLIILPLAFGKRQGREFIWNDLLSLETGSLKLANGRVIEKTLYNRRTRQDEPALFVALTFERREVLDSSNIKPMNLIGVDRGENIPAVIALTDPEGCPLSRFKDSLGNPTHILRIGESYKEKQRTIQAKKEVEQRRAGGYSRKYASKAKNLADDMVRNTARDLLYYAVTQDAMLIFENLSRGFGRQGKRTFMAERQYTRMEDWLTAKLAYEGLPSKTYLSKTLAQYTSKTCSNCGFTITSADYDRVLEKLKKTATGWMTTINGKELKVEGQITYYNRYKRQNVVKDLSVELDRLSEESVNNDISSWTKGRSGEALSLLKKRFSHRPVQEKFVCLNCGFETHADEQAALNIARSWLFLRSQEYKKYQTNKTTGNTDKRAFVETWQSFYRKKLKEVWKPAV

SEQ ID NO: 36476 - protein, 979 aa, synthetic construct
  REGION 1..979: note = engineered CasX variant
QEIKRINKIRRRLVKDSNTKKAGKTGPMKTLLVRVMTPDLRERLENLRKKPENIPQPISNTSRANLNKLLTDYTEMKKAILHVYWEEFQKDPVGLMSRVAQPASKKIDQNKLKPEMDEKGNLTTAGFACSQCGQPLFVYKLEQVSEKGKAYTNYFGRCNVAEHEKLILLAQLKPEKDSDEAVTYSLGKFGQRALDFYSIHVTKESTHPVKPLAQIAGNRYASTPVGKALSDACMGTIASFLSKYQDIIIEHQKVVKGNQKRLESLRELAGKENLEYPSVTLPPQPHTKEGVDAYNEVIARVRMWVNLNLWQKLKLSRDDAKPLLRLKGFPSFPLVERQQANEVDWWDMVCNVKKLINEKKEDGKVFWQNLAGYKRQEALRPYLSSEEDRKKGKKFARTQLGDLLLHLEKKHGEDWGKVYDEAWERIDKKVEGLSKHIKLEEERRSEDAQSKAALTDWLRAKASFVIEGLKEADKDEFCRCELKLQKWYGDLRGKPFAIEAENSILDISGFSKQYNCAFIWQKDGVKKLNLYLIINYFKGGKLRFKKIKPEAFEANRFYTVINKKSGEIVPMEVNFNFDDPNLIILPLAFGKRQGREFIWNDLLSLETGSLKLANGRVIEKTLYNRRTRQDEPALFVALTFERREVLDSSNIKPMNLIGVDRGENIPAVIALTDPEGCPLSRFKDSLGNPTHILRIGESYKEKQRTIQAKKEVEQRRAGGYSRKYASKAKNLADDMVRNTARDLLYYAVTQDAMLIFENLSRGFGRQGKRTFMAERQYTRMEDWLTAKLAYEGLPSKTYLSKTLAQYTSKTCSNCGFTITSADYDRVLEKLKKTATGWMTTINGKELKVEGQITYYNRYKRQNVVKDLSVELDRLSEESVNNDISSWTKGRSGEALSLLKKRFSHRPVQEKFVCLNCGFETHADEQAALNIARSWLFLRSQEYKKYQTNKTTGNTDKRAFVETWQSFYRKKLKEVWKPAV

SEQ ID NO: 36477 - protein, 979 aa, synthetic construct
  REGION 1..979: note = engineered CasX variant
QEIKRINKIRRRLVKDSNTKKAGKTGPMKTLLVRVMTPDLRERLENLRKKPENIPQPISNTSRANLNKLLTDYTEMKKAILHVYWEEFQKDPVGLMSRVAQPASKKIDQNKLKPEMDEKGNLTTAGFACSQCGQPLFVYKLEQVSEKGKAYTNYFGRCNVAEHEKLILLAQLKPEKDSDEAVTYSLGKFGQRALDFYSIHVTKESTHPVKPLAQIAGNRYASAPVGKALSDACMGTIASFLSKYQDIIIEHQKVVKGNQKRLESLRELAGKENLEYPSVTLPPQPHTKEGVDAYNEVIARVRMWVNLNLWQKLKLSRDDAKPLLRLKGFPSFPLVERQQANEVDWWDMVCNVKKLINEKKEDGKVFWQNLAGYKRQEALRPYLSSEEDRKKGKKFARTQLGDLLLHLEKKHGEDWGKVYDEAWERIDKKVEGLSKHIKLEEERRSEDAQSKAALTDWLRAKASFVIEGLKEADKDEFCRCELKLQKWYGDLRGKPFAIEAENSILDISGFSKQYNCAFIWQKDGVKKLNLYLIINYFKGGKLRFKKIKPEAFEANRFYTVINKKSGEIVPMEVNFNFDDPNLIILPLAFGKRQGREFIWNDLLSLETGSLKLANGRVIEKTLYNRRTRQDEPALFVALTFERREVLDSSNIKPMNLIGVDRGENIPAVIALTDPEGCPLSRFKDSLGNPTHILRIGESYKEKQRTIQAKKEVEQRRAGGYSRKYASKAKNLADDMVRNTARDLLYYAVTQDAMLIFENLSRGFGRQGKRTFMAERQYTRMEDWLTAKLAYEGLPSKTYLSKTLAQYTSKTCSNCGFTITSADYDRVLEKLKKTATGWMTTINGKELKVEGQITYYNRYKRQNVVKDLSVELDRLSEESVNNDISSWTKGRSGEALSLLKKRFSHRPVQEKFVCLNCGFETHADEQAALNIARSWLFLRSQEYKKYQTNKTTGNTDKRAFVETWQSFYRKKLKEVWKPAV

SEQ ID NO: 36478 - protein, 979 aa, synthetic construct
  REGION 1..979: note = engineered CasX variant
QEIKRINKIRRRLVKDSNTKKAGKTGPMKTLLVRVMTPDLRERLENLRKKPENIPQPISNTSRANLNKLLTDYTEMKKAILHVYWEEFQKDPVGLMSRVAQPASKKIDQNKLKPEMDEKGNLTTAGFACSQCGQPLFVYKLEQVSEKGKAYTNYFGRCNVAEHEKLILLAQLKPEKDSDEAVTYSLGKFGQRALDFYSIHVTKESTHPVKPLAQIAGNRYASVPVGKALSDACMGTIASFLSKYQDIIIEHQKVVKGNQKRLESLRELAGKENLEYPSVTLPPQPHTKEGVDAYNEVIARVRMWVNLNLWQKLKLSRDDAKPLLRLKGFPSFPLVERQQANEVDWWDMVCNVKKLINEKKEDGKVFWQNLAGYKRQEALRPYLSSEEDRKKGKKFARTQLGDLLLHLEKKHGEDWGKVYDEAWERIDKKVEGLSKHIKLEEERRSEDAQSKAALTDWLRAKASFVIEGLKEADKDEFCRCELKLQKWYGDLRGKPFAIEAENSILDISGFSKQYNCAFIWQKDGVKKLNLYLIINYFKGGKLRFKKIKPEAFEANRFYTVINKKSGEIVPMEVNFNFDDPNLIILPLAFGKRQGREFIWNDLLSLETGSLKLANGRVIEKTLYNRRTRQDEPALFVALTFERREVLDSSNIKPMNLIGVDRGENIPAVIALTDPEGCPLSRFKDSLGNPTHILRIGESYKEKQRTIQAKKEVEQRRAGGYSRKYASKAKNLADDMVRNTARDLLYYAVTQDAMLIFENLSRGFGRQGKRTFMAERQYTRMEDWLTAKLAYEGLPSKTYLSKTLAQYTSKTCSNCGFTITSADYDRVLEKLKKTATGWMTTINGKELKVEGQITYYNRYKRQNVVKDLSVELDRLSEESVNNDISSWTKGRSGEALSLLKKRFSHRPVQEKFVCLNCGFETHADEQAALNIARSWLFLRSQEYKKYQTNKTTGNTDKRAFVETWQSFYRKKLKEVWKPAV

SEQ ID NO: 36479 - protein, 979 aa, synthetic construct
  REGION 1..979: note = engineered CasX variant
QEIKRINKIRRRLVKDSNTKKAGKTGPMKTLLVRVMTPDLRERLENLRKKPENIPQPISNTSRANLNKLLTDYTEMKKAILHVYWEEFQKDPVGLMSRVAQPASKKIDQNKLKPEMDEKGNLTTAGFACSQCGQPLFVYKLEQVSEKGKAYTNYFGRCNVAEHEKLIKLAQLKPEKDSDEAVTYSLGKFGQRALDFYSIHVTKESTHPVKPLAQIAGNRYASGPVGKALSDACMGTIASFLSKYQDIIIEHQKVVKGNQKRLESLRELAGKENLEYPSVTLPPQPHTKEGVDAYNEVIARVRMWVNLNLWQKLKLSRDDAKPLLRLKGFPSFPLVERQQANEVDWWDMVCNVKKLINEKKEDGKVFWQNLAGYKRQEALRPYLSSEEDRKKGKKFARTQLGDLLLHLEKKHGEDWGKVYDEAWERIDKKVEGLSKHIKLEEERRSEDAQSKAALTDWLRAKASFVIEGLKEADKDEFCRCELKLQKWYGDLRGKPFAIEAENSILDISGFSKQYNCAFIWQKDGVKKLNLYLIINYFKGGKLRFKKIKPEAFEANRFYTVINKKSGEIVPMEVNFNFDDPNLIILPLAFGKRQGREFIWNDLLSLETGSLKLANGRVIEKTLYNRRTRQDEPALFVALTFERREVLDSSNIKPMNLIGVDRGENIPAVIALTDPEGCPLSRFKDSLGNPTHILRIGESYKEKQRTIQAKKEVEQRRAGGYSRKYASKAKNLADDMVRNTARDLLYYAVTQDAMLIFENLSRGFGRQGKRTFMAERQYTRMEDWLTAKLAYEGLPSKTYLSKTLAQYTSKTCSNCGFTITSADYDRVLEKLKKTATGWMTTINGKELKVEGQITYYNRYKRQNVVKDLSVELDRLSEESVNNDISSWTKGRSGEALSLLKKRFSHRPVQEKFVCLNCGFETHADEQAALNIARSWLFLRSQEYKKYQTNKTTGNTDKRAFVETWQSFYRKKLKEVWKPAV

SEQ ID NO: 36480 - protein, 978 aa, synthetic construct
  REGION 1..978: note = engineered CasX variant
QEIKRINKIRRRLVKDSNTKKAGKTGPMKTLLVRVMTPDLRERLENLRKKPENIPQPISNTSRANLNKLLTDYTEMKKAILHVYWEEFQKDPVGLMSRVAQPASKKIDQNKLKPEMDEKGNLTTAGFACSQCGQPLFVYKLEQVSEKGKAYTNYFGRCNVAEHEKLILLAQLKPEKDSDEAVTYSLGKFGQRALDFYSIHVTKESTHPVKPLAQIAGNRYASPVGKALSDACMGTIASFLSKYQDIIIEHQKVVKGNQKRLESLRELAGKENLEYPSVTLPPQPHTKEGVDAYNEVIARVRMWVNLNLWQKLKLSRDDAKPLLRLKGFPSFPLVERQQANEVDWWDMVCNVKKLINEKKEDGKVFWQNLAGYKRQEALRPYLSSEEDRKKGKKFARTQLGDLLLHLEKKHGEDWGKVYDEAWERIDKKVEGLSKHIKLEEERRSEDAQSKAALTDWLRAKASFVIEGLKEADKDEFCRCELKLQKWYGDLRGKPFAIEAENSILDISGFSKQYNCAFIWQKDGVKKLNLYLIINYFKGGKLRFKKIKPEAFEANRFYTVINKKSGEIVPMEVNFNFDDPNLIILPLAFGKRQGREFIWNDLLSLETGSLKLANGRVIEKTLYNRRTRQDEPALFVALTFERREVLDSSNIKPMNLIGVDRGENIPAVIALTDPEGCPLSRFKDSLGNPTHILRIGESYKEKQRTIQAKKEVEQRRAGGYSRKYASKAKNLADDMVRNTARDLLYYAVTQDAMLIFENLSRGFGRQGKRTFMAERQYTRMEDWLTAKLAYEGLPSKTYLSKTLAQYTSKTCSNCGFTITSADYDRVLEKLKKTATGWMTTINGKELKVEGQITYYNRYKRQNVVKDLSVELDRLSEESVNNDISSWTKGRSGEALSLLKKRFSHRPVQEKFVCLNCGFETHADEQAALNIARSWLFLRSQEYKKYQTNKTTGNTDKRAFVETWQSFYRKKLKEVWKPAV

SEQ ID NO: 36481 - protein, 980 aa, synthetic construct
  REGION 1..980: note = engineered CasX variant
QEIKRINKIRRRLVKDSNTKKAGKTGPMKTLLVRVMTPDLRERLENLRKKPENIPQPISNTSRANLNKLLTDYTEMKKAILHVYWEEFQKDPVGLMSRVAQPASKKIDQNKLKPEMDEKGNLTTAGFACSQCGQPLFVYKLEQVSEKGKAYTNYFGRCNVAEHEKLILLAQLKPEKDSDEAVTYSLGKFGQRALDFYSIHVTKESTHPVKPLAQIAGNRYASYPVGKALSDACMGTIASFLSKYQDIIIEHQKVVKGNQKRLESLRELAGKENLEYPSVTLPPQPHTKEGVDAYNEVIARVRMWVNLNLWQKLKLSRDDAKPLLRLKGFPSFPLVERQQANEVDWWDMVCNVKKLINEKKEDGKVFWQNLAGYKRQEALRPYLSSEEDRKKGKKFARYQLGDLLLHLEKKHEGEDWGKVYDEAWERIDKKVEGLSKHIKLEEERRSEDAQSKAALTDWLRAKASFVIEGLKEADKDEFCRCELKLQKWYGDLRGKPFAIEAENSILDISGFSKQYNCAFIWQKDGVKKLNLYLIINYFKGGKLRFKKIKPEAFEANRFYTVINKKSGEIVPMEVNFNFDDPNLIILPLAFGKRQGREFIWNDLLSLETGSLKLANGRVIEKTLYNRRTRQDEPALFVALTFERREVLDSSNIKPMNLIGVDRGENIPAVIALTDPEGCPLSRFKDSLGNPTHILRIGESYKEKQRTIQAKKEVEQRRAGGYSRKYASKAKNLADDMVRNTARDLLYYAVTQDAMLIFENLSRGFGRQGKRTFMAERQYTRMEDWLTAKLAYEGLPSKTYLSKTLAQYTSKTCSNCGFTITSADYDRVLEKLKKTATGWMTTINGKELKVEGQITYYNRYKRQNVVKDLSVELDRLSEESVNNDISSWTKGRSGEALSLLKKRFSHRPVQEKFVCLNCGFETHADEQAALNIARSWLFLRSQEYKKYQTNKTTGNTDKRAFVETWQSFYRKKLKEVWKPAV

SEQ ID NO: 36482 - protein, 980 aa, synthetic construct
  REGION 1..980: note = engineered CasX variant
QEIKRINKIRRRLVKDSNTKKAGKTGPMKTLLVRVMTPDLRERLENLRKKPENIPQPISNTSRANLNKLLTDYTEMKKAILHVYWEEFQKDPVGLMSRVAQPASKKIDQNKLKPEMDEKGNLTTAGFACSQCGQPLFVYKLEQVSEKGKAYTNYFGRCNVAEHEKLILLAQLKPEKDSDEAVTYSLGKFGQRALDFYSIHVTKESTHPVKPLAQIAGNRYASHPVGKALSDACMGTIASFLSKYQDIIIEHQKVVKGNQKRLESLRELAGKENLEYPSVTLPPQPHTKEGVDAYNEVIARVRMWVNLNLWQKLKLSRDDAKPLLRLKGFPSFPLVERQQANEVDWWDMVCNVKKLINEKKEDGKVFWQNLAGYKRQEALRPYLSSEEDRKKGKKFARYQLGDLLLHLEKKHEGEDWGKVYDEAWERIDKKVEGLSKHIKLEEERRSEDAQSKAALTDWLRAKASFVIEGLKEADKDEFCRCELKLQKWYGDLRGKPFAIEAENSILDISGFSKQYNCAFIWQKDGVKKLNLYLIINYFKGGKLRFKKIKPEAFEANRFYTVINKKSGEIVPMEVNFNFDDPNLIILPLAFGKRQGREFIWNDLLSLETGSLKLANGRVIEKTLYNRRTRQDEPALFVALTFERREVLDSSNIKPMNLIGVDRGENIPAVIALTDPEGCPLSRFKDSLGNPTHILRIGESYKEKQRTIQAKKEVEQRRAGGYSRKYASKAKNLADDMVRNTARDLLYYAVTQDAMLIFENLSRGFGRQGKRTFMAERQYTRMEDWLTAKLAYEGLPSKTYLSKTLAQYTSKTCSNCGFTITSADYDRVLEKLKKTATGWMTTINGKELKVEGQITYYNRYKRQNVVKDLSVELDRLSEESVNNDISSWTKGRSGEALSLLKKRFSHRPVQEKFVCLNCGFETHADEQAALNIARSWLFLRSQEYKKYQTNKTTGNTDKRAFVETWQSFYRKKLKEVWKPAV

SEQ ID NO: 36483 - protein, 980 aa, synthetic construct
  REGION 1..980: note = engineered CasX variant
QEIKRINKIRRRLVKDSNTKKAGKTGPMKTLLVRVMTPDLRERLENLRKKPENIPQPISNTSRANLNKLLTDYTEMKKAILHVYWEEFQKDPVGLMSRVAQPASKKIDQNKLKPEMDEKGNLTTAGFACSQCGQPLFVYKLEQVSEKGKAYTNYFGRCNVAEHEKLILLAQLKPEKDSDEAVTYSLGKFGQRALDFYSIHVTKESTHPVKPLAQIAGNRYASSPVGKALSDACMGTIASFLSKYQDIIIEHQKVVKGNQKRLESLRELAGKENLEYPSVTLPPQPHTKEGVDAYNEVIARVRMWVNLNLWQKLKLSRDDAKPLLRLKGFPSFPLVERQQANEVDWWDMVCNVKKLINEKKEDGKVFWQNLAGYKRQEALRPYLSSEEDRKKGKKFARYQLGDLLLHLEKKHEGEDWGKVYDEAWERIDKKVEGLSKHIKLEEERRSEDAQSKAALTDWLRAKASFVIEGLKEADKDEFCRCELKLQKWYGDLRGKPFAIEAENSILDISGFSKQYNCAFIWQKDGVKKLNLYLIINYFKGGKLRFKKIKPEAFEANRFYTVINKKSGEIVPMEVNFNFDDPNLIILPLAFGKRQGREFIWNDLLSLETGSLKLANGRVIEKTLYNRRTRQDEPALFVALTFERREVLDSSNIKPMNLIGVDRGENIPAVIALTDPEGCPLSRFKDSLGNPTHILRIGESYKEKQRTIQAKKEVEQRRAGGYSRKYASKAKNLADDMVRNTARDLLYYAVTQDAMLIFENLSRGFGRQGKRTFMAERQYTRMEDWLTAKLAYEGLPSKTYLSKTLAQYTSKTCSNCGFTITSADYDRVLEKLKKTATGWMTTINGKELKVEGQITYYNRYKRQNVVKDLSVELDRLSEESVNNDISSWTKGRSGEALSLLKKRFSHRPVQEKFVCLNCGFETHADEQAALNIARSWLFLRSQEYKKYQTNKTTGNTDKRAFVETWQSFYRKKLKEVWKPAV

SEQ ID NO: 36484 - protein, 980 aa, synthetic construct
  REGION 1..980: note = engineered CasX variant
QEIKRINKIRRRLVKDSNTKKAGKTGPMKTLLVRVMTPDLRERLENLRKKPENIPQPISNTSRANLNKLLTDYTEMKKAILHVYWEEFQKDPVGLMSRVAQPASKKIDQNKLKPEMDEKGNLTTAGFACSQCGQPLFVYKLEQVSEKGKAYTNYFGRCNVAEHEKLILLAQLKPEKDSDEAVTYSLGKFGQRALDFYSIHVTKESTHPVKPLAQIAGNRYASTPVGKALSDACMGTIASFLSKYQDIIIEHQKVVKGNQKRLESLRELAGKENLEYPSVTLPPQPHTKEGVDAYNEVIARVRMWVNLNLWQKLKLSRDDAKPLLRLKGFPSFPLVERQQANEVDWWDMVCNVKKLINEKKEDGKVFWQNLAGYKRQEALRPYLSSEEDRKKGKKFARYQLGDLLLHLEKKHEGEDWGKVYDEAWERIDKKVEGLSKHIKLEEERRSEDAQSKAALTDWLRAKASFVIEGLKEADKDEFCRCELKLQKWYGDLRGKPFAIEAENSILDISGFSKQYNCAFIWQKDGVKKLNLYLIINYFKGGKLRFKKIKPEAFEANRFYTVINKKSGEIVPMEVNFNFDDPNLIILPLAFGKRQGREFIWNDLLSLETGSLKLANGRVIEKTLYNRRTRQDEPALFVALTFERREVLDSSNIKPMNLIGVDRGENIPAVIALTDPEGCPLSRFKDSLGNPTHILRIGESYKEKQRTIQAKKEVEQRRAGGYSRKYASKAKNLADDMVRNTARDLLYYAVTQDAMLIFENLSRGFGRQGKRTFMAERQYTRMEDWLTAKLAYEGLPSKTYLSKTLAQYTSKTCSNCGFTITSADYDRVLEKLKKTATGWMTTINGKELKVEGQITYYNRYKRQNVVKDLSVELDRLSEESVNNDISSWTKGRSGEALSLLKKRFSHRPVQEKFVCLNCGFETHADEQAALNIARSWLFLRSQEYKKYQTNKTTGNTDKRAFVETWQSFYRKKLKEVWKPAV

SEQ ID NO: 36485 - protein, 980 aa, synthetic construct
  REGION 1..980: note = engineered CasX variant
QEIKRINKIRRRLVKDSNTKKAGKTGPMKTLLVRVMTPDLRERLENLRKKPENIPQPISNTSRANLNKLLTDYTEMKKAILHVYWEEFQKDPVGLMSRVAQPASKKIDQNKLKPEMDEKGNLTTAGFACSQCGQPLFVYKLEQVSEKGKAYTNYFGRCNVAEHEKLILLAQLKPEKDSDEAVTYSLGKFGQRALDFYSIHVTKESTHPVKPLAQIAGNRYASAPVGKALSDACMGTIASFLSKYQDIIIEHQKVVKGNQKRLESLRELAGKENLEYPSVTLPPQPHTKEGVDAYNEVIARVRMWVNLNLWQKLKLSRDDAKPLLRLKGFPSFPLVERQQANEVDWWDMVCNVKKLINEKKEDGKVFWQNLAGYKRQEALRPYLSSEEDRKKGKKFARYQLGDLLLHLEKKHEGEDWGKVYDEAWERIDKKVEGLSKHIKLEEERRSEDAQSKAALTDWLRAKASFVIEGLKEADKDEFCRCELKLQKWYGDLRGKPFAIEAENSILDISGFSKQYNCAFIWQKDGVKKLNLYLIINYFKGGKLRFKKIKPEAFEANRFYTVINKKSGEIVPMEVNFNFDDPNLIILPLAFGKRQGREFIWNDLLSLETGSLKLANGRVIEKTLYNRRTRQDEPALFVALTFERREVLDSSNIKPMNLIGVDRGENIPAVIALTDPEGCPLSRFKDSLGNPTHILRIGESYKEKQRTIQAKKEVEQRRAGGYSRKYASKAKNLADDMVRNTARDLLYYAVTQDAMLIFENLSRGFGRQGKRTFMAERQYTRMEDWLTAKLAYEGLPSKTYLSKTLAQYTSKTCSNCGFTITSADYDRVLEKLKKTATGWMTTINGKELKVEGQITYYNRYKRQNVVKDLSVELDRLSEESVNNDISSWTKGRSGEALSLLKKRFSHRPVQEKFVCLNCGFETHADEQAALNIARSWLFLRSQEYKKYQTNKTTGNTDKRAFVETWQSFYRKKLKEVWKPAV

SEQ ID NO: 36486 - protein, 980 aa, synthetic construct
  REGION 1..980: note = engineered CasX variant
QEIKRINKIRRRLVKDSNTKKAGKTGPMKTLLVRVMTPDLRERLENLRKKPENIPQPISNTSRANLNKLLTDYTEMKKAILHVYWEEFQKDPVGLMSRVAQPASKKIDQNKLKPEMDEKGNLTTAGFACSQCGQPLFVYKLEQVSEKGKAYTNYFGRCNVAEHEKLILLAQLKPEKDSDEAVTYSLGKFGQRALDFYSIHVTKESTHPVKPLAQIAGNRYASVPVGKALSDACMGTIASFLSKYQDIIIEHQKVVKGNQKRLESLRELAGKENLEYPSVTLPPQPHTKEGVDAYNEVIARVRMWVNLNLWQKLKLSRDDAKPLLRLKGFPSFPLVERQQANEVDWWDMVCNVKKLINEKKEDGKVFWQNLAGYKRQEALRPYLSSEEDRKKGKKFARYQLGDLLLHLEKKHEGEDWGKVYDEAWERIDKKVEGLSKHIKLEEERRSEDAQSKAALTDWLRAKASFVIEGLKEADKDEFCRCELKLQKWYGDLRGKPFAIEAENSILDISGFSKQYNCAFIWQKDGVKKLNLYLIINYFKGGKLRFKKIKPEAFEANRFYTVINKKSGEIVPMEVNFNFDDPNLIILPLAFGKRQGREFIWNDLLSLETGSLKLANGRVIEKTLYNRRTRQDEPALFVALTFERREVLDSSNIKPMNLIGVDRGENIPAVIALTDPEGCPLSRFKDSLGNPTHILRIGESYKEKQRTIQAKKEVEQRRAGGYSRKYASKAKNLADDMVRNTARDLLYYAVTQDAMLIFENLSRGFGRQGKRTFMAERQYTRMEDWLTAKLAYEGLPSKTYLSKTLAQYTSKTCSNCGFTITSADYDRVLEKLKKTATGWMTTINGKELKVEGQITYYNRYKRQNVVKDLSVELDRLSEESVNNDISSWTKGRSGEALSLLKKRFSHRPVQEKFVCLNCGFETHADEQAALNIARSWLFLRSQEYKKYQTNKTTGNTDKRAFVETWQSFYRKKLKEVWKPAV

SEQ ID NO: 36487 - protein, 980 aa, synthetic construct
  REGION 1..980: note = engineered CasX variant
QEIKRINKIRRRLVKDSNTKKAGKTGPMKTLLVRVMTPDLRERLENLRKKPENIPQPISNTSRANLNKLLTDYTEMKKAILHVYWEEFQKDPVGLMSRVAQPASKKIDQNKLKPEMDEKGNLTTAGFACSQCGQPLFVYKLEQVSEKGKAYTNYFGRCNVAEHEKLIKLAQLKPEKDSDEAVTYSLGKFGQRALDFYSIHVTKESTHPVKPLAQIAGNRYASGPVGKALSDACMGTIASFLSKYQDIIIEHQKVVKGNQKRLESLRELAGKENLEYPSVTLPPQPHTKEGVDAYNEVIARVRMWVNLNLWQKLKLSRDDAKPLLRLKGFPSFPLVERQQANEVDWWDMVCNVKKLINEKKEDGKVFWQNLAGYKRQEALRPYLSSEEDRKKGKKFARYQLGDLLLHLEKKHEGEDWGKVYDEAWERIDKKVEGLSKHIKLEEERRSEDAQSKAALTDWLRAKASFVIEGLKEADKDEFCRCELKLQKWYGDLRGKPFAIEAENSILDISGFSKQYNCAFIWQKDGVKKLNLYLIINYFKGGKLRFKKIKPEAFEANRFYTVINKKSGEIVPMEVNFNFDDPNLIILPLAFGKRQGREFIWNDLLSLETGSLKLANGRVIEKTLYNRRTRQDEPALFVALTFERREVLDSSNIKPMNLIGVDRGENIPAVIALTDPEGCPLSRFKDSLGNPTHILRIGESYKEKQRTIQAKKEVEQRRAGGYSRKYASKAKNLADDMVRNTARDLLYYAVTQDAMLIFENLSRGFGRQGKRTFMAERQYTRMEDWLTAKLAYEGLPSKTYLSKTLAQYTSKTCSNCGFTITSADYDRVLEKLKKTATGWMTTINGKELKVEGQITYYNRYKRQNVVKDLSVELDRLSEESVNNDISSWTKGRSGEALSLLKKRFSHRPVQEKFVCLNCGFETHADEQAALNIARSWLFLRSQEYKKYQTNKTTGNTDKRAFVETWQSFYRKKLKEVWKPAV

SEQ ID NO: 36488 - protein, 979 aa, synthetic construct
  REGION 1..979: note = engineered CasX variant
QEIKRINKIRRRLVKDSNTKKAGKTGPMKTLLVRVMTPDLRERLENLRKKPENIPQPISNTSRANLNKLLTDYTEMKKAILHVYWEEFQKDPVGLMSRVAQPASKKIDQNKLKPEMDEKGNLTTAGFACSQCGQPLFVYKLEQVSEKGKAYTNYFGRCNVAEHEKLILLAQLKPEKDSDEAVTYSLGKFGQRALDFYSIHVTKESTHPVKPLAQIAGNRYASPVGKALSDACMGTIASFLSKYQDIIIEHQKVVKGNQKRLESLRELAGKENLEYPSVTLPPQPHTKEGVDAYNEVIARVRMWVNLNLWQKLKLSRDDAKPLLRLKGFPSFPLVERQQANEVDWWDMVCNVKKLINEKKEDGKVFWQNLAGYKRQEALRPYLSSEEDRKKGKKFARYQLGDLLLHLEKKHEGEDWGKVYDEAWERIDKKVEGLSKHIKLEEERRSEDAQSKAALTDWLRAKASFVIEGLKEADKDEFCRCELKLQKWYGDLRGKPFAIEAENSILDISGFSKQYNCAFIWQKDGVKKLNLYLIINYFKGGKLRFKKIKPEAFEANRFYTVINKKSGEIVPMEVNFNFDDPNLIILPLAFGKRQGREFIWNDLLSLETGSLKLANGRVIEKTLYNRRTRQDEPALFVALTFERREVLDSSNIKPMNLIGVDRGENIPAVIALTDPEGCPLSRFKDSLGNPTHILRIGESYKEKQRTIQAKKEVEQRRAGGYSRKYASKAKNLADDMVRNTARDLLYYAVTQDAMLIFENLSRGFGRQGKRTFMAERQYTRMEDWLTAKLAYEGLPSKTYLSKTLAQYTSKTCSNCGFTITSADYDRVLEKLKKTATGWMTTINGKELKVEGQITYYNRYKRQNVVKDLSVELDRLSEESVNNDISSWTKGRSGEALSLLKKRFSHRPVQEKFVCLNCGFETHADEQAALNIARSWLFLRSQEYKKYQTNKTTGNTDKRAFVETWQSFYRKKLKEVWKPAV

SEQ ID NO: 36489 - protein, 979 aa, synthetic construct
  REGION 1..979: note = engineered CasX variant
QEIKRINKIRRRLVKDSNTKKAGKTGPMKTLLVRVMTPDLRERLENLRKKPENIPQPISNTSRANLNKLLTDYTEMKKAILHVYWEEFQKDPVGLMSRVAQPASKKIDQNKLKPEMDEKGNLTTAGFACSQCGQPLFVYKLEQVSEKGKAYTNYFGRCNVAEHEKLILLAQLKPEKDSDEAVTYSLGKFGQRALDFYSIHVTKESTHPVKPLAQIAGNRYASYPVGKALSDACMGTIASFLSKYQDIIIEHQKVVKGNQKRLESLRELAGKENLEYPSVTLPPQPHTKEGVDAYNEVIARVRMWVNLNLWQKLKLSRDDAKPLLRLKGFPSFPLVERQQANEVDWWDMVCNVKKLINEKKEDGKVFWQNLAGYKRQEALRPYLSSEEDRKKGKKFARYQLGDLLLHLEKKHGEDWGKVYDEAWERIDKKVEGLSKHIKLEEERRSEDAQSKAALTDWLRAKASFVIEGLKEADKDEFCRCDLKLQKWYGDLRGKPFAIEAENSILDISGFSKQYNCAFIWQKDGVKKLNLYLIINYFKGGKLRFKKIKPEAFEANRFYTVINKKSGEIVPMEVNFNFDDPNLIILPLAFGKRQGREFIWNDLLSLETGSLKLANGRVIEKTLYNRRTRQDEPALFVALTFERREVLDSSNIKPMNLIGVDRGENIPAVIALTDPEGCPLSRFKDSLGNPTHILRIGESYKEKQRTIQAKKEVEQRRAGGYSRKYASKAKNLADDMVRNTARDLLYYAVTQDAMLIFENLSRGFGRQGKRTFMAERQYTRMEDWLTAKLAYEGLPSKTYLSKTLAQYTSKTCSNCGFTITSADYDRVLEKLKKTATGWMTTINGKELKVEGQITYYNRYKRQNVVKDLSVELDRLSEESVNNDISSWTKGRSGEALSLLKKRFSHRPVQEKFVCLNCGFETHADEQAALNIARSWLFLRSQEYKKYQTNKTTGNTDKRAFVETWQSFYRKKLKEVWKPAV

SEQ ID NO: 36490 - protein, 979 aa, synthetic construct
  REGION 1..979: note = engineered CasX variant
QEIKRINKIRRRLVKDSNTKKAGKTGPMKTLLVRVMTPDLRERLENLRKKPENIPQPISNTSRANLNKLLTDYTEMKKAILHVYWEEFQKDPVGLMSRVAQPASKKIDQNKLKPEMDEKGNLTTAGFACSQCGQPLFVYKLEQVSEKGKAYTNYFGRCNVAEHEKLILLAQLKPEKDSDEAVTYSLGKFGQRALDFYSIHVTKESTHPVKPLAQIAGNRYASHPVGKALSDACMGTIASFLSKYQDIIIEHQKVVKGNQKRLESLRELAGKENLEYPSVTLPPQPHTKEGVDAYNEVIARVRMWVNLNLWQKLKLSRDDAKPLLRLKGFPSFPLVERQQANEVDWWDMVCNVKKLINEKKEDGKVFWQNLAGYKRQEALRPYLSSEEDRKKGKKFARYQLGDLLLHLEKKHGEDWGKVYDEAWERIDKKVEGLSKHIKLEEERRSEDAQSKAALTDWLRAKASFVIEGLKEADKDEFCRCDLKLQKWYGDLRGKPFAIEAENSILDISGFSKQYNCAFIWQKDGVKKLNLYLIINYFKGGKLRFKKIKPEAFEANRFYTVINKKSGEIVPMEVNFNFDDPNLIILPLAFGKRQGREFIWNDLLSLETGSLKLANGRVIEKTLYNRRTRQDEPALFVALTFERREVLDSSNIKPMNLIGVDRGENIPAVIALTDPEGCPLSRFKDSLGNPTHILRIGESYKEKQRTIQAKKEVEQRRAGGYSRKYASKAKNLADDMVRNTARDLLYYAVTQDAMLIFENLSRGFGRQGKRTFMAERQYTRMEDWLTAKLAYEGLPSKTYLSKTLAQYTSKTCSNCGFTITSADYDRVLEKLKKTATGWMTTINGKELKVEGQITYYNRYKRQNVVKDLSVELDRLSEESVNNDISSWTKGRSGEALSLLKKRFSHRPVQEKFVCLNCGFETHADEQAALNIARSWLFLRSQEYKKYQTNKTTGNTDKRAFVETWQSFYRKKLKEVWKPAV

SEQ ID NO: 36491 - protein, 979 aa, synthetic construct
  REGION 1..979: note = engineered CasX variant
QEIKRINKIRRRLVKDSNTKKAGKTGPMKTLLVRVMTPDLRERLENLRKKPENIPQPISNTSRANLNKLLTDYTEMKKAILHVYWEEFQKDPVGLMSRVAQPASKKIDQNKLKPEMDEKGNLTTAGFACSQCGQPLFVYKLEQVSEKGKAYTNYFGRCNVAEHEKLILLAQLKPEKDSDEAVTYSLGKFGQRALDFYSIHVTKESTHPVKPLAQIAGNRYASSPVGKALSDACMGTIASFLSKYQDIIIEHQKVVKGNQKRLESLRELAGKENLEYPSVTLPPQPHTKEGVDAYNEVIARVRMWVNLNLWQKLKLSRDDAKPLLRLKGFPSFPLVERQQANEVDWWDMVCNVKKLINEKKEDGKVFWQNLAGYKRQEALRPYLSSEEDRKKGKKFARYQLGDLLLHLEKKHGEDWGKVYDEAWERIDKKVEGLSKHIKLEEERRSEDAQSKAALTDWLRAKASFVIEGLKEADKDEFCRCDLKLQKWYGDLRGKPFAIEAENSILDISGFSKQYNCAFIWQKDGVKKLNLYLIINYFKGGKLRFKKIKPEAFEANRFYTVINKKSGEIVPMEVNFNFDDPNLIILPLAFGKRQGREFIWNDLLSLETGSLKLANGRVIEKTLYNRRTRQDEPALFVALTFERREVLDSSNIKPMNLIGVDRGENIPAVIALTDPEGCPLSRFKDSLGNPTHILRIGESYKEKQRTIQAKKEVEQRRAGGYSRKYASKAKNLADDMVRNTARDLLYYAVTQDAMLIFENLSRGFGRQGKRTFMAERQYTRMEDWLTAKLAYEGLPSKTYLSKTLAQYTSKTCSNCGFTITSADYDRVLEKLKKTATGWMTTINGKELKVEGQITYYNRYKRQNVVKDLSVELDRLSEESVNNDISSWTKGRSGEALSLLKKRFSHRPVQEKFVCLNCGFETHADEQAALNIARSWLFLRSQEYKKYQTNKTTGNTDKRAFVETWQSFYRKKLKEVWKPAV

SEQ ID NO: 36492 - protein, 979 aa, synthetic construct
  REGION 1..979: note = engineered CasX variant
QEIKRINKIRRRLVKDSNTKKAGKTGPMKTLLVRVMTPDLRERLENLRKKPENIPQPISNTSRANLNKLLTDYTEMKKAILHVYWEEFQKDPVGLMSRVAQPASKKIDQNKLKPEMDEKGNLTTAGFACSQCGQPLFVYKLEQVSEKGKAYTNYFGRCNVAEHEKLILLAQLKPEKDSDEAVTYSLGKFGQRALDFYSIHVTKESTHPVKPLAQIAGNRYASTPVGKALSDACMGTIASFLSKYQDIIIEHQKVVKGNQKRLESLRELAGKENLEYPSVTLPPQPHTKEGVDAYNEVIARVRMWVNLNLWQKLKLSRDDAKPLLRLKGFPSFPLVERQQANEVDWWDMVCNVKKLINEKKEDGKVFWQNLAGYKRQEALRPYLSSEEDRKKGKKFARYQLGDLLLHLEKKHGEDWGKVYDEAWERIDKKVEGLSKHIKLEEERRSEDAQSKAALTDWLRAKASFVIEGLKEADKDEFCRCDLKLQKWYGDLRGKPFAIEAENSILDISGFSKQYNCAFIWQKDGVKKLNLYLIINYFKGGKLRFKKIKPEAFEANRFYTVINKKSGEIVPMEVNFNFDDPNLIILPLAFGKRQGREFIWNDLLSLETGSLKLANGRVIEKTLYNRRTRQDEPALFVALTFERREVLDSSNIKPMNLIGVDRGENIPAVIALTDPEGCPLSRFKDSLGNPTHILRIGESYKEKQRTIQAKKEVEQRRAGGYSRKYASKAKNLADDMVRNTARDLLYYAVTQDAMLIFENLSRGFGRQGKRTFMAERQYTRMEDWLTAKLAYEGLPSKTYLSKTLAQYTSKTCSNCGFTITSADYDRVLEKLKKTATGWMTTINGKELKVEGQITYYNRYKRQNVVKDLSVELDRLSEESVNNDISSWTKGRSGEALSLLKKRFSHRPVQEKFVCLNCGFETHADEQAALNIARSWLFLRSQEYKKYQTNKTTGNTDKRAFVETWQSFYRKKLKEVWKPAV

SEQ ID NO: 36493 - protein, 979 aa, synthetic construct
  REGION 1..979: note = engineered CasX variant
QEIKRINKIRRRLVKDSNTKKAGKTGPMKTLLVRVMTPDLRERLENLRKKPENIPQPISNTSRANLNKLLTDYTEMKKAILHVYWEEFQKDPVGLMSRVAQPASKKIDQNKLKPEMDEKGNLTTAGFACSQCGQPLFVYKLEQVSEKGKAYTNYFGRCNVAEHEKLILLAQLKPEKDSDEAVTYSLGKFGQRALDFYSIHVTKESTHPVKPLAQIAGNRYASAPVGKALSDACMGTIASFLSKYQDIIIEHQKVVKGNQKRLESLRELAGKENLEYPSVTLPPQPHTKEGVDAYNEVIARVRMWVNLNLWQKLKLSRDDAKPLLRLKGFPSFPLVERQQANEVDWWDMVCNVKKLINEKKEDGKVFWQNLAGYKRQEALRPYLSSEEDRKKGKKFARYQLGDLLLHLEKKHGEDWGKVYDEAWERIDKKVEGLSKHIKLEEERRSEDAQSKAALTDWLRAKASFVIEGLKEADKDEFCRCDLKLQKWYGDLRGKPFAIEAENSILDISGFSKQYNCAFIWQKDGVKKLNLYLIINYFKGGKLRFKKIKPEAFEANRFYTVINKKSGEIVPMEVNFNFDDPNLIILPLAFGKRQGREFIWNDLLSLETGSLKLANGRVIEKTLYNRRTRQDEPALFVALTFERREVLDSSNIKPMNLIGVDRGENIPAVIALTDPEGCPLSRFKDSLGNPTHILRIGESYKEKQRTIQAKKEVEQRRAGGYSRKYASKAKNLADDMVRNTARDLLYYAVTQDAMLIFENLSRGFGRQGKRTFMAERQYTRMEDWLTAKLAYEGLPSKTYLSKTLAQYTSKTCSNCGFTITSADYDRVLEKLKKTATGWMTTINGKELKVEGQITYYNRYKRQNVVKDLSVELDRLSEESVNNDISSWTKGRSGEALSLLKKRFSHRPVQEKFVCLNCGFETHADEQAALNIARSWLFLRSQEYKKYQTNKTTGNTDKRAFVETWQSFYRKKLKEVWKPAV

SEQ ID NO: 36494 - protein, 979 aa, synthetic construct
  REGION 1..979: note = engineered CasX variant
QEIKRINKIRRRLVKDSNTKKAGKTGPMKTLLVRVMTPDLRERLENLRKKPENIPQPISNTSRANLNKLLTDYTEMKKAILHVYWEEFQKDPVGLMSRVAQPASKKIDQNKLKPEMDEKGNLTTAGFACSQCGQPLFVYKLEQVSEKGKAYTNYFGRCNVAEHEKLILLAQLKPEKDSDEAVTYSLGKFGQRALDFYSIHVTKESTHPVKPLAQIAGNRYASVPVGKALSDACMGTIASFLSKYQDIIIEHQKVVKGNQKRLESLRELAGKENLEYPSVTLPPQPHTKEGVDAYNEVIARVRMWVNLNLWQKLKLSRDDAKPLLRLKGFPSFPLVERQQANEVDWWDMVCNVKKLINEKKEDGKVFWQNLAGYKRQEALRPYLSSEEDRKKGKKFARYQLGDLLLHLEKKHGEDWGKVYDEAWERIDKKVEGLSKHIKLEEERRSEDAQSKAALTDWLRAKASFVIEGLKEADKDEFCRCDLKLQKWYGDLRGKPFAIEAENSILDISGFSKQYNCAFIWQKDGVKKLNLYLIINYFKGGKLRFKKIKPEAFEANRFYTVINKKSGEIVPMEVNFNFDDPNLIILPLAFGKRQGREFIWNDLLSLETGSLKLANGRVIEKTLYNRRTRQDEPALFVALTFERREVLDSSNIKPMNLIGVDRGENIPAVIALTDPEGCPLSRFKDSLGNPTHILRIGESYKEKQRTIQAKKEVEQRRAGGYSRKYASKAKNLADDMVRNTARDLLYYAVTQDAMLIFENLSRGFGRQGKRTFMAERQYTRMEDWLTAKLAYEGLPSKTYLSKTLAQYTSKTCSNCGFTITSADYDRVLEKLKKTATGWMTTINGKELKVEGQITYYNRYKRQNVVKDLSVELDRLSEESVNNDISSWTKGRSGEALSLLKKRFSHRPVQEKFVCLNCGFETHADEQAALNIARSWLFLRSQEYKKYQTNKTTGNTDKRAFVETWQSFYRKKLKEVWKPAV

SEQ ID NO: 36495 - protein, 979 aa, synthetic construct
  REGION 1..979: note = engineered CasX variant
QEIKRINKIRRRLVKDSNTKKAGKTGPMKTLLVRVMTPDLRERLENLRKKPENIPQPISNTSRANLNKLLTDYTEMKKAILHVYWEEFQKDPVGLMSRVAQPASKKIDQNKLKPEMDEKGNLTTAGFACSQCGQPLFVYKLEQVSEKGKAYTNYFGRCNVAEHEKLIKLAQLKPEKDSDEAVTYSLGKFGQRALDFYSIHVTKESTHPVKPLAQIAGNRYASGPVGKALSDACMGTIASFLSKYQDIIIEHQKVVKGNQKRLESLRELAGKENLEYPSVTLPPQPHTKEGVDAYNEVIARVRMWVNLNLWQKLKLSRDDAKPLLRLKGFPSFPLVERQQANEVDWWDMVCNVKKLINEKKEDGKVFWQNLAGYKRQEALRPYLSSEEDRKKGKKFARYQLGDLLLHLEKKHGEDWGKVYDEAWERIDKKVEGLSKHIKLEEERRSEDAQSKAALTDWLRAKASFVIEGLKEADKDEFCRCDLKLQKWYGDLRGKPFAIEAENSILDISGFSKQYNCAFIWQKDGVKKLNLYLIINYFKGGKLRFKKIKPEAFEANRFYTVINKKSGEIVPMEVNFNFDDPNLIILPLAFGKRQGREFIWNDLLSLETGSLKLANGRVIEKTLYNRRTRQDEPALFVALTFERREVLDSSNIKPMNLIGVDRGENIPAVIALTDPEGCPLSRFKDSLGNPTHILRIGESYKEKQRTIQAKKEVEQRRAGGYSRKYASKAKNLADDMVRNTARDLLYYAVTQDAMLIFENLSRGFGRQGKRTFMAERQYTRMEDWLTAKLAYEGLPSKTYLSKTLAQYTSKTCSNCGFTITSADYDRVLEKLKKTATGWMTTINGKELKVEGQITYYNRYKRQNVVKDLSVELDRLSEESVNNDISSWTKGRSGEALSLLKKRFSHRPVQEKFVCLNCGFETHADEQAALNIARSWLFLRSQEYKKYQTNKTTGNTDKRAFVETWQSFYRKKLKEVWKPAV

SEQ ID NO: 36496 - protein, 978 aa, synthetic construct
  REGION 1..978: note = engineered CasX variant
QEIKRINKIRRRLVKDSNTKKAGKTGPMKTLLVRVMTPDLRERLENLRKKPENIPQPISNTSRANLNKLLTDYTEMKKAILHVYWEEFQKDPVGLMSRVAQPASKKIDQNKLKPEMDEKGNLTTAGFACSQCGQPLFVYKLEQVSEKGKAYTNYFGRCNVAEHEKLILLAQLKPEKDSDEAVTYSLGKFGQRALDFYSIHVTKESTHPVKPLAQIAGNRYASPVGKALSDACMGTIASFLSKYQDIIIEHQKVVKGNQKRLESLRELAGKENLEYPSVTLPPQPHTKEGVDAYNEVIARVRMWVNLNLWQKLKLSRDDAKPLLRLKGFPSFPLVERQQANEVDWWDMVCNVKKLINEKKEDGKVFWQNLAGYKRQEALRPYLSSEEDRKKGKKFARYQLGDLLLHLEKKHGEDWGKVYDEAWERIDKKVEGLSKHIKLEEERRSEDAQSKAALTDWLRAKASFVIEGLKEADKDEFCRCDLKLQKWYGDLRGKPFAIEAENSILDISGFSKQYNCAFIWQKDGVKKLNLYLIINYFKGGKLRFKKIKPEAFEANRFYTVINKKSGEIVPMEVNFNFDDPNLIILPLAFGKRQGREFIWNDLLSLETGSLKLANGRVIEKTLYNRRTRQDEPALFVALTFERREVLDSSNIKPMNLIGVDRGENIPAVIALTDPEGCPLSRFKDSLGNPTHILRIGESYKEKQRTIQAKKEVEQRRAGGYSRKYASKAKNLADDMVRNTARDLLYYAVTQDAMLIFENLSRGFGRQGKRTFMAERQYTRMEDWLTAKLAYEGLPSKTYLSKTLAQYTSKTCSNCGFTITSADYDRVLEKLKKTATGWMTTINGKELKVEGQITYYNRYKRQNVVKDLSVELDRLSEESVNNDISSWTKGRSGEALSLLKKRFSHRPVQEKFVCLNCGFETHADEQAALNIARSWLFLRSQEYKKYQTNKTTGNTDKRAFVETWQSFYRKKLKEVWKPAV

SEQ ID NO: 36497 - protein, 979 aa, synthetic construct
  REGION 1..979: note = engineered CasX variant
QEIKRINKIRRRLVKDSNTKKAGKTGPMKTLLVRVMTPDLRERLENLRKKPENIPQPISNTSRANLNKLLTDYTEMKKAILHVYWEEFQKDPVGLMSRVAQPASKKIDQNKLKPEMDEKGNLTTAGFACSQCGQPLFVYKLEQVSEKGKAYTNYFGRCNVAEHEKLILLAQLKPEKDSDEAVTYSLGKFGQRALDFYSIHVTKESTHPVKPLAQIAGNRYASYPVGKALSDACMGTIASFLSKYQDIIIEHQKVVKGNQKRLESLRELAGKENLEYPSVTLPPQPHTKEGVDAYNEVIARVRMWVNLNLWQKLKLSRDDAKPLLRLKGFPSFPLVERQQANEVDWWDMVCNVKKLINEKKEDGKVFWQNLAGYKRQEALRPYLSSEEDRKKGKKFARYQLGDLLLHLEKKHGEDWGKVYDEAWERIDKKVEGLSKHIKLEEERRSEDAQSKAALTDWLRAKASFVIEGLKEADKDEFCRCELKLQKWYGDLRGKPFAIEAENSILDISGFSKQYNCAFIWQKDGVKKLNLYLIINYFKGGKLRFKKIKPEAFEANRFYTVINKKSGEIVPMEVNFNFDDPNLIILPLAFGKRFGREFIWNDLLSLETGSLKLANGRVIEKTLYNRRTRQDEPALFVALTFERREVLDSSNIKPMNLIGVDRGENIPAVIALTDPEGCPLSRFKDSLGNPTHILRIGESYKEKQRTIQAKKEVEQRRAGGYSRKYASKAKNLADDMVRNTARDLLYYAVTQDAMLIFENLSRGFGRQGKRTFMAERQYTRMEDWLTAKLAYEGLPSKTYLSKTLAQYTSKTCSNCGFTITSADYDRVLEKLKKTATGWMTTINGKELKVEGQITYYNRYKRQNVVKDLSVELDRLSEESVNNDISSWTKGRSGEALSLLKKRFSHRPVQEKFVCLNCGFETHADEQAALNIARSWLFLRSQEYKKYQTNKTTGNTDKRAFVETWQSFYRKKLKEVWKPAV

SEQ ID NO: 36498 - protein, 979 aa, synthetic construct
  REGION 1..979: note = engineered CasX variant
QEIKRINKIRRRLVKDSNTKKAGKTGPMKTLLVRVMTPDLRERLENLRKKPENIPQPISNTSRANLNKLLTDYTEMKKAILHVYWEEFQKDPVGLMSRVAQPASKKIDQNKLKPEMDEKGNLTTAGFACSQCGQPLFVYKLEQVSEKGKAYTNYFGRCNVAEHEKLILLAQLKPEKDSDEAVTYSLGKFGQRALDFYSIHVTKESTHPVKPLAQIAGNRYASHPVGKALSDACMGTIASFLSKYQDIIIEHQKVVKGNQKRLESLRELAGKENLEYPSVTLPPQPHTKEGVDAYNEVIARVRMWVNLNLWQKLKLSRDDAKPLLRLKGFPSFPLVERQQANEVDWWDMVCNVKKLINEKKEDGKVFWQNLAGYKRQEALRPYLSSEEDRKKGKKFARYQLGDLLLHLEKKHGEDWGKVYDEAWERIDKKVEGLSKHIKLEEERRSEDAQSKAALTDWLRAKASFVIEGLKEADKDEFCRCELKLQKWYGDLRGKPFAIEAENSILDISGFSKQYNCAFIWQKDGVKKLNLYLIINYFKGGKLRFKKIKPEAFEANRFYTVINKKSGEIVPMEVNFNFDDPNLIILPLAFGKRFGREFIWNDLLSLETGSLKLANGRVIEKTLYNRRTRQDEPALFVALTFERREVLDSSNIKPMNLIGVDRGENIPAVIALTDPEGCPLSRFKDSLGNPTHILRIGESYKEKQRTIQAKKEVEQRRAGGYSRKYASKAKNLADDMVRNTARDLLYYAVTQDAMLIFENLSRGFGRQGKRTFMAERQYTRMEDWLTAKLAYEGLPSKTYLSKTLAQYTSKTCSNCGFTITSADYDRVLEKLKKTATGWMTTINGKELKVEGQITYYNRYKRQNVVKDLSVELDRLSEESVNNDISSWTKGRSGEALSLLKKRFSHRPVQEKFVCLNCGFETHADEQAALNIARSWLFLRSQEYKKYQTNKTTGNTDKRAFVETWQSFYRKKLKEVWKPAV

SEQ ID NO: 36499 - protein, 979 aa, synthetic construct
  REGION 1..979: note = engineered CasX variant
QEIKRINKIRRRLVKDSNTKKAGKTGPMKTLLVRVMTPDLRERLENLRKKPENIPQPISNTSRANLNKLLTDYTEMKKAILHVYWEEFQKDPVGLMSRVAQPASKKIDQNKLKPEMDEKGNLTTAGFACSQCGQPLFVYKLEQVSEKGKAYTNYFGRCNVAEHEKLILLAQLKPEKDSDEAVTYSLGKFGQRALDFYSIHVTKESTHPVKPLAQIAGNRYASSPVGKALSDACMGTIASFLSKYQDIIIEHQKVVKGNQKRLESLRELAGKENLEYPSVTLPPQPHTKEGVDAYNEVIARVRMWVNLNLWQKLKLSRDDAKPLLRLKGFPSFPLVERQQANEVDWWDMVCNVKKLINEKKEDGKVFWQNLAGYKRQEALRPYLSSEEDRKKGKKFARYQLGDLLLHLEKKHGEDWGKVYDEAWERIDKKVEGLSKHIKLEEERRSEDAQSKAALTDWLRAKASFVIEGLKEADKDEFCRCELKLQKWYGDLRGKPFAIEAENSILDISGFSKQYNCAFIWQKDGVKKLNLYLIINYFKGGKLRFKKIKPEAFEANRFYTVINKKSGEIVPMEVNFNFDDPNLIILPLAFGKRFGREFIWNDLLSLETGSLKLANGRVIEKTLYNRRTRQDEPALFVALTFERREVLDSSNIKPMNLIGVDRGENIPAVIALTDPEGCPLSRFKDSLGNPTHILRIGESYKEKQRTIQAKKEVEQRRAGGYSRKYASKAKNLADDMVRNTARDLLYYAVTQDAMLIFENLSRGFGRQGKRTFMAERQYTRMEDWLTAKLAYEGLPSKTYLSKTLAQYTSKTCSNCGFTITSADYDRVLEKLKKTATGWMTTINGKELKVEGQITYYNRYKRQNVVKDLSVELDRLSEESVNNDISSWTKGRSGEALSLLKKRFSHRPVQEKFVCLNCGFETHADEQAALNIARSWLFLRSQEYKKYQTNKTTGNTDKRAFVETWQSFYRKKLKEVWKPAV

SEQ ID NO: 36500 - protein, 979 aa, synthetic construct
  REGION 1..979: note = engineered CasX variant
QEIKRINKIRRRLVKDSNTKKAGKTGPMKTLLVRVMTPDLRERLENLRKKPENIPQPISNTSRANLNKLLTDYTEMKKAILHVYWEEFQKDPVGLMSRVAQPASKKIDQNKLKPEMDEKGNLTTAGFACSQCGQPLFVYKLEQVSEKGKAYTNYFGRCNVAEHEKLILLAQLKPEKDSDEAVTYSLGKFGQRALDFYSIHVTKESTHPVKPLAQIAGNRYASTPVGKALSDACMGTIASFLSKYQDIIIEHQKVVKGNQKRLESLRELAGKENLEYPSVTLPPQPHTKEGVDAYNEVIARVRMWVNLNLWQKLKLSRDDAKPLLRLKGFPSFPLVERQQANEVDWWDMVCNVKKLINEKKEDGKVFWQNLAGYKRQEALRPYLSSEEDRKKGKKFARYQLGDLLLHLEKKHGEDWGKVYDEAWERIDKKVEGLSKHIKLEEERRSEDAQSKAALTDWLRAKASFVIEGLKEADKDEFCRCELKLQKWYGDLRGKPFAIEAENSILDISGFSKQYNCAFIWQKDGVKKLNLYLIINYFKGGKLRFKKIKPEAFEANRFYTVINKKSGEIVPMEVNFNFDDPNLIILPLAFGKRFGREFIWNDLLSLETGSLKLANGRVIEKTLYNRRTRQDEPALFVALTFERREVLDSSNIKPMNLIGVDRGENIPAVIALTDPEGCPLSRFKDSLGNPTHILRIGESYKEKQRTIQAKKEVEQRRAGGYSRKYASKAKNLADDMVRNTARDLLYYAVTQDAMLIFENLSRGFGRQGKRTFMAERQYTRMEDWLTAKLAYEGLPSKTYLSKTLAQYTSKTCSNCGFTITSADYDRVLEKLKKTATGWMTTINGKELKVEGQITYYNRYKRQNVVKDLSVELDRLSEESVNNDISSWTKGRSGEALSLLKKRFSHRPVQEKFVCLNCGFETHADEQAALNIARSWLFLRSQEYKKYQTNKTTGNTDKRAFVETWQSFYRKKLKEVWKPAV

SEQ ID NO: 36501 - protein, 979 aa, synthetic construct
  REGION 1..979: note = engineered CasX variant
QEIKRINKIRRRLVKDSNTKKAGKTGPMKTLLVRVMTPDLRERLENLRKKPENIPQPISNTSRANLNKLLTDYTEMKKAILHVYWEEFQKDPVGLMSRVAQPASKKIDQNKLKPEMDEKGNLTTAGFACSQCGQPLFVYKLEQVSEKGKAYTNYFGRCNVAEHEKLILLAQLKPEKDSDEAVTYSLGKFGQRALDFYSIHVTKESTHPVKPLAQIAGNRYASAPVGKALSDACMGTIASFLSKYQDIIIEHQKVVKGNQKRLESLRELAGKENLEYPSVTLPPQPHTKEGVDAYNEVIARVRMWVNLNLWQKLKLSRDDAKPLLRLKGFPSFPLVERQQANEVDWWDMVCNVKKLINEKKEDGKVFWQNLAGYKRQEALRPYLSSEEDRKKGKKFARYQLGDLLLHLEKKHGEDWGKVYDEAWERIDKKVEGLSKHIKLEEERRSEDAQSKAALTDWLRAKASFVIEGLKEADKDEFCRCELKLQKWYGDLRGKPFAIEAENSILDISGFSKQYNCAFIWQKDGVKKLNLYLIINYFKGGKLRFKKIKPEAFEANRFYTVINKKSGEIVPMEVNFNFDDPNLIILPLAFGKRFGREFIWNDLLSLETGSLKLANGRVIEKTLYNRRTRQDEPALFVALTFERREVLDSSNIKPMNLIGVDRGENIPAVIALTDPEGCPLSRFKDSLGNPTHILRIGESYKEKQRTIQAKKEVEQRRAGGYSRKYASKAKNLADDMVRNTARDLLYYAVTQDAMLIFENLSRGFGRQGKRTFMAERQYTRMEDWLTAKLAYEGLPSKTYLSKTLAQYTSKTCSNCGFTITSADYDRVLEKLKKTATGWMTTINGKELKVEGQITYYNRYKRQNVVKDLSVELDRLSEESVNNDISSWTKGRSGEALSLLKKRFSHRPVQEKFVCLNCGFETHADEQAALNIARSWLFLRSQEYKKYQTNKTTGNTDKRAFVETWQSFYRKKLKEVWKPAV

SEQ ID NO: 36502 - protein, 979 aa, synthetic construct
  REGION 1..979: note = engineered CasX variant
QEIKRINKIRRRLVKDSNTKKAGKTGPMKTLLVRVMTPDLRERLENLRKKPENIPQPISNTSRANLNKLLTDYTEMKKAILHVYWEEFQKDPVGLMSRVAQPASKKIDQNKLKPEMDEKGNLTTAGFACSQCGQPLFVYKLEQVSEKGKAYTNYFGRCNVAEHEKLILLAQLKPEKDSDEAVTYSLGKFGQRALDFYSIHVTKESTHPVKPLAQIAGNRYASVPVGKALSDACMGTIASFLSKYQDIIIEHQKVVKGNQKRLESLRELAGKENLEYPSVTLPPQPHTKEGVDAYNEVIARVRMWVNLNLWQKLKLSRDDAKPLLRLKGFPSFPLVERQQANEVDWWDMVCNVKKLINEKKEDGKVFWQNLAGYKRQEALRPYLSSEEDRKKGKKFARYQLGDLLLHLEKKHGEDWGKVYDEAWERIDKKVEGLSKHIKLEEERRSEDAQSKAALTDWLRAKASFVIEGLKEADKDEFCRCELKLQKWYGDLRGKPFAIEAENSILDISGFSKQYNCAFIWQKDGVKKLNLYLIINYFKGGKLRFKKIKPEAFEANRFYTVINKKSGEIVPMEVNFNFDDPNLIILPLAFGKRFGREFIWNDLLSLETGSLKLANGRVIEKTLYNRRTRQDEPALFVALTFERREVLDSSNIKPMNLIGVDRGENIPAVIALTDPEGCPLSRFKDSLGNPTHILRIGESYKEKQRTIQAKKEVEQRRAGGYSRKYASKAKNLADDMVRNTARDLLYYAVTQDAMLIFENLSRGFGRQGKRTFMAERQYTRMEDWLTAKLAYEGLPSKTYLSKTLAQYTSKTCSNCGFTITSADYDRVLEKLKKTATGWMTTINGKELKVEGQITYYNRYKRQNVVKDLSVELDRLSEESVNNDISSWTKGRSGEALSLLKKRFSHRPVQEKFVCLNCGFETHADEQAALNIARSWLFLRSQEYKKYQTNKTTGNTDKRAFVETWQSFYRKKLKEVWKPAV

SEQ ID NO: 36503 - protein, 979 aa, synthetic construct
  REGION 1..979: note = engineered CasX variant
QEIKRINKIRRRLVKDSNTKKAGKTGPMKTLLVRVMTPDLRERLENLRKKPENIPQPISNTSRANLNKLLTDYTEMKKAILHVYWEEFQKDPVGLMSRVAQPASKKIDQNKLKPEMDEKGNLTTAGFACSQCGQPLFVYKLEQVSEKGKAYTNYFGRCNVAEHEKLIKLAQLKPEKDSDEAVTYSLGKFGQRALDFYSIHVTKESTHPVKPLAQIAGNRYASGPVGKALSDACMGTIASFLSKYQDIIIEHQKVVKGNQKRLESLRELAGKENLEYPSVTLPPQPHTKEGVDAYNEVIARVRMWVNLNLWQKLKLSRDDAKPLLRLKGFPSFPLVERQQANEVDWWDMVCNVKKLINEKKEDGKVFWQNLAGYKRQEALRPYLSSEEDRKKGKKFARYQLGDLLLHLEKKHGEDWGKVYDEAWERIDKKVEGLSKHIKLEEERRSEDAQSKAALTDWLRAKASFVIEGLKEADKDEFCRCELKLQKWYGDLRGKPFAIEAENSILDISGFSKQYNCAFIWQKDGVKKLNLYLIINYFKGGKLRFKKIKPEAFEANRFYTVINKKSGEIVPMEVNFNFDDPNLIILPLAFGKRFGREFIWNDLLSLETGSLKLANGRVIEKTLYNRRTRQDEPALFVALTFERREVLDSSNIKPMNLIGVDRGENIPAVIALTDPEGCPLSRFKDSLGNPTHILRIGESYKEKQRTIQAKKEVEQRRAGGYSRKYASKAKNLADDMVRNTARDLLYYAVTQDAMLIFENLSRGFGRQGKRTFMAERQYTRMEDWLTAKLAYEGLPSKTYLSKTLAQYTSKTCSNCGFTITSADYDRVLEKLKKTATGWMTTINGKELKVEGQITYYNRYKRQNVVKDLSVELDRLSEESVNNDISSWTKGRSGEALSLLKKRFSHRPVQEKFVCLNCGFETHADEQAALNIARSWLFLRSQEYKKYQTNKTTGNTDKRAFVETWQSFYRKKLKEVWKPAV

SEQ ID NO: 36504 - protein, 978 aa, synthetic construct
  REGION 1..978: note = engineered CasX variant
QEIKRINKIRRRLVKDSNTKKAGKTGPMKTLLVRVMTPDLRERLENLRKKPENIPQPISNTSRANLNKLLTDYTEMKKAILHVYWEEFQKDPVGLMSRVAQPASKKIDQNKLKPEMDEKGNLTTAGFACSQCGQPLFVYKLEQVSEKGKAYTNYFGRCNVAEHEKLILLAQLKPEKDSDEAVTYSLGKFGQRALDFYSIHVTKESTHPVKPLAQIAGNRYASPVGKALSDACMGTIASFLSKYQDIIIEHQKVVKGNQKRLESLRELAGKENLEYPSVTLPPQPHTKEGVDAYNEVIARVRMWVNLNLWQKLKLSRDDAKPLLRLKGFPSFPLVERQQANEVDWWDMVCNVKKLINEKKEDGKVFWQNLAGYKRQEALRPYLSSEEDRKKGKKFARYQLGDLLLHLEKKHGEDWGKVYDEAWERIDKKVEGLSKHIKLEEERRSEDAQSKAALTDWLRAKASFVIEGLKEADKDEFCRCELKLQKWYGDLRGKPFAIEAENSILDISGFSKQYNCAFIWQKDGVKKLNLYLIINYFKGGKLRFKKIKPEAFEANRFYTVINKKSGEIVPMEVNFNFDDPNLIILPLAFGKRFGREFIWNDLLSLETGSLKLANGRVIEKTLYNRRTRQDEPALFVALTFERREVLDSSNIKPMNLIGVDRGENIPAVIALTDPEGCPLSRFKDSLGNPTHILRIGESYKEKQRTIQAKKEVEQRRAGGYSRKYASKAKNLADDMVRNTARDLLYYAVTQDAMLIFENLSRGFGRQGKRTFMAERQYTRMEDWLTAKLAYEGLPSKTYLSKTLAQYTSKTCSNCGFTITSADYDRVLEKLKKTATGWMTTINGKELKVEGQITYYNRYKRQNVVKDLSVELDRLSEESVNNDISSWTKGRSGEALSLLKKRFSHRPVQEKFVCLNCGFETHADEQAALNIARSWLFLRSQEYKKYQTNKTTGNTDKRAFVETWQSFYRKKLKEVWKPAV

SEQ ID NO: 36505 - protein, 979 aa, synthetic construct
  REGION 1..979: note = engineered CasX variant
QEIKRINKIRRRLVKDSNTKKAGKTGPMKTLLVRVMTPDLRERLENLRKKPENIPQPISNTSRANLNKLLTDYTEMKKAILHVYWEEFQKDPVGLMSRVAQPASKKIDQNKLKPEMDEKGNLTTAGFACSQCGQPLFVYKLEQVSEKGKAYTNYFGRCNVAEHEKLILLAQLKPEKDSDEAVTYSLGKFGQRALDFYSIHVTKESTHPVKPLAQIAGNRYASYPVGKALSDACMGTIASFLSKYQDIIIEHQKVVKGNQKRLESLRELAGKENLEYPSVTLPPQPHTKEGVDAYNEVIARVRMWVNLNLWQKLKLSRDDAKPLLRLKGFPSFPLVERQQANEVDWWDMVCNVKKLINEKKEDGKVFWQNLAGYKRQEALRPYLSSEEDRKKGKKFARYQLGDLLLHLEKKHGEDWGKVYDEAWERIDKKVEGLSKHIKLEEERRSEDAQSKAALTDWLRAKASFVIEGLKEADKDEFCRCELKLQKWYGDLRGKPFAIEAENSILDISGFSKQYNCAFIWQKDGVKKLNLYLIINYFKGGKLRFKKIKPEAFEANRFYTVINKKSGEIVPMEVNFNFDDPNLIILPLAFGKRVGREFIWNDLLSLETGSLKLANGRVIEKTLYNRRTRQDEPALFVALTFERREVLDSSNIKPMNLIGVDRGENIPAVIALTDPEGCPLSRFKDSLGNPTHILRIGESYKEKQRTIQAKKEVEQRRAGGYSRKYASKAKNLADDMVRNTARDLLYYAVTQDAMLIFENLSRGFGRQGKRTFMAERQYTRMEDWLTAKLAYEGLPSKTYLSKTLAQYTSKTCSNCGFTITSADYDRVLEKLKKTATGWMTTINGKELKVEGQITYYNRYKRQNVVKDLSVELDRLSEESVNNDISSWTKGRSGEALSLLKKRFSHRPVQEKFVCLNCGFETHADEQAALNIARSWLFLRSQEYKKYQTNKTTGNTDKRAFVETWQSFYRKKLKEVWKPAV

SEQ ID NO: 36506 - protein, 979 aa, synthetic construct
  REGION 1..979: note = engineered CasX variant
QEIKRINKIRRRLVKDSNTKKAGKTGPMKTLLVRVMTPDLRERLENLRKKPENIPQPISNTSRANLNKLLTDYTEMKKAILHVYWEEFQKDPVGLMSRVAQPASKKIDQNKLKPEMDEKGNLTTAGFACSQCGQPLFVYKLEQVSEKGKAYTNYFGRCNVAEHEKLILLAQLKPEKDSDEAVTYSLGKFGQRALDFYSIHVTKESTHPVKPLAQIAGNRYASHPVGKALSDACMGTIASFLSKYQDIIIEHQKVVKGNQKRLESLRELAGKENLEYPSVTLPPQPHTKEGVDAYNEVIARVRMWVNLNLWQKLKLSRDDAKPLLRLKGFPSFPLVERQQANEVDWWDMVCNVKKLINEKKEDGKVFWQNLAGYKRQEALRPYLSSEEDRKKGKKFARYQLGDLLLHLEKKHGEDWGKVYDEAWERIDKKVEGLSKHIKLEEERRSEDAQSKAALTDWLRAKASFVIEGLKEADKDEFCRCELKLQKWYGDLRGKPFAIEAENSILDISGFSKQYNCAFIWQKDGVKKLNLYLIINYFKGGKLRFKKIKPEAFEANRFYTVINKKSGEIVPMEVNFNFDDPNLIILPLAFGKRVGREFIWNDLLSLETGSLKLANGRVIEKTLYNRRTRQDEPALFVALTFERREVLDSSNIKPMNLIGVDRGENIPAVIALTDPEGCPLSRFKDSLGNPTHILRIGESYKEKQRTIQAKKEVEQRRAGGYSRKYASKAKNLADDMVRNTARDLLYYAVTQDAMLIFENLSRGFGRQGKRTFMAERQYTRMEDWLTAKLAYEGLPSKTYLSKTLAQYTSKTCSNCGFTITSADYDRVLEKLKKTATGWMTTINGKELKVEGQITYYNRYKRQNVVKDLSVELDRLSEESVNNDISSWTKGRSGEALSLLKKRFSHRPVQEKFVCLNCGFETHADEQAALNIARSWLFLRSQEYKKYQTNKTTGNTDKRAFVETWQSFYRKKLKEVWKPAV

SEQ ID NO: 36507 - protein, 979 aa, synthetic construct
  REGION 1..979: note = engineered CasX variant
QEIKRINKIRRRLVKDSNTKKAGKTGPMKTLLVRVMTPDLRERLENLRKKPENIPQPISNTSRANLNKLLTDYTEMKKAILHVYWEEFQKDPVGLMSRVAQPASKKIDQNKLKPEMDEKGNLTTAGFACSQCGQPLFVYKLEQVSEKGKAYTNYFGRCNVAEHEKLILLAQLKPEKDSDEAVTYSLGKFGQRALDFYSIHVTKESTHPVKPLAQIAGNRYASSPVGKALSDACMGTIASFLSKYQDIIIEHQKVVKGNQKRLESLRELAGKENLEYPSVTLPPQPHTKEGVDAYNEVIARVRMWVNLNLWQKLKLSRDDAKPLLRLKGFPSFPLVERQQANEVDWWDMVCNVKKLINEKKEDGKVFWQNLAGYKRQEALRPYLSSEEDRKKGKKFARYQLGDLLLHLEKKHGEDWGKVYDEAWERIDKKVEGLSKHIKLEEERRSEDAQSKAALTDWLRAKASFVIEGLKEADKDEFCRCELKLQKWYGDLRGKPFAIEAENSILDISGFSKQYNCAFIWQKDGVKKLNLYLIINYFKGGKLRFKKIKPEAFEANRFYTVINKKSGEIVPMEVNFNFDDPNLIILPLAFGKRVGREFIWNDLLSLETGSLKLANGRVIEKTLYNRRTRQDEPALFVALTFERREVLDSSNIKPMNLIGVDRGENIPAVIALTDPEGCPLSRFKDSLGNPTHILRIGESYKEKQRTIQAKKEVEQRRAGGYSRKYASKAKNLADDMVRNTARDLLYYAVTQDAMLIFENLSRGFGRQGKRTFMAERQYTRMEDWLTAKLAYEGLPSKTYLSKTLAQYTSKTCSNCGFTITSADYDRVLEKLKKTATGWMTTINGKELKVEGQITYYNRYKRQNVVKDLSVELDRLSEESVNNDISSWTKGRSGEALSLLKKRFSHRPVQEKFVCLNCGFETHADEQAALNIARSWLFLRSQEYKKYQTNKTTGNTDKRAFVETWQSFYRKKLKEVWKPAV

SEQ ID NO: 36508 - protein, 979 aa, synthetic construct
  REGION 1..979: note = engineered CasX variant
QEIKRINKIRRRLVKDSNTKKAGKTGPMKTLLVRVMTPDLRERLENLRKKPENIPQPISNTSRANLNKLLTDYTEMKKAILHVYWEEFQKDPVGLMSRVAQPASKKIDQNKLKPEMDEKGNLTTAGFACSQCGQPLFVYKLEQVSEKGKAYTNYFGRCNVAEHEKLILLAQLKPEKDSDEAVTYSLGKFGQRALDFYSIHVTKESTHPVKPLAQIAGNRYASTPVGKALSDACMGTIASFLSKYQDIIIEHQKVVKGNQKRLESLRELAGKENLEYPSVTLPPQPHTKEGVDAYNEVIARVRMWVNLNLWQKLKLSRDDAKPLLRLKGFPSFPLVERQQANEVDWWDMVCNVKKLINEKKEDGKVFWQNLAGYKRQEALRPYLSSEEDRKKGKKFARYQLGDLLLHLEKKHGEDWGKVYDEAWERIDKKVEGLSKHIKLEEERRSEDAQSKAALTDWLRAKASFVIEGLKEADKDEFCRCELKLQKWYGDLRGKPFAIEAENSILDISGFSKQYNCAFIWQKDGVKKLNLYLIINYFKGGKLRFKKIKPEAFEANRFYTVINKKSGEIVPMEVNFNFDDPNLIILPLAFGKRVGREFIWNDLLSLETGSLKLANGRVIEKTLYNRRTRQDEPALFVALTFERREVLDSSNIKPMNLIGVDRGENIPAVIALTDPEGCPLSRFKDSLGNPTHILRIGESYKEKQRTIQAKKEVEQRRAGGYSRKYASKAKNLADDMVRNTARDLLYYAVTQDAMLIFENLSRGFGRQGKRTFMAERQYTRMEDWLTAKLAYEGLPSKTYLSKTLAQYTSKTCSNCGFTITSADYDRVLEKLKKTATGWMTTINGKELKVEGQITYYNRYKRQNVVKDLSVELDRLSEESVNNDISSWTKGRSGEALSLLKKRFSHRPVQEKFVCLNCGFETHADEQAALNIARSWLFLRSQEYKKYQTNKTTGNTDKRAFVETWQSFYRKKLKEVWKPAV

SEQ ID NO: 36509 - protein, 979 aa, synthetic construct
  REGION 1..979: note = engineered CasX variant
QEIKRINKIRRRLVKDSNTKKAGKTGPMKTLLVRVMTPDLRERLENLRKKPENIPQPISNTSRANLNKLLTDYTEMKKAILHVYWEEFQKDPVGLMSRVAQPASKKIDQNKLKPEMDEKGNLTTAGFACSQCGQPLFVYKLEQVSEKGKAYTNYFGRCNVAEHEKLILLAQLKPEKDSDEAVTYSLGKFGQRALDFYSIHVTKESTHPVKPLAQIAGNRYASAPVGKALSDACMGTIASFLSKYQDIIIEHQKVVKGNQKRLESLRELAGKENLEYPSVTLPPQPHTKEGVDAYNEVIARVRMWVNLNLWQKLKLSRDDAKPLLRLKGFPSFPLVERQQANEVDWWDMVCNVKKLINEKKEDGKVFWQNLAGYKRQEALRPYLSSEEDRKKGKKFARYQLGDLLLHLEKKHGEDWGKVYDEAWERIDKKVEGLSKHIKLEEERRSEDAQSKAALTDWLRAKASFVIEGLKEADKDEFCRCELKLQKWYGDLRGKPFAIEAENSILDISGFSKQYNCAFIWQKDGVKKLNLYLIINYFKGGKLRFKKIKPEAFEANRFYTVINKKSGEIVPMEVNFNFDDPNLIILPLAFGKRVGREFIWNDLLSLETGSLKLANGRVIEKTLYNRRTRQDEPALFVALTFERREVLDSSNIKPMNLIGVDRGENIPAVIALTDPEGCPLSRFKDSLGNPTHILRIGESYKEKQRTIQAKKEVEQRRAGGYSRKYASKAKNLADDMVRNTARDLLYYAVTQDAMLIFENLSRGFGRQGKRTFMAERQYTRMEDWLTAKLAYEGLPSKTYLSKTLAQYTSKTCSNCGFTITSADYDRVLEKLKKTATGWMTTINGKELKVEGQITYYNRYKRQNVVKDLSVELDRLSEESVNNDISSWTKGRSGEALSLLKKRFSHRPVQEKFVCLNCGFETHADEQAALNIARSWLFLRSQEYKKYQTNKTTGNTDKRAFVETWQSFYRKKLKEVWKPAV

SEQ ID NO: 36510 - protein, 979 aa, synthetic construct
  REGION 1..979: note = engineered CasX variant
QEIKRINKIRRRLVKDSNTKKAGKTGPMKTLLVRVMTPDLRERLENLRKKPENIPQPISNTSRANLNKLLTDYTEMKKAILHVYWEEFQKDPVGLMSRVAQPASKKIDQNKLKPEMDEKGNLTTAGFACSQCGQPLFVYKLEQVSEKGKAYTNYFGRCNVAEHEKLILLAQLKPEKDSDEAVTYSLGKFGQRALDFYSIHVTKESTHPVKPLAQIAGNRYASVPVGKALSDACMGTIASFLSKYQDIIIEHQKVVKGNQKRLESLRELAGKENLEYPSVTLPPQPHTKEGVDAYNEVIARVRMWVNLNLWQKLKLSRDDAKPLLRLKGFPSFPLVERQQANEVDWWDMVCNVKKLINEKKEDGKVFWQNLAGYKRQEALRPYLSSEEDRKKGKKFARYQLGDLLLHLEKKHGEDWGKVYDEAWERIDKKVEGLSKHIKLEEERRSEDAQSKAALTDWLRAKASFVIEGLKEADKDEFCRCELKLQKWYGDLRGKPFAIEAENSILDISGFSKQYNCAFIWQKDGVKKLNLYLIINYFKGGKLRFKKIKPEAFEANRFYTVINKKSGEIVPMEVNFNFDDPNLIILPLAFGKRVGREFIWNDLLSLETGSLKLANGRVIEKTLYNRRTRQDEPALFVALTFERREVLDSSNIKPMNLIGVDRGENIPAVIALTDPEGCPLSRFKDSLGNPTHILRIGESYKEKQRTIQAKKEVEQRRAGGYSRKYASKAKNLADDMVRNTARDLLYYAVTQDAMLIFENLSRGFGRQGKRTFMAERQYTRMEDWLTAKLAYEGLPSKTYLSKTLAQYTSKTCSNCGFTITSADYDRVLEKLKKTATGWMTTINGKELKVEGQITYYNRYKRQNVVKDLSVELDRLSEESVNNDISSWTKGRSGEALSLLKKRFSHRPVQEKFVCLNCGFETHADEQAALNIARSWLFLRSQEYKKYQTNKTTGNTDKRAFVETWQSFYRKKLKEVWKPAV

SEQ ID NO: 36511 - protein, 979 aa, synthetic construct
  REGION 1..979: note = engineered CasX variant
QEIKRINKIRRRLVKDSNTKKAGKTGPMKTLLVRVMTPDLRERLENLRKKPENIPQPISNTSRANLNKLLTDYTEMKKAILHVYWEEFQKDPVGLMSRVAQPASKKIDQNKLKPEMDEKGNLTTAGFACSQCGQPLFVYKLEQVSEKGKAYTNYFGRCNVAEHEKLIKLAQLKPEKDSDEAVTYSLGKFGQRALDFYSIHVTKESTHPVKPLAQIAGNRYASGPVGKALSDACMGTIASFLSKYQDIIIEHQKVVKGNQKRLESLRELAGKENLEYPSVTLPPQPHTKEGVDAYNEVIARVRMWVNLNLWQKLKLSRDDAKPLLRLKGFPSFPLVERQQANEVDWWDMVCNVKKLINEKKEDGKVFWQNLAGYKRQEALRPYLSSEEDRKKGKKFARYQLGDLLLHLEKKHGEDWGKVYDEAWERIDKKVEGLSKHIKLEEERRSEDAQSKAALTDWLRAKASFVIEGLKEADKDEFCRCELKLQKWYGDLRGKPFAIEAENSILDISGFSKQYNCAFIWQKDGVKKLNLYLIINYFKGGKLRFKKIKPEAFEANRFYTVINKKSGEIVPMEVNFNFDDPNLIILPLAFGKRVGREFIWNDLLSLETGSLKLANGRVIEKTLYNRRTRQDEPALFVALTFERREVLDSSNIKPMNLIGVDRGENIPAVIALTDPEGCPLSRFKDSLGNPTHILRIGESYKEKQRTIQAKKEVEQRRAGGYSRKYASKAKNLADDMVRNTARDLLYYAVTQDAMLIFENLSRGFGRQGKRTFMAERQYTRMEDWLTAKLAYEGLPSKTYLSKTLAQYTSKTCSNCGFTITSADYDRVLEKLKKTATGWMTTINGKELKVEGQITYYNRYKRQNVVKDLSVELDRLSEESVNNDISSWTKGRSGEALSLLKKRFSHRPVQEKFVCLNCGFETHADEQAALNIARSWLFLRSQEYKKYQTNKTTGNTDKRAFVETWQSFYRKKLKEVWKPAV

SEQ ID NO: 36512 - protein, 978 aa, synthetic construct
  REGION 1..978: note = engineered CasX variant
QEIKRINKIRRRLVKDSNTKKAGKTGPMKTLLVRVMTPDLRERLENLRKKPENIPQPISNTSRANLNKLLTDYTEMKKAILHVYWEEFQKDPVGLMSRVAQPASKKIDQNKLKPEMDEKGNLTTAGFACSQCGQPLFVYKLEQVSEKGKAYTNYFGRCNVAEHEKLILLAQLKPEKDSDEAVTYSLGKFGQRALDFYSIHVTKESTHPVKPLAQIAGNRYASPVGKALSDACMGTIASFLSKYQDIIIEHQKVVKGNQKRLESLRELAGKENLEYPSVTLPPQPHTKEGVDAYNEVIARVRMWVNLNLWQKLKLSRDDAKPLLRLKGFPSFPLVERQQANEVDWWDMVCNVKKLINEKKEDGKVFWQNLAGYKRQEALRPYLSSEEDRKKGKKFARYQLGDLLLHLEKKHGEDWGKVYDEAWERIDKKVEGLSKHIKLEEERRSEDAQSKAALTDWLRAKASFVIEGLKEADKDEFCRCELKLQKWYGDLRGKPFAIEAENSILDISGFSKQYNCAFIWQKDGVKKLNLYLIINYFKGGKLRFKKIKPEAFEANRFYTVINKKSGEIVPMEVNFNFDDPNLIILPLAFGKRVGREFIWNDLLSLETGSLKLANGRVIEKTLYNRRTRQDEPALFVALTFERREVLDSSNIKPMNLIGVDRGENIPAVIALTDPEGCPLSRFKDSLGNPTHILRIGESYKEKQRTIQAKKEVEQRRAGGYSRKYASKAKNLADDMVRNTARDLLYYAVTQDAMLIFENLSRGFGRQGKRTFMAERQYTRMEDWLTAKLAYEGLPSKTYLSKTLAQYTSKTCSNCGFTITSADYDRVLEKLKKTATGWMTTINGKELKVEGQITYYNRYKRQNVVKDLSVELDRLSEESVNNDISSWTKGRSGEALSLLKKRFSHRPVQEKFVCLNCGFETHADEQAALNIARSWLFLRSQEYKKYQTNKTTGNTDKRAFVETWQSFYRKKLKEVWKPAV

SEQ ID NO: 36513 - protein, 980 aa, synthetic construct
  REGION 1..980: note = engineered CasX variant
QEIKRINKIRRRLVKDSNTKKAGKTGPMKTLLVRVMTPDLRERLENLRKKPENIPQPISNTSRANLNKLLTDYTEMKKAILHVYWEEFQKDPVGLMSRVAQPASKKIDQNKLKPEMDEKGNLTTAGFACSQCGQPLFVYKLEQVSEKGKAYTNYFGRCNVAEHEKLILLAQLKPEKDSDEAVTYSLGKFGQRALDFYSIHVTKESTHPVKPLAQIAGNRYASYPVGKALSDACMGTIASFLSKYQDIIIEHQKVVKGNQKRLESLRELAGKENLEYPSVTLPPQPHTKEGVDAYNEVIARVRMWVNLNLWQKLKLSRDDAKPLLRLKGFPSFPLVERQQANEVDWWDMVCNVKKLINEKKEDGKVFWQNLAGYKRQEALRPYLSSEEDRKKGKKFARYQLGDLLLHLEKKHGEDWGKVYDEAWERIDKKVEGLSKHIKLEEERRSEDAQSKAALTDWLRAKASFVIEGLKEADKDEFCRCELKLQKWYGDLRGKPFAIEAENSILDISGFSKQYNCAFIWQKDGVKKLNLYLIINYFKGGKLRFKKIKPEAFEANRFYTVINKKSGEIVPMEVNFNFDDPNLIILPLAFGKRQGREFIWNDLLSLETGSLKLANGRVIEKTLYNRRTRQDEPALFVALTFERREVLDSSNIKTPMNLIGVDRGENIPAVIALTDPEGCPLSRFKDSLGNPTHILRIGESYKEKQRTIQAKKEVEQRRAGGYSRKYASKAKNLADDMVRNTARDLLYYAVTQDAMLIFENLSRGFGRQGKRTFMAERQYTRMEDWLTAKLAYEGLPSKTYLSKTLAQYTSKTCSNCGFTITSADYDRVLEKLKKTATGWMTTINGKELKVEGQITYYNRYKRQNVVKDLSVELDRLSEESVNNDISSWTKGRSGEALSLLKKRFSHRPVQEKFVCLNCGFETHADEQAALNIARSWLFLRSQEYKKYQTNKTTGNTDKRAFVETWQSFYRKKLKEVWKPAV

SEQ ID NO: 36514 - protein, 980 aa, synthetic construct
  REGION 1..980: note = engineered CasX variant
QEIKRINKIRRRLVKDSNTKKAGKTGPMKTLLVRVMTPDLRERLENLRKKPENIPQPISNTSRANLNKLLTDYTEMKKAILHVYWEEFQKDPVGLMSRVAQPASKKIDQNKLKPEMDEKGNLTTAGFACSQCGQPLFVYKLEQVSEKGKAYTNYFGRCNVAEHEKLILLAQLKPEKDSDEAVTYSLGKFGQRALDFYSIHVTKESTHPVKPLAQIAGNRYASHPVGKALSDACMGTIASFLSKYQDIIIEHQKVVKGNQKRLESLRELAGKENLEYPSVTLPPQPHTKEGVDAYNEVIARVRMWVNLNLWQKLKLSRDDAKPLLRLKGFPSFPLVERQQANEVDWWDMVCNVKKLINEKKEDGKVFWQNLAGYKRQEALRPYLSSEEDRKKGKKFARYQLGDLLLHLEKKHGEDWGKVYDEAWERIDKKVEGLSKHIKLEEERRSEDAQSKAALTDWLRAKASFVIEGLKEADKDEFCRCELKLQKWYGDLRGKPFAIEAENSILDISGFSKQYNCAFIWQKDGVKKLNLYLIINYFKGGKLRFKKIKPEAFEANRFYTVINKKSGEIVPMEVNFNFDDPNLIILPLAFGKRQGREFIWNDLLSLETGSLKLANGRVIEKTLYNRRTRQDEPALFVALTFERREVLDSSNIKTPMNLIGVDRGENIPAVIALTDPEGCPLSRFKDSLGNPTHILRIGESYKEKQRTIQAKKEVEQRRAGGYSRKYASKAKNLADDMVRNTARDLLYYAVTQDAMLIFENLSRGFGRQGKRTFMAERQYTRMEDWLTAKLAYEGLPSKTYLSKTLAQYTSKTCSNCGFTITSADYDRVLEKLKKTATGWMTTINGKELKVEGQITYYNRYKRQNVVKDLSVELDRLSEESVNNDISSWTKGRSGEALSLLKKRFSHRPVQEKFVCLNCGFETHADEQAALNIARSWLFLRSQEYKKYQTNKTTGNTDKRAFVETWQSFYRKKLKEVWKPAV

SEQ ID NO: 36515 - protein, 980 aa, synthetic construct
  REGION 1..980: note = engineered CasX variant
QEIKRINKIRRRLVKDSNTKKAGKTGPMKTLLVRVMTPDLRERLENLRKKPENIPQPISNTSRANLNKLLTDYTEMKKAILHVYWEEFQKDPVGLMSRVAQPASKKIDQNKLKPEMDEKGNLTTAGFACSQCGQPLFVYKLEQVSEKGKAYTNYFGRCNVAEHEKLILLAQLKPEKDSDEAVTYSLGKFGQRALDFYSIHVTKESTHPVKPLAQIAGNRYASSPVGKALSDACMGTIASFLSKYQDIIIEHQKVVKGNQKRLESLRELAGKENLEYPSVTLPPQPHTKEGVDAYNEVIARVRMWVNLNLWQKLKLSRDDAKPLLRLKGFPSFPLVERQQANEVDWWDMVCNVKKLINEKKEDGKVFWQNLAGYKRQEALRPYLSSEEDRKKGKKFARYQLGDLLLHLEKKHGEDWGKVYDEAWERIDKKVEGLSKHIKLEEERRSEDAQSKAALTDWLRAKASFVIEGLKEADKDEFCRCELKLQKWYGDLRGKPFAIEAENSILDISGFSKQYNCAFIWQKDGVKKLNLYLIINYFKGGKLRFKKIKPEAFEANRFYTVINKKSGEIVPMEVNFNFDDPNLIILPLAFGKRQGREFIWNDLLSLETGSLKLANGRVIEKTLYNRRTRQDEPALFVALTFERREVLDSSNIKTPMNLIGVDRGENIPAVIALTDPEGCPLSRFKDSLGNPTHILRIGESYKEKQRTIQAKKEVEQRRAGGYSRKYASKAKNLADDMVRNTARDLLYYAVTQDAMLIFENLSRGFGRQGKRTFMAERQYTRMEDWLTAKLAYEGLPSKTYLSKTLAQYTSKTCSNCGFTITSADYDRVLEKLKKTATGWMTTINGKELKVEGQITYYNRYKRQNVVKDLSVELDRLSEESVNNDISSWTKGRSGEALSLLKKRFSHRPVQEKFVCLNCGFETHADEQAALNIARSWLFLRSQEYKKYQTNKTTGNTDKRAFVETWQSFYRKKLKEVWKPAV

SEQ ID NO: 36516 - protein, 980 aa, synthetic construct
  REGION 1..980: note = engineered CasX variant
QEIKRINKIRRRLVKDSNTKKAGKTGPMKTLLVRVMTPDLRERLENLRKKPENIPQPISNTSRANLNKLLTDYTEMKKAILHVYWEEFQKDPVGLMSRVAQPASKKIDQNKLKPEMDEKGNLTTAGFACSQCGQPLFVYKLEQVSEKGKAYTNYFGRCNVAEHEKLILLAQLKPEKDSDEAVTYSLGKFGQRALDFYSIHVTKESTHPVKPLAQIAGNRYASTPVGKALSDACMGTIASFLSKYQDIIIEHQKVVKGNQKRLESLRELAGKENLEYPSVTLPPQPHTKEGVDAYNEVIARVRMWVNLNLWQKLKLSRDDAKPLLRLKGFPSFPLVERQQANEVDWWDMVCNVKKLINEKKEDGKVFWQNLAGYKRQEALRPYLSSEEDRKKGKKFARYQLGDLLLHLEKKHGEDWGKVYDEAWERIDKKVEGLSKHIKLEEERRSEDAQSKAALTDWLRAKASFVIEGLKEADKDEFCRCELKLQKWYGDLRGKPFAIEAENSILDISGFSKQYNCAFIWQKDGVKKLNLYLIINYFKGGKLRFKKIKPEAFEANRFYTVINKKSGEIVPMEVNFNFDDPNLIILPLAFGKRQGREFIWNDLLSLETGSLKLANGRVIEKTLYNRRTRQDEPALFVALTFERREVLDSSNIKTPMNLIGVDRGENIPAVIALTDPEGCPLSRFKDSLGNPTHILRIGESYKEKQRTIQAKKEVEQRRAGGYSRKYASKAKNLADDMVRNTARDLLYYAVTQDAMLIFENLSRGFGRQGKRTFMAERQYTRMEDWLTAKLAYEGLPSKTYLSKTLAQYTSKTCSNCGFTITSADYDRVLEKLKKTATGWMTTINGKELKVEGQITYYNRYKRQNVVKDLSVELDRLSEESVNNDISSWTKGRSGEALSLLKKRFSHRPVQEKFVCLNCGFETHADEQAALNIARSWLFLRSQEYKKYQTNKTTGNTDKRAFVETWQSFYRKKLKEVWKPAV

SEQ ID NO: 36517 - protein, 980 aa, synthetic construct
  REGION 1..980: note = engineered CasX variant
QEIKRINKIRRRLVKDSNTKKAGKTGPMKTLLVRVMTPDLRERLENLRKKPENIPQPISNTSRANLNKLLTDYTEMKKAILHVYWEEFQKDPVGLMSRVAQPASKKIDQNKLKPEMDEKGNLTTAGFACSQCGQPLFVYKLEQVSEKGKAYTNYFGRCNVAEHEKLILLAQLKPEKDSDEAVTYSLGKFGQRALDFYSIHVTKESTHPVKPLAQIAGNRYASAPVGKALSDACMGTIASFLSKYQDIIIEHQKVVKGNQKRLESLRELAGKENLEYPSVTLPPQPHTKEGVDAYNEVIARVRMWVNLNLWQKLKLSRDDAKPLLRLKGFPSFPLVERQQANEVDWWDMVCNVKKLINEKKEDGKVFWQNLAGYKRQEALRPYLSSEEDRKKGKKFARYQLGDLLLHLEKKHGEDWGKVYDEAWERIDKKVEGLSKHIKLEEERRSEDAQSKAALTDWLRAKASFVIEGLKEADKDEFCRCELKLQKWYGDLRGKPFAIEAENSILDISGFSKQYNCAFIWQKDGVKKLNLYLIINYFKGGKLRFKKIKPEAFEANRFYTVINKKSGEIVPMEVNFNFDDPNLIILPLAFGKRQGREFIWNDLLSLETGSLKLANGRVIEKTLYNRRTRQDEPALFVALTFERREVLDSSNIKTPMNLIGVDRGENIPAVIALTDPEGCPLSRFKDSLGNPTHILRIGESYKEKQRTIQAKKEVEQRRAGGYSRKYASKAKNLADDMVRNTARDLLYYAVTQDAMLIFENLSRGFGRQGKRTFMAERQYTRMEDWLTAKLAYEGLPSKTYLSKTLAQYTSKTCSNCGFTITSADYDRVLEKLKKTATGWMTTINGKELKVEGQITYYNRYKRQNVVKDLSVELDRLSEESVNNDISSWTKGRSGEALSLLKKRFSHRPVQEKFVCLNCGFETHADEQAALNIARSWLFLRSQEYKKYQTNKTTGNTDKRAFVETWQSFYRKKLKEVWKPAV

SEQ ID NO: 36518 - protein, 980 aa, synthetic construct
  REGION 1..980: note = engineered CasX variant
QEIKRINKIRRRLVKDSNTKKAGKTGPMKTLLVRVMTPDLRERLENLRKKPENIPQPISNTSRANLNKLLTDYTEMKKAILHVYWEEFQKDPVGLMSRVAQPASKKIDQNKLKPEMDEKGNLTTAGFACSQCGQPLFVYKLEQVSEKGKAYTNYFGRCNVAEHEKLILLAQLKPEKDSDEAVTYSLGKFGQRALDFYSIHVTKESTHPVKPLAQIAGNRYASVPVGKALSDACMGTIASFLSKYQDIIIEHQKVVKGNQKRLESLRELAGKENLEYPSVTLPPQPHTKEGVDAYNEVIARVRMWVNLNLWQKLKLSRDDAKPLLRLKGFPSFPLVERQQANEVDWWDMVCNVKKLINEKKEDGKVFWQNLAGYKRQEALRPYLSSEEDRKKGKKFARYQLGDLLLHLEKKHGEDWGKVYDEAWERIDKKVEGLSKHIKLEEERRSEDAQSKAALTDWLRAKASFVIEGLKEADKDEFCRCELKLQKWYGDLRGKPFAIEAENSILDISGFSKQYNCAFIWQKDGVKKLNLYLIINYFKGGKLRFKKIKPEAFEANRFYTVINKKSGEIVPMEVNFNFDDPNLIILPLAFGKRQGREFIWNDLLSLETGSLKLANGRVIEKTLYNRRTRQDEPALFVALTFERREVLDSSNIKTPMNLIGVDRGENIPAVIALTDPEGCPLSRFKDSLGNPTHILRIGESYKEKQRTIQAKKEVEQRRAGGYSRKYASKAKNLADDMVRNTARDLLYYAVTQDAMLIFENLSRGFGRQGKRTFMAERQYTRMEDWLTAKLAYEGLPSKTYLSKTLAQYTSKTCSNCGFTITSADYDRVLEKLKKTATGWMTTINGKELKVEGQITYYNRYKRQNVVKDLSVELDRLSEESVNNDISSWTKGRSGEALSLLKKRFSHRPVQEKFVCLNCGFETHADEQAALNIARSWLFLRSQEYKKYQTNKTTGNTDKRAFVETWQSFYRKKLKEVWKPAV

SEQ ID NO: 36519 - protein, 980 aa, synthetic construct
  REGION 1..980: note = engineered CasX variant
QEIKRINKIRRRLVKDSNTKKAGKTGPMKTLLVRVMTPDLRERLENLRKKPENIPQPISNTSRANLNKLLTDYTEMKKAILHVYWEEFQKDPVGLMSRVAQPASKKIDQNKLKPEMDEKGNLTTAGFACSQCGQPLFVYKLEQVSEKGKAYTNYFGRCNVAEHEKLIKLAQLKPEKDSDEAVTYSLGKFGQRALDFYSIHVTKESTHPVKPLAQIAGNRYASGPVGKALSDACMGTIASFLSKYQDIIIEHQKVVKGNQKRLESLRELAGKENLEYPSVTLPPQPHTKEGVDAYNEVIARVRMWVNLNLWQKLKLSRDDAKPLLRLKGFPSFPLVERQQANEVDWWDMVCNVKKLINEKKEDGKVFWQNLAGYKRQEALRPYLSSEEDRKKGKKFARYQLGDLLLHLEKKHGEDWGKVYDEAWERIDKKVEGLSKHIKLEEERRSEDAQSKAALTDWLRAKASFVIEGLKEADKDEFCRCELKLQKWYGDLRGKPFAIEAENSILDISGFSKQYNCAFIWQKDGVKKLNLYLIINYFKGGKLRFKKIKPEAFEANRFYTVINKKSGEIVPMEVNFNFDDPNLIILPLAFGKRQGREFIWNDLLSLETGSLKLANGRVIEKTLYNRRTRQDEPALFVALTFERREVLDSSNIKTPMNLIGVDRGENIPAVIALTDPEGCPLSRFKDSLGNPTHILRIGESYKEKQRTIQAKKEVEQRRAGGYSRKYASKAKNLADDMVRNTARDLLYYAVTQDAMLIFENLSRGFGRQGKRTFMAERQYTRMEDWLTAKLAYEGLPSKTYLSKTLAQYTSKTCSNCGFTITSADYDRVLEKLKKTATGWMTTINGKELKVEGQITYYNRYKRQNVVKDLSVELDRLSEESVNNDISSWTKGRSGEALSLLKKRFSHRPVQEKFVCLNCGFETHADEQAALNIARSWLFLRSQEYKKYQTNKTTGNTDKRAFVETWQSFYRKKLKEVWKPAV

SEQ ID NO: 36520 - protein, 979 aa, synthetic construct
  REGION 1..979: note = engineered CasX variant
QEIKRINKIRRRLVKDSNTKKAGKTGPMKTLLVRVMTPDLRERLENLRKKPENIPQPISNTSRANLNKLLTDYTEMKKAILHVYWEEFQKDPVGLMSRVAQPASKKIDQNKLKPEMDEKGNLTTAGFACSQCGQPLFVYKLEQVSEKGKAYTNYFGRCNVAEHEKLILLAQLKPEKDSDEAVTYSLGKFGQRALDFYSIHVTKESTHPVKPLAQIAGNRYASPVGKALSDACMGTIASFLSKYQDIIIEHQKVVKGNQKRLESLRELAGKENLEYPSVTLPPQPHTKEGVDAYNEVIARVRMWVNLNLWQKLKLSRDDAKPLLRLKGFPSFPLVERQQANEVDWWDMVCNVKKLINEKKEDGKVFWQNLAGYKRQEALRPYLSSEEDRKKGKKFARYQLGDLLLHLEKKHGEDWGKVYDEAWERIDKKVEGLSKHIKLEEERRSEDAQSKAALTDWLRAKASFVIEGLKEADKDEFCRCELKLQKWYGDLRGKPFAIEAENSILDISGFSKQYNCAFIWQKDGVKKLNLYLIINYFKGGKLRFKKIKPEAFEANRFYTVINKKSGEIVPMEVNFNFDDPNLIILPLAFGKRQGREFIWNDLLSLETGSLKLANGRVIEKTLYNRRTRQDEPALFVALTFERREVLDSSNIKTPMNLIGVDRGENIPAVIALTDPEGCPLSRFKDSLGNPTHILRIGESYKEKQRTIQAKKEVEQRRAGGYSRKYASKAKNLADDMVRNTARDLLYYAVTQDAMLIFENLSRGFGRQGKRTFMAERQYTRMEDWLTAKLAYEGLPSKTYLSKTLAQYTSKTCSNCGFTITSADYDRVLEKLKKTATGWMTTINGKELKVEGQITYYNRYKRQNVVKDLSVELDRLSEESVNNDISSWTKGRSGEALSLLKKRFSHRPVQEKFVCLNCGFETHADEQAALNIARSWLFLRSQEYKKYQTNKTTGNTDKRAFVETWQSFYRKKLKEVWKPAV

SEQ ID NO: 36521 - protein, 980 aa, synthetic construct
  REGION 1..980: note = engineered CasX variant
QEIKRINKIRRRLVKDSNTKKAGKTGPMKTLLVRVMTPDLRERLENLRKKPENIPQPISNTSRANLNKLLTDYTEMKKAILHVYWEEFQKDPVGLMSRVAQPASKKIDQNKLKPEMDEKGNLTTAGFACSQCGQPLFVYKLEQVSEKGKAYTNYFGRCNVAEHEKLILLAQLKPEKDSDEAVTYSLGKFGQRALDFYSIHVTKESTHPVKPLAQIAGNRYASYPVGKALSDACMGTIASFLSKYQDIIIEHQKVVKGNQKRLESLRELAGKENLEYPSVTLPPQPHTKEGVDAYNEVIARVRMWVNLNLWQKLKLSRDDAKPLLRLKGFPSFPLVERQQANEVDWWDMVCNVKKLINEKKEDGKVFWQNLAGYKRQEALRPYLSSEEDRKKGKKFARYQLGDLLLHLEKKHGEDWGKVYDEAWERIDKKVEGLSKHIKLEEERRSEDAQSKAALTDWLRAKASFVIEGLKEADKDEFCRCELKLQKWYGDLRGKPFAIEAENSILDISGFSKQYNCAFIWQKDGVKKLNLYLIINYFKGGKLRFKKIKPEAFEANRFYTVINKKSGEIVPMEVNFNFDDPNLIILPLAFGKRQGREFIWNDLLSLETGSLKLANGRVIEKTLYNRRTRQDEPALFVALTFERREVLDSSNIKPMSNLIGVDRGENIPAVIALTDPEGCPLSRFKDSLGNPTHILRIGESYKEKQRTIQAKKEVEQRRAGGYSRKYASKAKNLADDMVRNTARDLLYYAVTQDAMLIFENLSRGFGRQGKRTFMAERQYTRMEDWLTAKLAYEGLPSKTYLSKTLAQYTSKTCSNCGFTITSADYDRVLEKLKKTATGWMTTINGKELKVEGQITYYNRYKRQNVVKDLSVELDRLSEESVNNDISSWTKGRSGEALSLLKKRFSHRPVQEKFVCLNCGFETHADEQAALNIARSWLFLRSQEYKKYQTNKTTGNTDKRAFVETWQSFYRKKLKEVWKPAV

SEQ ID NO: 36522 - protein, 980 aa, synthetic construct
  REGION 1..980: note = engineered CasX variant
QEIKRINKIRRRLVKDSNTKKAGKTGPMKTLLVRVMTPDLRERLENLRKKPENIPQPISNTSRANLNKLLTDYTEMKKAILHVYWEEFQKDPVGLMSRVAQPASKKIDQNKLKPEMDEKGNLTTAGFACSQCGQPLFVYKLEQVSEKGKAYTNYFGRCNVAEHEKLILLAQLKPEKDSDEAVTYSLGKFGQRALDFYSIHVTKESTHPVKPLAQIAGNRYASHPVGKALSDACMGTIASFLSKYQDIIIEHQKVVKGNQKRLESLRELAGKENLEYPSVTLPPQPHTKEGVDAYNEVIARVRMWVNLNLWQKLKLSRDDAKPLLRLKGFPSFPLVERQQANEVDWWDMVCNVKKLINEKKEDGKVFWQNLAGYKRQEALRPYLSSEEDRKKGKKFARYQLGDLLLHLEKKHGEDWGKVYDEAWERIDKKVEGLSKHIKLEEERRSEDAQSKAALTDWLRAKASFVIEGLKEADKDEFCRCELKLQKWYGDLRGKPFAIEAENSILDISGFSKQYNCAFIWQKDGVKKLNLYLIINYFKGGKLRFKKIKPEAFEANRFYTVINKKSGEIVPMEVNFNFDDPNLIILPLAFGKRQGREFIWNDLLSLETGSLKLANGRVIEKTLYNRRTRQDEPALFVALTFERREVLDSSNIKPMSNLIGVDRGENIPAVIALTDPEGCPLSRFKDSLGNPTHILRIGESYKEKQRTIQAKKEVEQRRAGGYSRKYASKAKNLADDMVRNTARDLLYYAVTQDAMLIFENLSRGFGRQGKRTFMAERQYTRMEDWLTAKLAYEGLPSKTYLSKTLAQYTSKTCSNCGFTITSADYDRVLEKLKKTATGWMTTINGKELKVEGQITYYNRYKRQNVVKDLSVELDRLSEESVNNDISSWTKGRSGEALSLLKKRFSHRPVQEKFVCLNCGFETHADEQAALNIARSWLFLRSQEYKKYQTNKTTGNTDKRAFVETWQSFYRKKLKEVWKPAV

SEQ ID NO: 36523 - protein, 980 aa, synthetic construct
  REGION 1..980: note = engineered CasX variant
QEIKRINKIRRRLVKDSNTKKAGKTGPMKTLLVRVMTPDLRERLENLRKKPENIPQPISNTSRANLNKLLTDYTEMKKAILHVYWEEFQKDPVGLMSRVAQPASKKIDQNKLKPEMDEKGNLTTAGFACSQCGQPLFVYKLEQVSEKGKAYTNYFGRCNVAEHEKLILLAQLKPEKDSDEAVTYSLGKFGQRALDFYSIHVTKESTHPVKPLAQIAGNRYASSPVGKALSDACMGTIASFLSKYQDIIIEHQKVVKGNQKRLESLRELAGKENLEYPSVTLPPQPHTKEGVDAYNEVIARVRMWVNLNLWQKLKLSRDDAKPLLRLKGFPSFPLVERQQANEVDWWDMVCNVKKLINEKKEDGKVFWQNLAGYKRQEALRPYLSSEEDRKKGKKFARYQLGDLLLHLEKKHGEDWGKVYDEAWERIDKKVEGLSKHIKLEEERRSEDAQSKAALTDWLRAKASFVIEGLKEADKDEFCRCELKLQKWYGDLRGKPFAIEAENSILDISGFSKQYNCAFIWQKDGVKKLNLYLIINYFKGGKLRFKKIKPEAFEANRFYTVINKKSGEIVPMEVNFNFDDPNLIILPLAFGKRQGREFIWNDLLSLETGSLKLANGRVIEKTLYNRRTRQDEPALFVALTFERREVLDSSNIKPMSNLIGVDRGENIPAVIALTDPEGCPLSRFKDSLGNPTHILRIGESYKEKQRTIQAKKEVEQRRAGGYSRKYASKAKNLADDMVRNTARDLLYYAVTQDAMLIFENLSRGFGRQGKRTFMAERQYTRMEDWLTAKLAYEGLPSKTYLSKTLAQYTSKTCSNCGFTITSADYDRVLEKLKKTATGWMTTINGKELKVEGQITYYNRYKRQNVVKDLSVELDRLSEESVNNDISSWTKGRSGEALSLLKKRFSHRPVQEKFVCLNCGFETHADEQAALNIARSWLFLRSQEYKKYQTNKTTGNTDKRAFVETWQSFYRKKLKEVWKPAV

SEQ ID NO: 36524 - protein, 980 aa, synthetic construct
  REGION 1..980: note = engineered CasX variant
QEIKRINKIRRRLVKDSNTKKAGKTGPMKTLLVRVMTPDLRERLENLRKKPENIPQPISNTSRANLNKLLTDYTEMKKAILHVYWEEFQKDPVGLMSRVAQPASKKIDQNKLKPEMDEKGNLTTAGFACSQCGQPLFVYKLEQVSEKGKAYTNYFGRCNVAEHEKLILLAQLKPEKDSDEAVTYSLGKFGQRALDFYSIHVTKESTHPVKPLAQIAGNRYASTPVGKALSDACMGTIASFLSKYQDIIIEHQKVVKGNQKRLESLRELAGKENLEYPSVTLPPQPHTKEGVDAYNEVIARVRMWVNLNLWQKLKLSRDDAKPLLRLKGFPSFPLVERQQANEVDWWDMVCNVKKLINEKKEDGKVFWQNLAGYKRQEALRPYLSSEEDRKKGKKFARYQLGDLLLHLEKKHGEDWGKVYDEAWERIDKKVEGLSKHIKLEEERRSEDAQSKAALTDWLRAKASFVIEGLKEADKDEFCRCELKLQKWYGDLRGKPFAIEAENSILDISGFSKQYNCAFIWQKDGVKKLNLYLIINYFKGGKLRFKKIKPEAFEANRFYTVINKKSGEIVPMEVNFNFDDPNLIILPLAFGKRQGREFIWNDLLSLETGSLKLANGRVIEKTLYNRRTRQDEPALFVALTFERREVLDSSNIKPMSNLIGVDRGENIPAVIALTDPEGCPLSRFKDSLGNPTHILRIGESYKEKQRTIQAKKEVEQRRAGGYSRKYASKAKNLADDMVRNTARDLLYYAVTQDAMLIFENLSRGFGRQGKRTFMAERQYTRMEDWLTAKLAYEGLPSKTYLSKTLAQYTSKTCSNCGFTITSADYDRVLEKLKKTATGWMTTINGKELKVEGQITYYNRYKRQNVVKDLSVELDRLSEESVNNDISSWTKGRSGEALSLLKKRFSHRPVQEKFVCLNCGFETHADEQAALNIARSWLFLRSQEYKKYQTNKTTGNTDKRAFVETWQSFYRKKLKEVWKPAV

SEQ ID NO: 36525 - protein, 980 aa, synthetic construct
  REGION 1..980: note = engineered CasX variant
QEIKRINKIRRRLVKDSNTKKAGKTGPMKTLLVRVMTPDLRERLENLRKKPENIPQPISNTSRANLNKLLTDYTEMKKAILHVYWEEFQKDPVGLMSRVAQPASKKIDQNKLKPEMDEKGNLTTAGFACSQCGQPLFVYKLEQVSEKGKAYTNYFGRCNVAEHEKLILLAQLKPEKDSDEAVTYSLGKFGQRALDFYSIHVTKESTHPVKPLAQIAGNRYASAPVGKALSDACMGTIASFLSKYQDIIIEHQKVVKGNQKRLESLRELAGKENLEYPSVTLPPQPHTKEGVDAYNEVIARVRMWVNLNLWQKLKLSRDDAKPLLRLKGFPSFPLVERQQANEVDWWDMVCNVKKLINEKKEDGKVFWQNLAGYKRQEALRPYLSSEEDRKKGKKFARYQLGDLLLHLEKKHGEDWGKVYDEAWERIDKKVEGLSKHIKLEEERRSEDAQSKAALTDWLRAKASFVIEGLKEADKDEFCRCELKLQKWYGDLRGKPFAIEAENSILDISGFSKQYNCAFIWQKDGVKKLNLYLIINYFKGGKLRFKKIKPEAFEANRFYTVINKKSGEIVPMEVNFNFDDPNLIILPLAFGKRQGREFIWNDLLSLETGSLKLANGRVIEKTLYNRRTRQDEPALFVALTFERREVLDSSNIKPMSNLIGVDRGENIPAVIALTDPEGCPLSRFKDSLGNPTHILRIGESYKEKQRTIQAKKEVEQRRAGGYSRKYASKAKNLADDMVRNTARDLLYYAVTQDAMLIFENLSRGFGRQGKRTFMAERQYTRMEDWLTAKLAYEGLPSKTYLSKTLAQYTSKTCSNCGFTITSADYDRVLEKLKKTATGWMTTINGKELKVEGQITYYNRYKRQNVVKDLSVELDRLSEESVNNDISSWTKGRSGEALSLLKKRFSHRPVQEKFVCLNCGFETHADEQAALNIARSWLFLRSQEYKKYQTNKTTGNTDKRAFVETWQSFYRKKLKEVWKPAV

SEQ ID NO: 36526 - protein, 980 aa, synthetic construct
  REGION 1..980: note = engineered CasX variant
QEIKRINKIRRRLVKDSNTKKAGKTGPMKTLLVRVMTPDLRERLENLRKKPENIPQPISNTSRANLNKLLTDYTEMKKAILHVYWEEFQKDPVGLMSRVAQPASKKIDQNKLKPEMDEKGNLTTAGFACSQCGQPLFVYKLEQVSEKGKAYTNYFGRCNVAEHEKLILLAQLKPEKDSDEAVTYSLGKFGQRALDFYSIHVTKESTHPVKPLAQIAGNRYASVPVGKALSDACMGTIASFLSKYQDIIIEHQKVVKGNQKRLESLRELAGKENLEYPSVTLPPQPHTKEGVDAYNEVIARVRMWVNLNLWQKLKLSRDDAKPLLRLKGFPSFPLVERQQANEVDWWDMVCNVKKLINEKKEDGKVFWQNLAGYKRQEALRPYLSSEEDRKKGKKFARYQLGDLLLHLEKKHGEDWGKVYDEAWERIDKKVEGLSKHIKLEEERRSEDAQSKAALTDWLRAKASFVIEGLKEADKDEFCRCELKLQKWYGDLRGKPFAIEAENSILDISGFSKQYNCAFIWQKDGVKKLNLYLIINYFKGGKLRFKKIKPEAFEANRFYTVINKKSGEIVPMEVNFNFDDPNLIILPLAFGKRQGREFIWNDLLSLETGSLKLANGRVIEKTLYNRRTRQDEPALFVALTFERREVLDSSNIKPMSNLIGVDRGENIPAVIALTDPEGCPLSRFKDSLGNPTHILRIGESYKEKQRTIQAKKEVEQRRAGGYSRKYASKAKNLADDMVRNTARDLLYYAVTQDAMLIFENLSRGFGRQGKRTFMAERQYTRMEDWLTAKLAYEGLPSKTYLSKTLAQYTSKTCSNCGFTITSADYDRVLEKLKKTATGWMTTINGKELKVEGQITYYNRYKRQNVVKDLSVELDRLSEESVNNDISSWTKGRSGEALSLLKKRFSHRPVQEKFVCLNCGFETHADEQAALNIARSWLFLRSQEYKKYQTNKTTGNTDKRAFVETWQSFYRKKLKEVWKPAV

SEQ ID NO: 36527 - protein, 980 aa, synthetic construct
  REGION 1..980: note = engineered CasX variant
QEIKRINKIRRRLVKDSNTKKAGKTGPMKTLLVRVMTPDLRERLENLRKKPENIPQPISNTSRANLNKLLTDYTEMKKAILHVYWEEFQKDPVGLMSRVAQPASKKIDQNKLKPEMDEKGNLTTAGFACSQCGQPLFVYKLEQVSEKGKAYTNYFGRCNVAEHEKLIKLAQLKPEKDSDEAVTYSLGKFGQRALDFYSIHVTKESTHPVKPLAQIAGNRYASGPVGKALSDACMGTIASFLSKYQDIIIEHQKVVKGNQKRLESLRELAGKENLEYPSVTLPPQPHTKEGVDAYNEVIARVRMWVNLNLWQKLKLSRDDAKPLLRLKGFPSFPLVERQQANEVDWWDMVCNVKKLINEKKEDGKVFWQNLAGYKRQEALRPYLSSEEDRKKGKKFARYQLGDLLLHLEKKHGEDWGKVYDEAWERIDKKVEGLSKHIKLEEERRSEDAQSKAALTDWLRAKASFVIEGLKEADKDEFCRCELKLQKWYGDLRGKPFAIEAENSILDISGFSKQYNCAFIWQKDGVKKLNLYLIINYFKGGKLRFKKIKPEAFEANRFYTVINKKSGEIVPMEVNFNFDDPNLIILPLAFGKRQGREFIWNDLLSLETGSLKLANGRVIEKTLYNRRTRQDEPALFVALTFERREVLDSSNIKPMSNLIGVDRGENIPAVIALTDPEGCPLSRFKDSLGNPTHILRIGESYKEKQRTIQAKKEVEQRRAGGYSRKYASKAKNLADDMVRNTARDLLYYAVTQDAMLIFENLSRGFGRQGKRTFMAERQYTRMEDWLTAKLAYEGLPSKTYLSKTLAQYTSKTCSNCGFTITSADYDRVLEKLKKTATGWMTTINGKELKVEGQITYYNRYKRQNVVKDLSVELDRLSEESVNNDISSWTKGRSGEALSLLKKRFSHRPVQEKFVCLNCGFETHADEQAALNIARSWLFLRSQEYKKYQTNKTTGNTDKRAFVETWQSFYRKKLKEVWKPAV

SEQ ID NO: 36528 - protein, 979 aa, synthetic construct
  REGION 1..979: note = engineered CasX variant
QEIKRINKIRRRLVKDSNTKKAGKTGPMKTLLVRVMTPDLRERLENLRKKPENIPQPISNTSRANLNKLLTDYTEMKKAILHVYWEEFQKDPVGLMSRVAQPASKKIDQNKLKPEMDEKGNLTTAGFACSQCGQPLFVYKLEQVSEKGKAYTNYFGRCNVAEHEKLILLAQLKPEKDSDEAVTYSLGKFGQRALDFYSIHVTKESTHPVKPLAQIAGNRYASPVGKALSDACMGTIASFLSKYQDIIIEHQKVVKGNQKRLESLRELAGKENLEYPSVTLPPQPHTKEGVDAYNEVIARVRMWVNLNLWQKLKLSRDDAKPLLRLKGFPSFPLVERQQANEVDWWDMVCNVKKLINEKKEDGKVFWQNLAGYKRQEALRPYLSSEEDRKKGKKFARYQLGDLLLHLEKKHGEDWGKVYDEAWERIDKKVEGLSKHIKLEEERRSEDAQSKAALTDWLRAKASFVIEGLKEADKDEFCRCELKLQKWYGDLRGKPFAIEAENSILDISGFSKQYNCAFIWQKDGVKKLNLYLIINYFKGGKLRFKKIKPEAFEANRFYTVINKKSGEIVPMEVNFNFDDPNLIILPLAFGKRQGREFIWNDLLSLETGSLKLANGRVIEKTLYNRRTRQDEPALFVALTFERREVLDSSNIKPMSNLIGVDRGENIPAVIALTDPEGCPLSRFKDSLGNPTHILRIGESYKEKQRTIQAKKEVEQRRAGGYSRKYASKAKNLADDMVRNTARDLLYYAVTQDAMLIFENLSRGFGRQGKRTFMAERQYTRMEDWLTAKLAYEGLPSKTYLSKTLAQYTSKTCSNCGFTITSADYDRVLEKLKKTATGWMTTINGKELKVEGQITYYNRYKRQNVVKDLSVELDRLSEESVNNDISSWTKGRSGEALSLLKKRFSHRPVQEKFVCLNCGFETHADEQAALNIARSWLFLRSQEYKKYQTNKTTGNTDKRAFVETWQSFYRKKLKEVWKPAV

SEQ ID NO: 36529 - protein, 979 aa, synthetic construct
  REGION 1..979: note = engineered CasX variant
QEIKRINKIRRRLVKDSNTKKAGKTGPMKTLLVRVMTPDLRERLENLRKKPENIPQPISNTSRANLNKLLTDYTEMKKAILHVYWEEFQKDPVGLMSRVAQPASKKIDQNKLKPEMDEKGNLTTAGFACSQCGQPLFVYKLEQVSEKGKAYTNYFGRCNVAEHEKLILLAQLKPEKDSDEAVTYSLGKFGQRALDFYSIHVTKESTHPVKPLAQIAGNRYASYPVGKALSDACMGTIASFLSKYQDIIIEHQKVVKGNQKRLESLRELAGKENLEYPSVTLPPQPHTKEGVDAYNEVIARVRMWVNLNLWQKLKLSRDDAKPLLRLKGFPSFPLVERQQANEVDWWDMVCNVKKLINEKKEDGKVFWQNLAGYKRQEALRPYLSSEEDRKKGKKFARYQLGDLLLHLEKKHGEDWGKVYDEAWERIDKKVEGLSKHIKLEEERRSEDAQSKAALTDWLRAKASFVIEGLKEADKDEFCRCELKLQKWYGDLRGKPFAIEAENSILDISGFSKQYNCAFIWQKDGVKKLNLYLIINYFKGGKLRFKKIKPEAFEANRFYTVINKKSGEIVPMEVNFNFDDPNLIILPLAFGKRQGREFIWNDLLSLETGSLKLANGRVIEKTLYNRRTRQDEPALFVALTFERREVLDSSNIKPMNLIGVDRGENIPAVIALTDPEGCPLSRFKDSLGNPTHILRIRESYKEKQRTIQAKKEVEQRRAGGYSRKYASKAKNLADDMVRNTARDLLYYAVTQDAMLIFENLSRGFGRQGKRTFMAERQYTRMEDWLTAKLAYEGLPSKTYLSKTLAQYTSKTCSNCGFTITSADYDRVLEKLKKTATGWMTTINGKELKVEGQITYYNRYKRQNVVKDLSVELDRLSEESVNNDISSWTKGRSGEALSLLKKRFSHRPVQEKFVCLNCGFETHADEQAALNIARSWLFLRSQEYKKYQTNKTTGNTDKRAFVETWQSFYRKKLKEVWKPAV

SEQ ID NO: 36530 - protein, 979 aa, synthetic construct
  REGION 1..979: note = engineered CasX variant
QEIKRINKIRRRLVKDSNTKKAGKTGPMKTLLVRVMTPDLRERLENLRKKPENIPQPISNTSRANLNKLLTDYTEMKKAILHVYWEEFQKDPVGLMSRVAQPASKKIDQNKLKPEMDEKGNLTTAGFACSQCGQPLFVYKLEQVSEKGKAYTNYFGRCNVAEHEKLILLAQLKPEKDSDEAVTYSLGKFGQRALDFYSIHVTKESTHPVKPLAQIAGNRYASHPVGKALSDACMGTIASFLSKYQDIIIEHQKVVKGNQKRLESLRELAGKENLEYPSVTLPPQPHTKEGVDAYNEVIARVRMWVNLNLWQKLKLSRDDAKPLLRLKGFPSFPLVERQQANEVDWWDMVCNVKKLINEKKEDGKVFWQNLAGYKRQEALRPYLSSEEDRKKGKKFARYQLGDLLLHLEKKHGEDWGKVYDEAWERIDKKVEGLSKHIKLEEERRSEDAQSKAALTDWLRAKASFVIEGLKEADKDEFCRCELKLQKWYGDLRGKPFAIEAENSILDISGFSKQYNCAFIWQKDGVKKLNLYLIINYFKGGKLRFKKIKPEAFEANRFYTVINKKSGEIVPMEVNFNFDDPNLIILPLAFGKRQGREFIWNDLLSLETGSLKLANGRVIEKTLYNRRTRQDEPALFVALTFERREVLDSSNIKPMNLIGVDRGENIPAVIALTDPEGCPLSRFKDSLGNPTHILRIRESYKEKQRTIQAKKEVEQRRAGGYSRKYASKAKNLADDMVRNTARDLLYYAVTQDAMLIFENLSRGFGRQGKRTFMAERQYTRMEDWLTAKLAYEGLPSKTYLSKTLAQYTSKTCSNCGFTITSADYDRVLEKLKKTATGWMTTINGKELKVEGQITYYNRYKRQNVVKDLSVELDRLSEESVNNDISSWTKGRSGEALSLLKKRFSHRPVQEKFVCLNCGFETHADEQAALNIARSWLFLRSQEYKKYQTNKTTGNTDKRAFVETWQSFYRKKLKEVWKPAV

SEQ ID NO: 36531 - protein, 979 aa, synthetic construct
  REGION 1..979: note = engineered CasX variant
QEIKRINKIRRRLVKDSNTKKAGKTGPMKTLLVRVMTPDLRERLENLRKKPENIPQPISNTSRANLNKLLTDYTEMKKAILHVYWEEFQKDPVGLMSRVAQPASKKIDQNKLKPEMDEKGNLTTAGFACSQCGQPLFVYKLEQVSEKGKAYTNYFGRCNVAEHEKLILLAQLKPEKDSDEAVTYSLGKFGQRALDFYSIHVTKESTHPVKPLAQIAGNRYASSPVGKALSDACMGTIASFLSKYQDIIIEHQKVVKGNQKRLESLRELAGKENLEYPSVTLPPQPHTKEGVDAYNEVIARVRMWVNLNLWQKLKLSRDDAKPLLRLKGFPSFPLVERQQANEVDWWDMVCNVKKLINEKKEDGKVFWQNLAGYKRQEALRPYLSSEEDRKKGKKFARYQLGDLLLHLEKKHGEDWGKVYDEAWERIDKKVEGLSKHIKLEEERRSEDAQSKAALTDWLRAKASFVIEGLKEADKDEFCRCELKLQKWYGDLRGKPFAIEAENSILDISGFSKQYNCAFIWQKDGVKKLNLYLIINYFKGGKLRFKKIKPEAFEANRFYTVINKKSGEIVPMEVNFNFDDPNLIILPLAFGKRQGREFIWNDLLSLETGSLKLANGRVIEKTLYNRRTRQDEPALFVALTFERREVLDSSNIKPMNLIGVDRGENIPAVIALTDPEGCPLSRFKDSLGNPTHILRIRESYKEKQRTIQAKKEVEQRRAGGYSRKYASKAKNLADDMVRNTARDLLYYAVTQDAMLIFENLSRGFGRQGKRTFMAERQYTRMEDWLTAKLAYEGLPSKTYLSKTLAQYTSKTCSNCGFTITSADYDRVLEKLKKTATGWMTTINGKELKVEGQITYYNRYKRQNVVKDLSVELDRLSEESVNNDISSWTKGRSGEALSLLKKRFSHRPVQEKFVCLNCGFETHADEQAALNIARSWLFLRSQEYKKYQTNKTTGNTDKRAFVETWQSFYRKKLKEVWKPAV

SEQ ID NO: 36532 - protein, 979 aa, synthetic construct
  REGION 1..979: note = engineered CasX variant
QEIKRINKIRRRLVKDSNTKKAGKTGPMKTLLVRVMTPDLRERLENLRKKPENIPQPISNTSRANLNKLLTDYTEMKKAILHVYWEEFQKDPVGLMSRVAQPASKKIDQNKLKPEMDEKGNLTTAGFACSQCGQPLFVYKLEQVSEKGKAYTNYFGRCNVAEHEKLILLAQLKPEKDSDEAVTYSLGKFGQRALDFYSIHVTKESTHPVKPLAQIAGNRYASTPVGKALSDACMGTIASFLSKYQDIIIEHQKVVKGNQKRLESLRELAGKENLEYPSVTLPPQPHTKEGVDAYNEVIARVRMWVNLNLWQKLKLSRDDAKPLLRLKGFPSFPLVERQQANEVDWWDMVCNVKKLINEKKEDGKVFWQNLAGYKRQEALRPYLSSEEDRKKGKKFARYQLGDLLLHLEKKHGEDWGKVYDEAWERIDKKVEGLSKHIKLEEERRSEDAQSKAALTDWLRAKASFVIEGLKEADKDEFCRCELKLQKWYGDLRGKPFAIEAENSILDISGFSKQYNCAFIWQKDGVKKLNLYLIINYFKGGKLRFKKIKPEAFEANRFYTVINKKSGEIVPMEVNFNFDDPNLIILPLAFGKRQGREFIWNDLLSLETGSLKLANGRVIEKTLYNRRTRQDEPALFVALTFERREVLDSSNIKPMNLIGVDRGENIPAVIALTDPEGCPLSRFKDSLGNPTHILRIRESYKEKQRTIQAKKEVEQRRAGGYSRKYASKAKNLADDMVRNTARDLLYYAVTQDAMLIFENLSRGFGRQGKRTFMAERQYTRMEDWLTAKLAYEGLPSKTYLSKTLAQYTSKTCSNCGFTITSADYDRVLEKLKKTATGWMTTINGKELKVEGQITYYNRYKRQNVVKDLSVELDRLSEESVNNDISSWTKGRSGEALSLLKKRFSHRPVQEKFVCLNCGFETHADEQAALNIARSWLFLRSQEYKKYQTNKTTGNTDKRAFVETWQSFYRKKLKEVWKPAV

SEQ ID NO: 36533 - protein, 979 aa, synthetic construct
  REGION 1..979: note = engineered CasX variant
QEIKRINKIRRRLVKDSNTKKAGKTGPMKTLLVRVMTPDLRERLENLRKKPENIPQPISNTSRANLNKLLTDYTEMKKAILHVYWEEFQKDPVGLMSRVAQPASKKIDQNKLKPEMDEKGNLTTAGFACSQCGQPLFVYKLEQVSEKGKAYTNYFGRCNVAEHEKLILLAQLKPEKDSDEAVTYSLGKFGQRALDFYSIHVTKESTHPVKPLAQIAGNRYASAPVGKALSDACMGTIASFLSKYQDIIIEHQKVVKGNQKRLESLRELAGKENLEYPSVTLPPQPHTKEGVDAYNEVIARVRMWVNLNLWQKLKLSRDDAKPLLRLKGFPSFPLVERQQANEVDWWDMVCNVKKLINEKKEDGKVFWQNLAGYKRQEALRPYLSSEEDRKKGKKFARYQLGDLLLHLEKKHGEDWGKVYDEAWERIDKKVEGLSKHIKLEEERRSEDAQSKAALTDWLRAKASFVIEGLKEADKDEFCRCELKLQKWYGDLRGKPFAIEAENSILDISGFSKQYNCAFIWQKDGVKKLNLYLIINYFKGGKLRFKKIKPEAFEANRFYTVINKKSGEIVPMEVNFNFDDPNLIILPLAFGKRQGREFIWNDLLSLETGSLKLANGRVIEKTLYNRRTRQDEPALFVALTFERREVLDSSNIKPMNLIGVDRGENIPAVIALTDPEGCPLSRFKDSLGNPTHILRIRESYKEKQRTIQAKKEVEQRRAGGYSRKYASKAKNLADDMVRNTARDLLYYAVTQDAMLIFENLSRGFGRQGKRTFMAERQYTRMEDWLTAKLAYEGLPSKTYLSKTLAQYTSKTCSNCGFTITSADYDRVLEKLKKTATGWMTTINGKELKVEGQITYYNRYKRQNVVKDLSVELDRLSEESVNNDISSWTKGRSGEALSLLKKRFSHRPVQEKFVCLNCGFETHADEQAALNIARSWLFLRSQEYKKYQTNKTTGNTDKRAFVETWQSFYRKKLKEVWKPAV

SEQ ID NO: 36534 - protein, 979 aa, synthetic construct
  REGION 1..979: note = engineered CasX variant
QEIKRINKIRRRLVKDSNTKKAGKTGPMKTLLVRVMTPDLRERLENLRKKPENIPQPISNTSRANLNKLLTDYTEMKKAILHVYWEEFQKDPVGLMSRVAQPASKKIDQNKLKPEMDEKGNLTTAGFACSQCGQPLFVYKLEQVSEKGKAYTNYFGRCNVAEHEKLILLAQLKPEKDSDEAVTYSLGKFGQRALDFYSIHVTKESTHPVKPLAQIAGNRYASVPVGKALSDACMGTIASFLSKYQDIIIEHQKVVKGNQKRLESLRELAGKENLEYPSVTLPPQPHTKEGVDAYNEVIARVRMWVNLNLWQKLKLSRDDAKPLLRLKGFPSFPLVERQQANEVDWWDMVCNVKKLINEKKEDGKVFWQNLAGYKRQEALRPYLSSEEDRKKGKKFARYQLGDLLLHLEKKHGEDWGKVYDEAWERIDKKVEGLSKHIKLEEERRSEDAQSKAALTDWLRAKASFVIEGLKEADKDEFCRCELKLQKWYGDLRGKPFAIEAENSILDISGFSKQYNCAFIWQKDGVKKLNLYLIINYFKGGKLRFKKIKPEAFEANRFYTVINKKSGEIVPMEVNFNFDDPNLIILPLAFGKRQGREFIWNDLLSLETGSLKLANGRVIEKTLYNRRTRQDEPALFVALTFERREVLDSSNIKPMNLIGVDRGENIPAVIALTDPEGCPLSRFKDSLGNPTHILRIRESYKEKQRTIQAKKEVEQRRAGGYSRKYASKAKNLADDMVRNTARDLLYYAVTQDAMLIFENLSRGFGRQGKRTFMAERQYTRMEDWLTAKLAYEGLPSKTYLSKTLAQYTSKTCSNCGFTITSADYDRVLEKLKKTATGWMTTINGKELKVEGQITYYNRYKRQNVVKDLSVELDRLSEESVNNDISSWTKGRSGEALSLLKKRFSHRPVQEKFVCLNCGFETHADEQAALNIARSWLFLRSQEYKKYQTNKTTGNTDKRAFVETWQSFYRKKLKEVWKPAV

SEQ ID NO: 36535 - protein, 979 aa, synthetic construct
  REGION 1..979: note = engineered CasX variant
QEIKRINKIRRRLVKDSNTKKAGKTGPMKTLLVRVMTPDLRERLENLRKKPENIPQPISNTSRANLNKLLTDYTEMKKAILHVYWEEFQKDPVGLMSRVAQPASKKIDQNKLKPEMDEKGNLTTAGFACSQCGQPLFVYKLEQVSEKGKAYTNYFGRCNVAEHEKLIKLAQLKPEKDSDEAVTYSLGKFGQRALDFYSIHVTKESTHPVKPLAQIAGNRYASGPVGKALSDACMGTIASFLSKYQDIIIEHQKVVKGNQKRLESLRELAGKENLEYPSVTLPPQPHTKEGVDAYNEVIARVRMWVNLNLWQKLKLSRDDAKPLLRLKGFPSFPLVERQQANEVDWWDMVCNVKKLINEKKEDGKVFWQNLAGYKRQEALRPYLSSEEDRKKGKKFARYQLGDLLLHLEKKHGEDWGKVYDEAWERIDKKVEGLSKHIKLEEERRSEDAQSKAALTDWLRAKASFVIEGLKEADKDEFCRCELKLQKWYGDLRGKPFAIEAENSILDISGFSKQYNCAFIWQKDGVKKLNLYLIINYFKGGKLRFKKIKPEAFEANRFYTVINKKSGEIVPMEVNFNFDDPNLIILPLAFGKRQGREFIWNDLLSLETGSLKLANGRVIEKTLYNRRTRQDEPALFVALTFERREVLDSSNIKPMNLIGVDRGENIPAVIALTDPEGCPLSRFKDSLGNPTHILRIRESYKEKQRTIQAKKEVEQRRAGGYSRKYASKAKNLADDMVRNTARDLLYYAVTQDAMLIFENLSRGFGRQGKRTFMAERQYTRMEDWLTAKLAYEGLPSKTYLSKTLAQYTSKTCSNCGFTITSADYDRVLEKLKKTATGWMTTINGKELKVEGQITYYNRYKRQNVVKDLSVELDRLSEESVNNDISSWTKGRSGEALSLLKKRFSHRPVQEKFVCLNCGFETHADEQAALNIARSWLFLRSQEYKKYQTNKTTGNTDKRAFVETWQSFYRKKLKEVWKPAV

SEQ ID NO: 36536 - protein, 978 aa, synthetic construct
  REGION 1..978: note = engineered CasX variant
QEIKRINKIRRRLVKDSNTKKAGKTGPMKTLLVRVMTPDLRERLENLRKKPENIPQPISNTSRANLNKLLTDYTEMKKAILHVYWEEFQKDPVGLMSRVAQPASKKIDQNKLKPEMDEKGNLTTAGFACSQCGQPLFVYKLEQVSEKGKAYTNYFGRCNVAEHEKLILLAQLKPEKDSDEAVTYSLGKFGQRALDFYSIHVTKESTHPVKPLAQIAGNRYASPVGKALSDACMGTIASFLSKYQDIIIEHQKVVKGNQKRLESLRELAGKENLEYPSVTLPPQPHTKEGVDAYNEVIARVRMWVNLNLWQKLKLSRDDAKPLLRLKGFPSFPLVERQQANEVDWWDMVCNVKKLINEKKEDGKVFWQNLAGYKRQEALRPYLSSEEDRKKGKKFARYQLGDLLLHLEKKHGEDWGKVYDEAWERIDKKVEGLSKHIKLEEERRSEDAQSKAALTDWLRAKASFVIEGLKEADKDEFCRCELKLQKWYGDLRGKPFAIEAENSILDISGFSKQYNCAFIWQKDGVKKLNLYLIINYFKGGKLRFKKIKPEAFEANRFYTVINKKSGEIVPMEVNFNFDDPNLIILPLAFGKRQGREFIWNDLLSLETGSLKLANGRVIEKTLYNRRTRQDEPALFVALTFERREVLDSSNIKPMNLIGVDRGENIPAVIALTDPEGCPLSRFKDSLGNPTHILRIRESYKEKQRTIQAKKEVEQRRAGGYSRKYASKAKNLADDMVRNTARDLLYYAVTQDAMLIFENLSRGFGRQGKRTFMAERQYTRMEDWLTAKLAYEGLPSKTYLSKTLAQYTSKTCSNCGFTITSADYDRVLEKLKKTATGWMTTINGKELKVEGQITYYNRYKRQNVVKDLSVELDRLSEESVNNDISSWTKGRSGEALSLLKKRFSHRPVQEKFVCLNCGFETHADEQAALNIARSWLFLRSQEYKKYQTNKTTGNTDKRAFVETWQSFYRKKLKEVWKPAV

SEQ ID NO: 36537 - protein, 979 aa, synthetic construct
  REGION 1..979: note = engineered CasX variant
QEIKRINKIRRRLVKDSNTKKAGKTGPMKTLLVRVMTPDLRERLENLRKKPENIPQPISNTSRANLNKLLTDYTEMKKAILHVYWEEFQKDPVGLMSRVAQPASKKIDQNKLKPEMDEKGNLTTAGFACSQCGQPLFVYKLEQVSEKGKAYTNYFGRCNVAEHEKLILLAQLKPEKDSDEAVTYSLGKFGQRALDFYSIHVTKESTHPVKPLAQIAGNRYASYPVGKALSDACMGTIASFLSKYQDIIIEHQKVVKGNQKRLESLRELAGKENLEYPSVTLPPQPHTKEGVDAYNEVIARVRMWVNLNLWQKLKLSRDDAKPLLRLKGFPSFPLVERQQANEVDWWDMVCNVKKLINEKKEDGKVFWQNLAGYKRQEALRPYLSSEEDRKKGKKFARYQLGDLLLHLEKKHGEDWGKVYDEAWERIDKKVEGLSKHIKLEEERRSEDAQSKAALTDWLRAKASFVIEGLKEADKDEFCRCELKLQKWYGDLRGKPFAIEAENSILDISGFSKQYNCAFIWQKDGVKKLNLYLIINYFKGGKLRFKKIKPEAFEANRFYTVINKKSGEIVPMEVNFNFDDPNLIILPLAFGKRQGREFIWNDLLSLETGSLKLANGRVIEKTLYNRRTRQDEPALFVALTFERREVLDSSNIKPMNLIGVDRGENIPAVIALTDPEGCPLSRFKDSLGNPTHILRIGESYKEKQRTIQAKKEVEQRRAGGYSRKYASKAKNLADDMVRNTARDLLYYAVTQDAMLIFENLSRGFGRQGKRTFSAERQYTRMEDWLTAKLAYEGLPSKTYLSKTLAQYTSKTCSNCGFTITSADYDRVLEKLKKTATGWMTTINGKELKVEGQITYYNRYKRQNVVKDLSVELDRLSEESVNNDISSWTKGRSGEALSLLKKRFSHRPVQEKFVCLNCGFETHADEQAALNIARSWLFLRSQEYKKYQTNKTTGNTDKRAFVETWQSFYRKKLKEVWKPAV

SEQ ID NO: 36538 - protein, 979 aa, synthetic construct
  REGION 1..979: note = engineered CasX variant
QEIKRINKIRRRLVKDSNTKKAGKTGPMKTLLVRVMTPDLRERLENLRKKPENIPQPISNTSRANLNKLLTDYTEMKKAILHVYWEEFQKDPVGLMSRVAQPASKKIDQNKLKPEMDEKGNLTTAGFACSQCGQPLFVYKLEQVSEKGKAYTNYFGRCNVAEHEKLILLAQLKPEKDSDEAVTYSLGKFGQRALDFYSIHVTKESTHPVKPLAQIAGNRYASHPVGKALSDACMGTIASFLSKYQDIIIEHQKVVKGNQKRLESLRELAGKENLEYPSVTLPPQPHTKEGVDAYNEVIARVRMWVNLNLWQKLKLSRDDAKPLLRLKGFPSFPLVERQQANEVDWWDMVCNVKKLINEKKEDGKVFWQNLAGYKRQEALRPYLSSEEDRKKGKKFARYQLGDLLLHLEKKHGEDWGKVYDEAWERIDKKVEGLSKHIKLEEERRSEDAQSKAALTDWLRAKASFVIEGLKEADKDEFCRCELKLQKWYGDLRGKPFAIEAENSILDISGFSKQYNCAFIWQKDGVKKLNLYLIINYFKGGKLRFKKIKPEAFEANRFYTVINKKSGEIVPMEVNFNFDDPNLIILPLAFGKRQGREFIWNDLLSLETGSLKLANGRVIEKTLYNRRTRQDEPALFVALTFERREVLDSSNIKPMNLIGVDRGENIPAVIALTDPEGCPLSRFKDSLGNPTHILRIGESYKEKQRTIQAKKEVEQRRAGGYSRKYASKAKNLADDMVRNTARDLLYYAVTQDAMLIFENLSRGFGRQGKRTFSAERQYTRMEDWLTAKLAYEGLPSKTYLSKTLAQYTSKTCSNCGFTITSADYDRVLEKLKKTATGWMTTINGKELKVEGQITYYNRYKRQNVVKDLSVELDRLSEESVNNDISSWTKGRSGEALSLLKKRFSHRPVQEKFVCLNCGFETHADEQAALNIARSWLFLRSQEYKKYQTNKTTGNTDKRAFVETWQSFYRKKLKEVWKPAV

SEQ ID NO: 36539 - protein, 979 aa, synthetic construct
  REGION 1..979: note = engineered CasX variant
QEIKRINKIRRRLVKDSNTKKAGKTGPMKTLLVRVMTPDLRERLENLRKKPENIPQPISNTSRANLNKLLTDYTEMKKAILHVYWEEFQKDPVGLMSRVAQPASKKIDQNKLKPEMDEKGNLTTAGFACSQCGQPLFVYKLEQVSEKGKAYTNYFGRCNVAEHEKLILLAQLKPEKDSDEAVTYSLGKFGQRALDFYSIHVTKESTHPVKPLAQIAGNRYASSPVGKALSDACMGTIASFLSKYQDIIIEHQKVVKGNQKRLESLRELAGKENLEYPSVTLPPQPHTKEGVDAYNEVIARVRMWVNLNLWQKLKLSRDDAKPLLRLKGFPSFPLVERQQANEVDWWDMVCNVKKLINEKKEDGKVFWQNLAGYKRQEALRPYLSSEEDRKKGKKFARYQLGDLLLHLEKKHGEDWGKVYDEAWERIDKKVEGLSKHIKLEEERRSEDAQSKAALTDWLRAKASFVIEGLKEADKDEFCRCELKLQKWYGDLRGKPFAIEAENSILDISGFSKQYNCAFIWQKDGVKKLNLYLIINYFKGGKLRFKKIKPEAFEANRFYTVINKKSGEIVPMEVNFNFDDPNLIILPLAFGKRQGREFIWNDLLSLETGSLKLANGRVIEKTLYNRRTRQDEPALFVALTFERREVLDSSNIKPMNLIGVDRGENIPAVIALTDPEGCPLSRFKDSLGNPTHILRIGESYKEKQRTIQAKKEVEQRRAGGYSRKYASKAKNLADDMVRNTARDLLYYAVTQDAMLIFENLSRGFGRQGKRTFSAERQYTRMEDWLTAKLAYEGLPSKTYLSKTLAQYTSKTCSNCGFTITSADYDRVLEKLKKTATGWMTTINGKELKVEGQITYYNRYKRQNVVKDLSVELDRLSEESVNNDISSWTKGRSGEALSLLKKRFSHRPVQEKFVCLNCGFETHADEQAALNIARSWLFLRSQEYKKYQTNKTTGNTDKRAFVETWQSFYRKKLKEVWKPAV

SEQ ID NO: 36540 - protein, 979 aa, synthetic construct
  REGION 1..979: note = engineered CasX variant
QEIKRINKIRRRLVKDSNTKKAGKTGPMKTLLVRVMTPDLRERLENLRKKPENIPQPISNTSRANLNKLLTDYTEMKKAILHVYWEEFQKDPVGLMSRVAQPASKKIDQNKLKPEMDEKGNLTTAGFACSQCGQPLFVYKLEQVSEKGKAYTNYFGRCNVAEHEKLILLAQLKPEKDSDEAVTYSLGKFGQRALDFYSIHVTKESTHPVKPLAQIAGNRYASTPVGKALSDACMGTIASFLSKYQDIIIEHQKVVKGNQKRLESLRELAGKENLEYPSVTLPPQPHTKEGVDAYNEVIARVRMWVNLNLWQKLKLSRDDAKPLLRLKGFPSFPLVERQQANEVDWWDMVCNVKKLINEKKEDGKVFWQNLAGYKRQEALRPYLSSEEDRKKGKKFARYQLGDLLLHLEKKHGEDWGKVYDEAWERIDKKVEGLSKHIKLEEERRSEDAQSKAALTDWLRAKASFVIEGLKEADKDEFCRCELKLQKWYGDLRGKPFAIEAENSILDISGFSKQYNCAFIWQKDGVKKLNLYLIINYFKGGKLRFKKIKPEAFEANRFYTVINKKSGEIVPMEVNFNFDDPNLIILPLAFGKRQGREFIWNDLLSLETGSLKLANGRVIEKTLYNRRTRQDEPALFVALTFERREVLDSSNIKPMNLIGVDRGENIPAVIALTDPEGCPLSRFKDSLGNPTHILRIGESYKEKQRTIQAKKEVEQRRAGGYSRKYASKAKNLADDMVRNTARDLLYYAVTQDAMLIFENLSRGFGRQGKRTFSAERQYTRMEDWLTAKLAYEGLPSKTYLSKTLAQYTSKTCSNCGFTITSADYDRVLEKLKKTATGWMTTINGKELKVEGQITYYNRYKRQNVVKDLSVELDRLSEESVNNDISSWTKGRSGEALSLLKKRFSHRPVQEKFVCLNCGFETHADEQAALNIARSWLFLRSQEYKKYQTNKTTGNTDKRAFVETWQSFYRKKLKEVWKPAV

SEQ ID NO: 36541 - protein, 979 aa, synthetic construct
  REGION 1..979: note = engineered CasX variant
QEIKRINKIRRRLVKDSNTKKAGKTGPMKTLLVRVMTPDLRERLENLRKKPENIPQPISNTSRANLNKLLTDYTEMKKAILHVYWEEFQKDPVGLMSRVAQPASKKIDQNKLKPEMDEKGNLTTAGFACSQCGQPLFVYKLEQVSEKGKAYTNYFGRCNVAEHEKLILLAQLKPEKDSDEAVTYSLGKFGQRALDFYSIHVTKESTHPVKPLAQIAGNRYASAPVGKALSDACMGTIASFLSKYQDIIIEHQKVVKGNQKRLESLRELAGKENLEYPSVTLPPQPHTKEGVDAYNEVIARVRMWVNLNLWQKLKLSRDDAKPLLRLKGFPSFPLVERQQANEVDWWDMVCNVKKLINEKKEDGKVFWQNLAGYKRQEALRPYLSSEEDRKKGKKFARYQLGDLLLHLEKKHGEDWGKVYDEAWERIDKKVEGLSKHIKLEEERRSEDAQSKAALTDWLRAKASFVIEGLKEADKDEFCRCELKLQKWYGDLRGKPFAIEAENSILDISGFSKQYNCAFIWQKDGVKKLNLYLIINYFKGGKLRFKKIKPEAFEANRFYTVINKKSGEIVPMEVNFNFDDPNLIILPLAFGKRQGREFIWNDLLSLETGSLKLANGRVIEKTLYNRRTRQDEPALFVALTFERREVLDSSNIKPMNLIGVDRGENIPAVIALTDPEGCPLSRFKDSLGNPTHILRIGESYKEKQRTIQAKKEVEQRRAGGYSRKYASKAKNLADDMVRNTARDLLYYAVTQDAMLIFENLSRGFGRQGKRTFSAERQYTRMEDWLTAKLAYEGLPSKTYLSKTLAQYTSKTCSNCGFTITSADYDRVLEKLKKTATGWMTTINGKELKVEGQITYYNRYKRQNVVKDLSVELDRLSEESVNNDISSWTKGRSGEALSLLKKRFSHRPVQEKFVCLNCGFETHADEQAALNIARSWLFLRSQEYKKYQTNKTTGNTDKRAFVETWQSFYRKKLKEVWKPAV

SEQ ID NO: 36542 - protein, 979 aa, synthetic construct
  REGION 1..979: note = engineered CasX variant
QEIKRINKIRRRLVKDSNTKKAGKTGPMKTLLVRVMTPDLRERLENLRKKPENIPQPISNTSRANLNKLLTDYTEMKKAILHVYWEEFQKDPVGLMSRVAQPASKKIDQNKLKPEMDEKGNLTTAGFACSQCGQPLFVYKLEQVSEKGKAYTNYFGRCNVAEHEKLILLAQLKPEKDSDEAVTYSLGKFGQRALDFYSIHVTKESTHPVKPLAQIAGNRYASVPVGKALSDACMGTIASFLSKYQDIIIEHQKVVKGNQKRLESLRELAGKENLEYPSVTLPPQPHTKEGVDAYNEVIARVRMWVNLNLWQKLKLSRDDAKPLLRLKGFPSFPLVERQQANEVDWWDMVCNVKKLINEKKEDGKVFWQNLAGYKRQEALRPYLSSEEDRKKGKKFARYQLGDLLLHLEKKHGEDWGKVYDEAWERIDKKVEGLSKHIKLEEERRSEDAQSKAALTDWLRAKASFVIEGLKEADKDEFCRCELKLQKWYGDLRGKPFAIEAENSILDISGFSKQYNCAFIWQKDGVKKLNLYLIINYFKGGKLRFKKIKPEAFEANRFYTVINKKSGEIVPMEVNFNFDDPNLIILPLAFGKRQGREFIWNDLLSLETGSLKLANGRVIEKTLYNRRTRQDEPALFVALTFERREVLDSSNIKPMNLIGVDRGENIPAVIALTDPEGCPLSRFKDSLGNPTHILRIGESYKEKQRTIQAKKEVEQRRAGGYSRKYASKAKNLADDMVRNTARDLLYYAVTQDAMLIFENLSRGFGRQGKRTFSAERQYTRMEDWLTAKLAYEGLPSKTYLSKTLAQYTSKTCSNCGFTITSADYDRVLEKLKKTATGWMTTINGKELKVEGQITYYNRYKRQNVVKDLSVELDRLSEESVNNDISSWTKGRSGEALSLLKKRFSHRPVQEKFVCLNCGFETHADEQAALNIARSWLFLRSQEYKKYQTNKTTGNTDKRAFVETWQSFYRKKLKEVWKPAV

SEQ ID NO: 36543 - protein, 979 aa, synthetic construct
  REGION 1..979: note = engineered CasX variant
QEIKRINKIRRRLVKDSNTKKAGKTGPMKTLLVRVMTPDLRERLENLRKKPENIPQPISNTSRANLNKLLTDYTEMKKAILHVYWEEFQKDPVGLMSRVAQPASKKIDQNKLKPEMDEKGNLTTAGFACSQCGQPLFVYKLEQVSEKGKAYTNYFGRCNVAEHEKLIKLAQLKPEKDSDEAVTYSLGKFGQRALDFYSIHVTKESTHPVKPLAQIAGNRYASGPVGKALSDACMGTIASFLSKYQDIIIEHQKVVKGNQKRLESLRELAGKENLEYPSVTLPPQPHTKEGVDAYNEVIARVRMWVNLNLWQKLKLSRDDAKPLLRLKGFPSFPLVERQQANEVDWWDMVCNVKKLINEKKEDGKVFWQNLAGYKRQEALRPYLSSEEDRKKGKKFARYQLGDLLLHLEKKHGEDWGKVYDEAWERIDKKVEGLSKHIKLEEERRSEDAQSKAALTDWLRAKASFVIEGLKEADKDEFCRCELKLQKWYGDLRGKPFAIEAENSILDISGFSKQYNCAFIWQKDGVKKLNLYLIINYFKGGKLRFKKIKPEAFEANRFYTVINKKSGEIVPMEVNFNFDDPNLIILPLAFGKRQGREFIWNDLLSLETGSLKLANGRVIEKTLYNRRTRQDEPALFVALTFERREVLDSSNIKPMNLIGVDRGENIPAVIALTDPEGCPLSRFKDSLGNPTHILRIGESYKEKQRTIQAKKEVEQRRAGGYSRKYASKAKNLADDMVRNTARDLLYYAVTQDAMLIFENLSRGFGRQGKRTFSAERQYTRMEDWLTAKLAYEGLPSKTYLSKTLAQYTSKTCSNCGFTITSADYDRVLEKLKKTATGWMTTINGKELKVEGQITYYNRYKRQNVVKDLSVELDRLSEESVNNDISSWTKGRSGEALSLLKKRFSHRPVQEKFVCLNCGFETHADEQAALNIARSWLFLRSQEYKKYQTNKTTGNTDKRAFVETWQSFYRKKLKEVWKPAV

SEQ ID NO: 36544 - protein, 978 aa, synthetic construct
  REGION 1..978: note = engineered CasX variant
QEIKRINKIRRRLVKDSNTKKAGKTGPMKTLLVRVMTPDLRERLENLRKKPENIPQPISNTSRANLNKLLTDYTEMKKAILHVYWEEFQKDPVGLMSRVAQPASKKIDQNKLKPEMDEKGNLTTAGFACSQCGQPLFVYKLEQVSEKGKAYTNYFGRCNVAEHEKLILLAQLKPEKDSDEAVTYSLGKFGQRALDFYSIHVTKESTHPVKPLAQIAGNRYASPVGKALSDACMGTIASFLSKYQDIIIEHQKVVKGNQKRLESLRELAGKENLEYPSVTLPPQPHTKEGVDAYNEVIARVRMWVNLNLWQKLKLSRDDAKPLLRLKGFPSFPLVERQQANEVDWWDMVCNVKKLINEKKEDGKVFWQNLAGYKRQEALRPYLSSEEDRKKGKKFARYQLGDLLLHLEKKHGEDWGKVYDEAWERIDKKVEGLSKHIKLEEERRSEDAQSKAALTDWLRAKASFVIEGLKEADKDEFCRCELKLQKWYGDLRGKPFAIEAENSILDISGFSKQYNCAFIWQKDGVKKLNLYLIINYFKGGKLRFKKIKPEAFEANRFYTVINKKSGEIVPMEVNFNFDDPNLIILPLAFGKRQGREFIWNDLLSLETGSLKLANGRVIEKTLYNRRTRQDEPALFVALTFERREVLDSSNIKPMNLIGVDRGENIPAVIALTDPEGCPLSRFKDSLGNPTHILRIGESYKEKQRTIQAKKEVEQRRAGGYSRKYASKAKNLADDMVRNTARDLLYYAVTQDAMLIFENLSRGFGRQGKRTFSAERQYTRMEDWLTAKLAYEGLPSKTYLSKTLAQYTSKTCSNCGFTITSADYDRVLEKLKKTATGWMTTINGKELKVEGQITYYNRYKRQNVVKDLSVELDRLSEESVNNDISSWTKGRSGEALSLLKKRFSHRPVQEKFVCLNCGFETHADEQAALNIARSWLFLRSQEYKKYQTNKTTGNTDKRAFVETWQSFYRKKLKEVWKPAV

SEQ ID NO: 36545 - protein, 979 aa, synthetic construct
  REGION 1..979: note = engineered CasX variant
QEIKRINKIRRRLVKDSNTKKAGKTGPMKTLLVRVMTPDLRERLENLRKKPENIPQPISNTSRANLNKLLTDYTEMKKAILHVYWEEFQKDPVGLMSRVAQPASKKIDQNKLKPEMDEKGNLTTAGFACSQCGQPLFVYKLEQVSEKGKAYTNYFGRCNVAEHEKLILLAQLKPEKDSDEAVTYSLGKFGQRALDFYSIHVTKESTHPVKPLAQIAGNRYASYPVGKALSDACMGTIASFLSKYQDIIIEHQKVVKGNQKRLESLRELAGKENLEYPSVTLPPQPHTKEGVDAYNEVIARVRMWVNLNLWQKLKLSRDDAKPLLRLKGFPSFPLVERQQANEVDWWDMVCNVKKLINEKKEDGKVFWQNLAGYKRQEALRPYLSSEEDRKKGKKFARYQLGDLLLHLEKKHGEDWGKVYDEAWERIDKKVEGLSKHIKLEEERRSEDAQSKAALTDWLRAKASFVIEGLKEADKDEFCRCELKLQKWYGDLRGKPFAIEAENSILDISGFSKQYNCAFIWQKDGVKKLNLYLIINYFKGGKLRFKKIKPEAFEANRFYTVINKKSGEIVPMEVNFNFDDPNLIILPLAFGKRQGREFIWNDLLSLETGSLKLANGRVIEKTLYNRRTRQDEPALFVALTFERREVLDSSNIKPMNLIGVDRGENIPAVIALTDPEGCPLSRFKDSLGNPTHILRIGESYKEKQRTIQAKKEVEQRRAGGYSRKYASKAKNLADDMVRNTARDLLYYAVTQDAMLIFENLSRGFGRQGKRTFMAERQYTRMEDWLTAKLAYEGLPSKTYLSKTLAQYTSKTCSNCGFTITSADYDRVLEKLKKTATGWMTTINGKELKVEGQITYYNRYKRQNVVKDLSVELDRLSEESVNNDISSWDKGRSGEALSLLKKRFSHRPVQEKFVCLNCGFETHADEQAALNIARSWLFLRSQEYKKYQTNKTTGNTDKRAFVETWQSFYRKKLKEVWKPAV

SEQ ID NO: 36546 - protein, 979 aa, synthetic construct
  REGION 1..979: note = engineered CasX variant
QEIKRINKIRRRLVKDSNTKKAGKTGPMKTLLVRVMTPDLRERLENLRKKPENIPQPISNTSRANLNKLLTDYTEMKKAILHVYWEEFQKDPVGLMSRVAQPASKKIDQNKLKPEMDEKGNLTTAGFACSQCGQPLFVYKLEQVSEKGKAYTNYFGRCNVAEHEKLILLAQLKPEKDSDEAVTYSLGKFGQRALDFYSIHVTKESTHPVKPLAQIAGNRYASHPVGKALSDACMGTIASFLSKYQDIIIEHQKVVKGNQKRLESLRELAGKENLEYPSVTLPPQPHTKEGVDAYNEVIARVRMWVNLNLWQKLKLSRDDAKPLLRLKGFPSFPLVERQQANEVDWWDMVCNVKKLINEKKEDGKVFWQNLAGYKRQEALRPYLSSEEDRKKGKKFARYQLGDLLLHLEKKHGEDWGKVYDEAWERIDKKVEGLSKHIKLEEERRSEDAQSKAALTDWLRAKASFVIEGLKEADKDEFCRCELKLQKWYGDLRGKPFAIEAENSILDISGFSKQYNCAFIWQKDGVKKLNLYLIINYFKGGKLRFKKIKPEAFEANRFYTVINKKSGEIVPMEVNFNFDDPNLIILPLAFGKRQGREFIWNDLLSLETGSLKLANGRVIEKTLYNRRTRQDEPALFVALTFERREVLDSSNIKPMNLIGVDRGENIPAVIALTDPEGCPLSRFKDSLGNPTHILRIGESYKEKQRTIQAKKEVEQRRAGGYSRKYASKAKNLADDMVRNTARDLLYYAVTQDAMLIFENLSRGFGRQGKRTFMAERQYTRMEDWLTAKLAYEGLPSKTYLSKTLAQYTSKTCSNCGFTITSADYDRVLEKLKKTATGWMTTINGKELKVEGQITYYNRYKRQNVVKDLSVELDRLSEESVNNDISSWDKGRSGEALSLLKKRFSHRPVQEKFVCLNCGFETHADEQAALNIARSWLFLRSQEYKKYQTNKTTGNTDKRAFVETWQSFYRKKLKEVWKPAV

SEQ ID NO: 36547 - protein, 979 aa, synthetic construct
  REGION 1..979: note = engineered CasX variant
QEIKRINKIRRRLVKDSNTKKAGKTGPMKTLLVRVMTPDLRERLENLRKKPENIPQPISNTSRANLNKLLTDYTEMKKAILHVYWEEFQKDPVGLMSRVAQPASKKIDQNKLKPEMDEKGNLTTAGFACSQCGQPLFVYKLEQVSEKGKAYTNYFGRCNVAEHEKLILLAQLKPEKDSDEAVTYSLGKFGQRALDFYSIHVTKESTHPVKPLAQIAGNRYASSPVGKALSDACMGTIASFLSKYQDIIIEHQKVVKGNQKRLESLRELAGKENLEYPSVTLPPQPHTKEGVDAYNEVIARVRMWVNLNLWQKLKLSRDDAKPLLRLKGFPSFPLVERQQANEVDWWDMVCNVKKLINEKKEDGKVFWQNLAGYKRQEALRPYLSSEEDRKKGKKFARYQLGDLLLHLEKKHGEDWGKVYDEAWERIDKKVEGLSKHIKLEEERRSEDAQSKAALTDWLRAKASFVIEGLKEADKDEFCRCELKLQKWYGDLRGKPFAIEAENSILDISGFSKQYNCAFIWQKDGVKKLNLYLIINYFKGGKLRFKKIKPEAFEANRFYTVINKKSGEIVPMEVNFNFDDPNLIILPLAFGKRQGREFIWNDLLSLETGSLKLANGRVIEKTLYNRRTRQDEPALFVALTFERREVLDSSNIKPMNLIGVDRGENIPAVIALTDPEGCPLSRFKDSLGNPTHILRIGESYKEKQRTIQAKKEVEQRRAGGYSRKYASKAKNLADDMVRNTARDLLYYAVTQDAMLIFENLSRGFGRQGKRTFMAERQYTRMEDWLTAKLAYEGLPSKTYLSKTLAQYTSKTCSNCGFTITSADYDRVLEKLKKTATGWMTTINGKELKVEGQITYYNRYKRQNVVKDLSVELDRLSEESVNNDISSWDKGRSGEALSLLKKRFSHRPVQEKFVCLNCGFETHADEQAALNIARSWLFLRSQEYKKYQTNKTTGNTDKRAFVETWQSFYRKKLKEVWKPAV

SEQ ID NO: 36548 - protein, 979 aa, synthetic construct
  REGION 1..979: note = engineered CasX variant
QEIKRINKIRRRLVKDSNTKKAGKTGPMKTLLVRVMTPDLRERLENLRKKPENIPQPISNTSRANLNKLLTDYTEMKKAILHVYWEEFQKDPVGLMSRVAQPASKKIDQNKLKPEMDEKGNLTTAGFACSQCGQPLFVYKLEQVSEKGKAYTNYFGRCNVAEHEKLILLAQLKPEKDSDEAVTYSLGKFGQRALDFYSIHVTKESTHPVKPLAQIAGNRYASTPVGKALSDACMGTIASFLSKYQDIIIEHQKVVKGNQKRLESLRELAGKENLEYPSVTLPPQPHTKEGVDAYNEVIARVRMWVNLNLWQKLKLSRDDAKPLLRLKGFPSFPLVERQQANEVDWWDMVCNVKKLINEKKEDGKVFWQNLAGYKRQEALRPYLSSEEDRKKGKKFARYQLGDLLLHLEKKHGEDWGKVYDEAWERIDKKVEGLSKHIKLEEERRSEDAQSKAALTDWLRAKASFVIEGLKEADKDEFCRCELKLQKWYGDLRGKPFAIEAENSILDISGFSKQYNCAFIWQKDGVKKLNLYLIINYFKGGKLRFKKIKPEAFEANRFYTVINKKSGEIVPMEVNFNFDDPNLIILPLAFGKRQGREFIWNDLLSLETGSLKLANGRVIEKTLYNRRTRQDEPALFVALTFERREVLDSSNIKPMNLIGVDRGENIPAVIALTDPEGCPLSRFKDSLGNPTHILRIGESYKEKQRTIQAKKEVEQRRAGGYSRKYASKAKNLADDMVRNTARDLLYYAVTQDAMLIFENLSRGFGRQGKRTFMAERQYTRMEDWLTAKLAYEGLPSKTYLSKTLAQYTSKTCSNCGFTITSADYDRVLEKLKKTATGWMTTINGKELKVEGQITYYNRYKRQNVVKDLSVELDRLSEESVNNDISSWDKGRSGEALSLLKKRFSHRPVQEKFVCLNCGFETHADEQAALNIARSWLFLRSQEYKKYQTNKTTGNTDKRAFVETWQSFYRKKLKEVWKPAV

SEQ ID NO: 36549 - protein, 979 aa, synthetic construct
  REGION 1..979: note = engineered CasX variant
QEIKRINKIRRRLVKDSNTKKAGKTGPMKTLLVRVMTPDLRERLENLRKKPENIPQPISNTSRANLNKLLTDYTEMKKAILHVYWEEFQKDPVGLMSRVAQPASKKIDQNKLKPEMDEKGNLTTAGFACSQCGQPLFVYKLEQVSEKGKAYTNYFGRCNVAEHEKLILLAQLKPEKDSDEAVTYSLGKFGQRALDFYSIHVTKESTHPVKPLAQIAGNRYASAPVGKALSDACMGTIASFLSKYQDIIIEHQKVVKGNQKRLESLRELAGKENLEYPSVTLPPQPHTKEGVDAYNEVIARVRMWVNLNLWQKLKLSRDDAKPLLRLKGFPSFPLVERQQANEVDWWDMVCNVKKLINEKKEDGKVFWQNLAGYKRQEALRPYLSSEEDRKKGKKFARYQLGDLLLHLEKKHGEDWGKVYDEAWERIDKKVEGLSKHIKLEEERRSEDAQSKAALTDWLRAKASFVIEGLKEADKDEFCRCELKLQKWYGDLRGKPFAIEAENSILDISGFSKQYNCAFIWQKDGVKKLNLYLIINYFKGGKLRFKKIKPEAFEANRFYTVINKKSGEIVPMEVNFNFDDPNLIILPLAFGKRQGREFIWNDLLSLETGSLKLANGRVIEKTLYNRRTRQDEPALFVALTFERREVLDSSNIKPMNLIGVDRGENIPAVIALTDPEGCPLSRFKDSLGNPTHILRIGESYKEKQRTIQAKKEVEQRRAGGYSRKYASKAKNLADDMVRNTARDLLYYAVTQDAMLIFENLSRGFGRQGKRTFMAERQYTRMEDWLTAKLAYEGLPSKTYLSKTLAQYTSKTCSNCGFTITSADYDRVLEKLKKTATGWMTTINGKELKVEGQITYYNRYKRQNVVKDLSVELDRLSEESVNNDISSWDKGRSGEALSLLKKRFSHRPVQEKFVCLNCGFETHADEQAALNIARSWLFLRSQEYKKYQTNKTTGNTDKRAFVETWQSFYRKKLKEVWKPAV

SEQ ID NO: 36550 - protein, 979 aa, synthetic construct
  REGION 1..979: note = engineered CasX variant
QEIKRINKIRRRLVKDSNTKKAGKTGPMKTLLVRVMTPDLRERLENLRKKPENIPQPISNTSRANLNKLLTDYTEMKKAILHVYWEEFQKDPVGLMSRVAQPASKKIDQNKLKPEMDEKGNLTTAGFACSQCGQPLFVYKLEQVSEKGKAYTNYFGRCNVAEHEKLILLAQLKPEKDSDEAVTYSLGKFGQRALDFYSIHVTKESTHPVKPLAQIAGNRYASVPVGKALSDACMGTIASFLSKYQDIIIEHQKVVKGNQKRLESLRELAGKENLEYPSVTLPPQPHTKEGVDAYNEVIARVRMWVNLNLWQKLKLSRDDAKPLLRLKGFPSFPLVERQQANEVDWWDMVCNVKKLINEKKEDGKVFWQNLAGYKRQEALRPYLSSEEDRKKGKKFARYQLGDLLLHLEKKHGEDWGKVYDEAWERIDKKVEGLSKHIKLEEERRSEDAQSKAALTDWLRAKASFVIEGLKEADKDEFCRCELKLQKWYGDLRGKPFAIEAENSILDISGFSKQYNCAFIWQKDGVKKLNLYLIINYFKGGKLRFKKIKPEAFEANRFYTVINKKSGEIVPMEVNFNFDDPNLIILPLAFGKRQGREFIWNDLLSLETGSLKLANGRVIEKTLYNRRTRQDEPALFVALTFERREVLDSSNIKPMNLIGVDRGENIPAVIALTDPEGCPLSRFKDSLGNPTHILRIGESYKEKQRTIQAKKEVEQRRAGGYSRKYASKAKNLADDMVRNTARDLLYYAVTQDAMLIFENLSRGFGRQGKRTFMAERQYTRMEDWLTAKLAYEGLPSKTYLSKTLAQYTSKTCSNCGFTITSADYDRVLEKLKKTATGWMTTINGKELKVEGQITYYNRYKRQNVVKDLSVELDRLSEESVNNDISSWDKGRSGEALSLLKKRFSHRPVQEKFVCLNCGFETHADEQAALNIARSWLFLRSQEYKKYQTNKTTGNTDKRAFVETWQSFYRKKLKEVWKPAV

SEQ ID NO: 36551 - protein, 979 aa, synthetic construct
  REGION 1..979: note = engineered CasX variant
QEIKRINKIRRRLVKDSNTKKAGKTGPMKTLLVRVMTPDLRERLENLRKKPENIPQPISNTSRANLNKLLTDYTEMKKAILHVYWEEFQKDPVGLMSRVAQPASKKIDQNKLKPEMDEKGNLTTAGFACSQCGQPLFVYKLEQVSEKGKAYTNYFGRCNVAEHEKLIKLAQLKPEKDSDEAVTYSLGKFGQRALDFYSIHVTKESTHPVKPLAQIAGNRYASGPVGKALSDACMGTIASFLSKYQDIIIEHQKVVKGNQKRLESLRELAGKENLEYPSVTLPPQPHTKEGVDAYNEVIARVRMWVNLNLWQKLKLSRDDAKPLLRLKGFPSFPLVERQQANEVDWWDMVCNVKKLINEKKEDGKVFWQNLAGYKRQEALRPYLSSEEDRKKGKKFARYQLGDLLLHLEKKHGEDWGKVYDEAWERIDKKVEGLSKHIKLEEERRSEDAQSKAALTDWLRAKASFVIEGLKEADKDEFCRCELKLQKWYGDLRGKPFAIEAENSILDISGFSKQYNCAFIWQKDGVKKLNLYLIINYFKGGKLRFKKIKPEAFEANRFYTVINKKSGEIVPMEVNFNFDDPNLIILPLAFGKRQGREFIWNDLLSLETGSLKLANGRVIEKTLYNRRTRQDEPALFVALTFERREVLDSSNIKPMNLIGVDRGENIPAVIALTDPEGCPLSRFKDSLGNPTHILRIGESYKEKQRTIQAKKEVEQRRAGGYSRKYASKAKNLADDMVRNTARDLLYYAVTQDAMLIFENLSRGFGRQGKRTFMAERQYTRMEDWLTAKLAYEGLPSKTYLSKTLAQYTSKTCSNCGFTITSADYDRVLEKLKKTATGWMTTINGKELKVEGQITYYNRYKRQNVVKDLSVELDRLSEESVNNDISSWDKGRSGEALSLLKKRFSHRPVQEKFVCLNCGFETHADEQAALNIARSWLFLRSQEYKKYQTNKTTGNTDKRAFVETWQSFYRKKLKEVWKPAV

SEQ ID NO: 36552 - protein, 978 aa, synthetic construct
  REGION 1..978: note = engineered CasX variant
QEIKRINKIRRRLVKDSNTKKAGKTGPMKTLLVRVMTPDLRERLENLRKKPENIPQPISNTSRANLNKLLTDYTEMKKAILHVYWEEFQKDPVGLMSRVAQPASKKIDQNKLKPEMDEKGNLTTAGFACSQCGQPLFVYKLEQVSEKGKAYTNYFGRCNVAEHEKLILLAQLKPEKDSDEAVTYSLGKFGQRALDFYSIHVTKESTHPVKPLAQIAGNRYASPVGKALSDACMGTIASFLSKYQDIIIEHQKVVKGNQKRLESLRELAGKENLEYPSVTLPPQPHTKEGVDAYNEVIARVRMWVNLNLWQKLKLSRDDAKPLLRLKGFPSFPLVERQQANEVDWWDMVCNVKKLINEKKEDGKVFWQNLAGYKRQEALRPYLSSEEDRKKGKKFARYQLGDLLLHLEKKHGEDWGKVYDEAWERIDKKVEGLSKHIKLEEERRSEDAQSKAALTDWLRAKASFVIEGLKEADKDEFCRCELKLQKWYGDLRGKPFAIEAENSILDISGFSKQYNCAFIWQKDGVKKLNLYLIINYFKGGKLRFKKIKPEAFEANRFYTVINKKSGEIVPMEVNFNFDDPNLIILPLAFGKRQGREFIWNDLLSLETGSLKLANGRVIEKTLYNRRTRQDEPALFVALTFERREVLDSSNIKPMNLIGVDRGENIPAVIALTDPEGCPLSRFKDSLGNPTHILRIGESYKEKQRTIQAKKEVEQRRAGGYSRKYASKAKNLADDMVRNTARDLLYYAVTQDAMLIFENLSRGFGRQGKRTFMAERQYTRMEDWLTAKLAYEGLPSKTYLSKTLAQYTSKTCSNCGFTITSADYDRVLEKLKKTATGWMTTINGKELKVEGQITYYNRYKRQNVVKDLSVELDRLSEESVNNDISSWDKGRSGEALSLLKKRFSHRPVQEKFVCLNCGFETHADEQAALNIARSWLFLRSQEYKKYQTNKTTGNTDKRAFVETWQSFYRKKLKEVWKPAV

SEQ ID NO: 36553 - protein, 979 aa, synthetic construct
  REGION 1..979: note = engineered CasX variant
QEIKRINKIRRRLVKDSNTKKAGKTGPMKTLLVRVMTPDLRERLENLRKKPENIPQPISNTSRANLNKLLTDYTEMKKAILHVYWEEFQVDPVGLMSRVAQPASKKIDQNKLKPEMDEKGNLTTAGFACSQCGQPLFVYKLEQVSEKGKAYTNYFGRCNVAEHEKLILLAQLKPEKDSDEAVTYSLGKFGQRALDFYSIHVTKESTHPVKPLAQIAGNRYASYPVGKALSDACMGTIASFLSKYQDIIIEHQKVVKGNQKRLESLRELAGKENLEYPSVTLPPQPHTKEGVDAYNEVIARVRMWVNLNLWQKLKLSRDDAKPLLRLKGFPSFPLVERQQANEVDWWDMVCNVKKLINEKKEDGKVFWQNLAGYKRQEALRPYLSSEEDRKKGKKFARYQLGDLLLHLEKKHGEDWGKVYDEAWERIDKKVEGLSKHIKLEEERRSEDAQSKAALTDWLRAKASFVIEGLKEADKDEFCRCELKLQKWYGDLRGKPFAIEAENSILDISGFSKQYNCAFIWQKDGVKKLNLYLIINYFKGGKLRFKKIKPEAFEANRFYTVINKKSGEIVPMEVNFNFDDPNLIILPLAFGKRQGREFIWNDLLSLETGSLKLANGRVIEKTLYNRRTRQDEPALFVALTFERREVLDSSNIKPMNLIGVDRGENIPAVIALTDPEGCPLSRFKDSLGNPTHILRIGESYKEKQRTIQAKKEVEQRRAGGYSRKYASKAKNLADDMVRNTARDLLYYAVTQDAMLIFENLSRGFGRQGKRTFMAERQYTRMEDWLTAKLAYEGLPSKTYLSKTLAQYTSKTCSNCGFTITSADYDRVLEKLKKTATGWMTTINGKELKVEGQITYYNRYKRQNVVKDLSVELDRLSEESVNNDISSWTKGRSGEALSLLKKRFSHRPVQEKFVCLNCGFETHADEQAALNIARSWLFLRSQEYKKYQTNKTTGNTDKRAFVETWQSFYRKKLKEVWKPAV

SEQ ID NO: 36554 - protein, 979 aa, synthetic construct
  REGION 1..979: note = engineered CasX variant
QEIKRINKIRRRLVKDSNTKKAGKTGPMKTLLVRVMTPDLRERLENLRKKPENIPQPISNTSRANLNKLLTDYTEMKKAILHVYWEEFQVDPVGLMSRVAQPASKKIDQNKLKPEMDEKGNLTTAGFACSQCGQPLFVYKLEQVSEKGKAYTNYFGRCNVAEHEKLILLAQLKPEKDSDEAVTYSLGKFGQRALDFYSIHVTKESTHPVKPLAQIAGNRYASHPVGKALSDACMGTIASFLSKYQDIIIEHQKVVKGNQKRLESLRELAGKENLEYPSVTLPPQPHTKEGVDAYNEVIARVRMWVNLNLWQKLKLSRDDAKPLLRLKGFPSFPLVERQQANEVDWWDMVCNVKKLINEKKEDGKVFWQNLAGYKRQEALRPYLSSEEDRKKGKKFARYQLGDLLLHLEKKHGEDWGKVYDEAWERIDKKVEGLSKHIKLEEERRSEDAQSKAALTDWLRAKASFVIEGLKEADKDEFCRCELKLQKWYGDLRGKPFAIEAENSILDISGFSKQYNCAFIWQKDGVKKLNLYLIINYFKGGKLRFKKIKPEAFEANRFYTVINKKSGEIVPMEVNFNFDDPNLIILPLAFGKRQGREFIWNDLLSLETGSLKLANGRVIEKTLYNRRTRQDEPALFVALTFERREVLDSSNIKPMNLIGVDRGENIPAVIALTDPEGCPLSRFKDSLGNPTHILRIGESYKEKQRTIQAKKEVEQRRAGGYSRKYASKAKNLADDMVRNTARDLLYYAVTQDAMLIFENLSRGFGRQGKRTFMAERQYTRMEDWLTAKLAYEGLPSKTYLSKTLAQYTSKTCSNCGFTITSADYDRVLEKLKKTATGWMTTINGKELKVEGQITYYNRYKRQNVVKDLSVELDRLSEESVNNDISSWTKGRSGEALSLLKKRFSHRPVQEKFVCLNCGFETHADEQAALNIARSWLFLRSQEYKKYQTNKTTGNTDKRAFVETWQSFYRKKLKEVWKPAV

SEQ ID NO: 36555 - protein, 979 aa, synthetic construct
  REGION 1..979: note = engineered CasX variant
QEIKRINKIRRRLVKDSNTKKAGKTGPMKTLLVRVMTPDLRERLENLRKKPENIPQPISNTSRANLNKLLTDYTEMKKAILHVYWEEFQVDPVGLMSRVAQPASKKIDQNKLKPEMDEKGNLTTAGFACSQCGQPLFVYKLEQVSEKGKAYTNYFGRCNVAEHEKLILLAQLKPEKDSDEAVTYSLGKFGQRALDFYSIHVTKESTHPVKPLAQIAGNRYASSPVGKALSDACMGTIASFLSKYQDIIIEHQKVVKGNQKRLESLRELAGKENLEYPSVTLPPQPHTKEGVDAYNEVIARVRMWVNLNLWQKLKLSRDDAKPLLRLKGFPSFPLVERQQANEVDWWDMVCNVKKLINEKKEDGKVFWQNLAGYKRQEALRPYLSSEEDRKKGKKFARYQLGDLLLHLEKKHGEDWGKVYDEAWERIDKKVEGLSKHIKLEEERRSEDAQSKAALTDWLRAKASFVIEGLKEADKDEFCRCELKLQKWYGDLRGKPFAIEAENSILDISGFSKQYNCAFIWQKDGVKKLNLYLIINYFKGGKLRFKKIKPEAFEANRFYTVINKKSGEIVPMEVNFNFDDPNLIILPLAFGKRQGREFIWNDLLSLETGSLKLANGRVIEKTLYNRRTRQDEPALFVALTFERREVLDSSNIKPMNLIGVDRGENIPAVIALTDPEGCPLSRFKDSLGNPTHILRIGESYKEKQRTIQAKKEVEQRRAGGYSRKYASKAKNLADDMVRNTARDLLYYAVTQDAMLIFENLSRGFGRQGKRTFMAERQYTRMEDWLTAKLAYEGLPSKTYLSKTLAQYTSKTCSNCGFTITSADYDRVLEKLKKTATGWMTTINGKELKVEGQITYYNRYKRQNVVKDLSVELDRLSEESVNNDISSWTKGRSGEALSLLKKRFSHRPVQEKFVCLNCGFETHADEQAALNIARSWLFLRSQEYKKYQTNKTTGNTDKRAFVETWQSFYRKKLKEVWKPAV

SEQ ID NO: 36556 - protein, 979 aa, synthetic construct
  REGION 1..979: note = engineered CasX variant
QEIKRINKIRRRLVKDSNTKKAGKTGPMKTLLVRVMTPDLRERLENLRKKPENIPQPISNTSRANLNKLLTDYTEMKKAILHVYWEEFQVDPVGLMSRVAQPASKKIDQNKLKPEMDEKGNLTTAGFACSQCGQPLFVYKLEQVSEKGKAYTNYFGRCNVAEHEKLILLAQLKPEKDSDEAVTYSLGKFGQRALDFYSIHVTKESTHPVKPLAQIAGNRYASTPVGKALSDACMGTIASFLSKYQDIIIEHQKVVKGNQKRLESLRELAGKENLEYPSVTLPPQPHTKEGVDAYNEVIARVRMWVNLNLWQKLKLSRDDAKPLLRLKGFPSFPLVERQQANEVDWWDMVCNVKKLINEKKEDGKVFWQNLAGYKRQEALRPYLSSEEDRKKGKKFARYQLGDLLLHLEKKHGEDWGKVYDEAWERIDKKVEGLSKHIKLEEERRSEDAQSKAALTDWLRAKASFVIEGLKEADKDEFCRCELKLQKWYGDLRGKPFAIEAENSILDISGFSKQYNCAFIWQKDGVKKLNLYLIINYFKGGKLRFKKIKPEAFEANRFYTVINKKSGEIVPMEVNFNFDDPNLIILPLAFGKRQGREFIWNDLLSLETGSLKLANGRVIEKTLYNRRTRQDEPALFVALTFERREVLDSSNIKPMNLIGVDRGENIPAVIALTDPEGCPLSRFKDSLGNPTHILRIGESYKEKQRTIQAKKEVEQRRAGGYSRKYASKAKNLADDMVRNTARDLLYYAVTQDAMLIFENLSRGFGRQGKRTFMAERQYTRMEDWLTAKLAYEGLPSKTYLSKTLAQYTSKTCSNCGFTITSADYDRVLEKLKKTATGWMTTINGKELKVEGQITYYNRYKRQNVVKDLSVELDRLSEESVNNDISSWTKGRSGEALSLLKKRFSHRPVQEKFVCLNCGFETHADEQAALNIARSWLFLRSQEYKKYQTNKTTGNTDKRAFVETWQSFYRKKLKEVWKPAV

SEQ ID NO: 36557 - protein, 979 aa, synthetic construct
  REGION 1..979: note = engineered CasX variant
QEIKRINKIRRRLVKDSNTKKAGKTGPMKTLLVRVMTPDLRERLENLRKKPENIPQPISNTSRANLNKLLTDYTEMKKAILHVYWEEFQVDPVGLMSRVAQPASKKIDQNKLKPEMDEKGNLTTAGFACSQCGQPLFVYKLEQVSEKGKAYTNYFGRCNVAEHEKLILLAQLKPEKDSDEAVTYSLGKFGQRALDFYSIHVTKESTHPVKPLAQIAGNRYASAPVGKALSDACMGTIASFLSKYQDIIIEHQKVVKGNQKRLESLRELAGKENLEYPSVTLPPQPHTKEGVDAYNEVIARVRMWVNLNLWQKLKLSRDDAKPLLRLKGFPSFPLVERQQANEVDWWDMVCNVKKLINEKKEDGKVFWQNLAGYKRQEALRPYLSSEEDRKKGKKFARYQLGDLLLHLEKKHGEDWGKVYDEAWERIDKKVEGLSKHIKLEEERRSEDAQSKAALTDWLRAKASFVIEGLKEADKDEFCRCELKLQKWYGDLRGKPFAIEAENSILDISGFSKQYNCAFIWQKDGVKKLNLYLIINYFKGGKLRFKKIKPEAFEANRFYTVINKKSGEIVPMEVNFNFDDPNLIILPLAFGKRQGREFIWNDLLSLETGSLKLANGRVIEKTLYNRRTRQDEPALFVALTFERREVLDSSNIKPMNLIGVDRGENIPAVIALTDPEGCPLSRFKDSLGNPTHILRIGESYKEKQRTIQAKKEVEQRRAGGYSRKYASKAKNLADDMVRNTARDLLYYAVTQDAMLIFENLSRGFGRQGKRTFMAERQYTRMEDWLTAKLAYEGLPSKTYLSKTLAQYTSKTCSNCGFTITSADYDRVLEKLKKTATGWMTTINGKELKVEGQITYYNRYKRQNVVKDLSVELDRLSEESVNNDISSWTKGRSGEALSLLKKRFSHRPVQEKFVCLNCGFETHADEQAALNIARSWLFLRSQEYKKYQTNKTTGNTDKRAFVETWQSFYRKKLKEVWKPAV

SEQ ID NO: 36558 - protein, 979 aa, synthetic construct
  REGION 1..979: note = engineered CasX variant
QEIKRINKIRRRLVKDSNTKKAGKTGPMKTLLVRVMTPDLRERLENLRKKPENIPQPISNTSRANLNKLLTDYTEMKKAILHVYWEEFQVDPVGLMSRVAQPASKKIDQNKLKPEMDEKGNLTTAGFACSQCGQPLFVYKLEQVSEKGKAYTNYFGRCNVAEHEKLILLAQLKPEKDSDEAVTYSLGKFGQRALDFYSIHVTKESTHPVKPLAQIAGNRYASVPVGKALSDACMGTIASFLSKYQDIIIEHQKVVKGNQKRLESLRELAGKENLEYPSVTLPPQPHTKEGVDAYNEVIARVRMWVNLNLWQKLKLSRDDAKPLLRLKGFPSFPLVERQQANEVDWWDMVCNVKKLINEKKEDGKVFWQNLAGYKRQEALRPYLSSEEDRKKGKKFARYQLGDLLLHLEKKHGEDWGKVYDEAWERIDKKVEGLSKHIKLEEERRSEDAQSKAALTDWLRAKASFVIEGLKEADKDEFCRCELKLQKWYGDLRGKPFAIEAENSILDISGFSKQYNCAFIWQKDGVKKLNLYLIINYFKGGKLRFKKIKPEAFEANRFYTVINKKSGEIVPMEVNFNFDDPNLIILPLAFGKRQGREFIWNDLLSLETGSLKLANGRVIEKTLYNRRTRQDEPALFVALTFERREVLDSSNIKPMNLIGVDRGENIPAVIALTDPEGCPLSRFKDSLGNPTHILRIGESYKEKQRTIQAKKEVEQRRAGGYSRKYASKAKNLADDMVRNTARDLLYYAVTQDAMLIFENLSRGFGRQGKRTFMAERQYTRMEDWLTAKLAYEGLPSKTYLSKTLAQYTSKTCSNCGFTITSADYDRVLEKLKKTATGWMTTINGKELKVEGQITYYNRYKRQNVVKDLSVELDRLSEESVNNDISSWTKGRSGEALSLLKKRFSHRPVQEKFVCLNCGFETHADEQAALNIARSWLFLRSQEYKKYQTNKTTGNTDKRAFVETWQSFYRKKLKEVWKPAV

SEQ ID NO: 36559 - protein, 979 aa, synthetic construct
  REGION 1..979: note = engineered CasX variant
QEIKRINKIRRRLVKDSNTKKAGKTGPMKTLLVRVMTPDLRERLENLRKKPENIPQPISNTSRANLNKLLTDYTEMKKAILHVYWEEFQVDPVGLMSRVAQPASKKIDQNKLKPEMDEKGNLTTAGFACSQCGQPLFVYKLEQVSEKGKAYTNYFGRCNVAEHEKLIKLAQLKPEKDSDEAVTYSLGKFGQRALDFYSIHVTKESTHPVKPLAQIAGNRYASGPVGKALSDACMGTIASFLSKYQDIIIEHQKVVKGNQKRLESLRELAGKENLEYPSVTLPPQPHTKEGVDAYNEVIARVRMWVNLNLWQKLKLSRDDAKPLLRLKGFPSFPLVERQQANEVDWWDMVCNVKKLINEKKEDGKVFWQNLAGYKRQEALRPYLSSEEDRKKGKKFARYQLGDLLLHLEKKHGEDWGKVYDEAWERIDKKVEGLSKHIKLEEERRSEDAQSKAALTDWLRAKASFVIEGLKEADKDEFCRCELKLQKWYGDLRGKPFAIEAENSILDISGFSKQYNCAFIWQKDGVKKLNLYLIINYFKGGKLRFKKIKPEAFEANRFYTVINKKSGEIVPMEVNFNFDDPNLIILPLAFGKRQGREFIWNDLLSLETGSLKLANGRVIEKTLYNRRTRQDEPALFVALTFERREVLDSSNIKPMNLIGVDRGENIPAVIALTDPEGCPLSRFKDSLGNPTHILRIGESYKEKQRTIQAKKEVEQRRAGGYSRKYASKAKNLADDMVRNTARDLLYYAVTQDAMLIFENLSRGFGRQGKRTFMAERQYTRMEDWLTAKLAYEGLPSKTYLSKTLAQYTSKTCSNCGFTITSADYDRVLEKLKKTATGWMTTINGKELKVEGQITYYNRYKRQNVVKDLSVELDRLSEESVNNDISSWTKGRSGEALSLLKKRFSHRPVQEKFVCLNCGFETHADEQAALNIARSWLFLRSQEYKKYQTNKTTGNTDKRAFVETWQSFYRKKLKEVWKPAV

SEQ ID NO: 36560 - protein, 978 aa, synthetic construct
  REGION 1..978: note = engineered CasX variant
QEIKRINKIRRRLVKDSNTKKAGKTGPMKTLLVRVMTPDLRERLENLRKKPENIPQPISNTSRANLNKLLTDYTEMKKAILHVYWEEFQVDPVGLMSRVAQPASKKIDQNKLKPEMDEKGNLTTAGFACSQCGQPLFVYKLEQVSEKGKAYTNYFGRCNVAEHEKLILLAQLKPEKDSDEAVTYSLGKFGQRALDFYSIHVTKESTHPVKPLAQIAGNRYASPVGKALSDACMGTIASFLSKYQDIIIEHQKVVKGNQKRLESLRELAGKENLEYPSVTLPPQPHTKEGVDAYNEVIARVRMWVNLNLWQKLKLSRDDAKPLLRLKGFPSFPLVERQQANEVDWWDMVCNVKKLINEKKEDGKVFWQNLAGYKRQEALRPYLSSEEDRKKGKKFARYQLGDLLLHLEKKHGEDWGKVYDEAWERIDKKVEGLSKHIKLEEERRSEDAQSKAALTDWLRAKASFVIEGLKEADKDEFCRCELKLQKWYGDLRGKPFAIEAENSILDISGFSKQYNCAFIWQKDGVKKLNLYLIINYFKGGKLRFKKIKPEAFEANRFYTVINKKSGEIVPMEVNFNFDDPNLIILPLAFGKRQGREFIWNDLLSLETGSLKLANGRVIEKTLYNRRTRQDEPALFVALTFERREVLDSSNIKPMNLIGVDRGENIPAVIALTDPEGCPLSRFKDSLGNPTHILRIGESYKEKQRTIQAKKEVEQRRAGGYSRKYASKAKNLADDMVRNTARDLLYYAVTQDAMLIFENLSRGFGRQGKRTFMAERQYTRMEDWLTAKLAYEGLPSKTYLSKTLAQYTSKTCSNCGFTITSADYDRVLEKLKKTATGWMTTINGKELKVEGQITYYNRYKRQNVVKDLSVELDRLSEESVNNDISSWTKGRSGEALSLLKKRFSHRPVQEKFVCLNCGFETHADEQAALNIARSWLFLRSQEYKKYQTNKTTGNTDKRAFVETWQSFYRKKLKEVWKPAV

SEQ ID NO: 36561 - protein, 979 aa, synthetic construct
  REGION 1..979: note = engineered CasX variant
QEIKRLNKIRRRLVKDSNTKKAGKTGPMKTLLVRVMTPDLRERLENLRKKPENIPQPISNTSRANLNKLLTDYTEMKKAILHVYWEEFQKDPVGLMSRVAQPASKKIDQNKLKPEMDEKGNLTTAGFACSQCGQPLFVYKLEQVSEKGKAYTNYFGRCNVAEHEKLILLAQLKPEKDSDEAVTYSLGKFGQRALDFYSIHVTKESTHPVKPLAQIAGNRYASYPVGKALSDACMGTIASFLSKYQDIIIEHQKVVKGNQKRLESLRELAGKENLEYPSVTLPPQPHTKEGVDAYNEVIARVRMWVNLNLWQKLKLSRDDAKPLLRLKGFPSFPLVERQQANEVDWWDMVCNVKKLINEKKEDGKVFWQNLAGYKRQEALRPYLSSEEDRKKGKKFARYQLGDLLLHLEKKHGEDWGKVYDEAWERIDKKVEGLSKHIKLEEERRSEDAQSKAALTDWLRAKASFVIEGLKEADKDEFCRCELKLQKWYGDLRGKPFAIEAENSILDISGFSKQYNCAFIWQKDGVKKLNLYLIINYFKGGKLRFKKIKPEAFEANRFYTVINKKSGEIVPMEVNFNFDDPNLIILPLAFGKRQGREFIWNDLLSLETGSLKLANGRVIEKTLYNRRTRQDEPALFVALTFERREVLDSSNIKPMNLIGVDRGENIPAVIALTDPEGCPLSRFKDSLGNPTHILRIGESYKEKQRTIQAKKEVEQRRAGGYSRKYASKAKNLADDMVRNTARDLLYYAVTQDAMLIFENLSRGFGRQGKRTFMAERQYTRMEDWLTAKLAYEGLPSKTYLSKTLAQYTSKTCSNCGFTITSADYDRVLEKLKKTATGWMTTINGKELKVEGQITYYNRYKRQNVVKDLSVELDRLSEESVNNDISSWTKGRSGEALSLLKKRFSHRPVQEKFVCLNCGFETHADEQAALNIARSWLFLRSQEYKKYQTNKTTGNTDKRAFVETWQSFYRKKLKEVWKPAV

SEQ ID NO: 36562 - protein, 979 aa, synthetic construct
  REGION 1..979: note = engineered CasX variant
QEIKRLNKIRRRLVKDSNTKKAGKTGPMKTLLVRVMTPDLRERLENLRKKPENIPQPISNTSRANLNKLLTDYTEMKKAILHVYWEEFQKDPVGLMSRVAQPASKKIDQNKLKPEMDEKGNLTTAGFACSQCGQPLFVYKLEQVSEKGKAYTNYFGRCNVAEHEKLILLAQLKPEKDSDEAVTYSLGKFGQRALDFYSIHVTKESTHPVKPLAQIAGNRYASHPVGKALSDACMGTIASFLSKYQDIIIEHQKVVKGNQKRLESLRELAGKENLEYPSVTLPPQPHTKEGVDAYNEVIARVRMWVNLNLWQKLKLSRDDAKPLLRLKGFPSFPLVERQQANEVDWWDMVCNVKKLINEKKEDGKVFWQNLAGYKRQEALRPYLSSEEDRKKGKKFARYQLGDLLLHLEKKHGEDWGKVYDEAWERIDKKVEGLSKHIKLEEERRSEDAQSKAALTDWLRAKASFVIEGLKEADKDEFCRCELKLQKWYGDLRGKPFAIEAENSILDISGFSKQYNCAFIWQKDGVKKLNLYLIINYFKGGKLRFKKIKPEAFEANRFYTVINKKSGEIVPMEVNFNFDDPNLIILPLAFGKRQGREFIWNDLLSLETGSLKLANGRVIEKTLYNRRTRQDEPALFVALTFERREVLDSSNIKPMNLIGVDRGENIPAVIALTDPEGCPLSRFKDSLGNPTHILRIGESYKEKQRTIQAKKEVEQRRAGGYSRKYASKAKNLADDMVRNTARDLLYYAVTQDAMLIFENLSRGFGRQGKRTFMAERQYTRMEDWLTAKLAYEGLPSKTYLSKTLAQYTSKTCSNCGFTITSADYDRVLEKLKKTATGWMTTINGKELKVEGQITYYNRYKRQNVVKDLSVELDRLSEESVNNDISSWTKGRSGEALSLLKKRFSHRPVQEKFVCLNCGFETHADEQAALNIARSWLFLRSQEYKKYQTNKTTGNTDKRAFVETWQSFYRKKLKEVWKPAV

SEQ ID NO: 36563 - protein, 979 aa, synthetic construct
  REGION 1..979: note = engineered CasX variant
QEIKRLNKIRRRLVKDSNTKKAGKTGPMKTLLVRVMTPDLRERLENLRKKPENIPQPISNTSRANLNKLLTDYTEMKKAILHVYWEEFQKDPVGLMSRVAQPASKKIDQNKLKPEMDEKGNLTTAGFACSQCGQPLFVYKLEQVSEKGKAYTNYFGRCNVAEHEKLILLAQLKPEKDSDEAVTYSLGKFGQRALDFYSIHVTKESTHPVKPLAQIAGNRYASSPVGKALSDACMGTIASFLSKYQDIIIEHQKVVKGNQKRLESLRELAGKENLEYPSVTLPPQPHTKEGVDAYNEVIARVRMWVNLNLWQKLKLSRDDAKPLLRLKGFPSFPLVERQQANEVDWWDMVCNVKKLINEKKEDGKVFWQNLAGYKRQEALRPYLSSEEDRKKGKKFARYQLGDLLLHLEKKHGEDWGKVYDEAWERIDKKVEGLSKHIKLEEERRSEDAQSKAALTDWLRAKASFVIEGLKEADKDEFCRCELKLQKWYGDLRGKPFAIEAENSILDISGFSKQYNCAFIWQKDGVKKLNLYLIINYFKGGKLRFKKIKPEAFEANRFYTVINKKSGEIVPMEVNFNFDDPNLIILPLAFGKRQGREFIWNDLLSLETGSLKLANGRVIEKTLYNRRTRQDEPALFVALTFERREVLDSSNIKPMNLIGVDRGENIPAVIALTDPEGCPLSRFKDSLGNPTHILRIGESYKEKQRTIQAKKEVEQRRAGGYSRKYASKAKNLADDMVRNTARDLLYYAVTQDAMLIFENLSRGFGRQGKRTFMAERQYTRMEDWLTAKLAYEGLPSKTYLSKTLAQYTSKTCSNCGFTITSADYDRVLEKLKKTATGWMTTINGKELKVEGQITYYNRYKRQNVVKDLSVELDRLSEESVNNDISSWTKGRSGEALSLLKKRFSHRPVQEKFVCLNCGFETHADEQAALNIARSWLFLRSQEYKKYQTNKTTGNTDKRAFVETWQSFYRKKLKEVWKPAV

SEQ ID NO: 36564 - protein, 979 aa, synthetic construct
  REGION 1..979: note = engineered CasX variant
QEIKRLNKIRRRLVKDSNTKKAGKTGPMKTLLVRVMTPDLRERLENLRKKPENIPQPISNTSRANLNKLLTDYTEMKKAILHVYWEEFQKDPVGLMSRVAQPASKKIDQNKLKPEMDEKGNLTTAGFACSQCGQPLFVYKLEQVSEKGKAYTNYFGRCNVAEHEKLILLAQLKPEKDSDEAVTYSLGKFGQRALDFYSIHVTKESTHPVKPLAQIAGNRYASTPVGKALSDACMGTIASFLSKYQDIIIEHQKVVKGNQKRLESLRELAGKENLEYPSVTLPPQPHTKEGVDAYNEVIARVRMWVNLNLWQKLKLSRDDAKPLLRLKGFPSFPLVERQQANEVDWWDMVCNVKKLINEKKEDGKVFWQNLAGYKRQEALRPYLSSEEDRKKGKKFARYQLGDLLLHLEKKHGEDWGKVYDEAWERIDKKVEGLSKHIKLEEERRSEDAQSKAALTDWLRAKASFVIEGLKEADKDEFCRCELKLQKWYGDLRGKPFAIEAENSILDISGFSKQYNCAFIWQKDGVKKLNLYLIINYFKGGKLRFKKIKPEAFEANRFYTVINKKSGEIVPMEVNFNFDDPNLIILPLAFGKRQGREFIWNDLLSLETGSLKLANGRVIEKTLYNRRTRQDEPALFVALTFERREVLDSSNIKPMNLIGVDRGENIPAVIALTDPEGCPLSRFKDSLGNPTHILRIGESYKEKQRTIQAKKEVEQRRAGGYSRKYASKAKNLADDMVRNTARDLLYYAVTQDAMLIFENLSRGFGRQGKRTFMAERQYTRMEDWLTAKLAYEGLPSKTYLSKTLAQYTSKTCSNCGFTITSADYDRVLEKLKKTATGWMTTINGKELKVEGQITYYNRYKRQNVVKDLSVELDRLSEESVNNDISSWTKGRSGEALSLLKKRFSHRPVQEKFVCLNCGFETHADEQAALNIARSWLFLRSQEYKKYQTNKTTGNTDKRAFVETWQSFYRKKLKEVWKPAV

SEQ ID NO: 36565 - protein, 979 aa, synthetic construct
  REGION 1..979: note = engineered CasX variant
QEIKRLNKIRRRLVKDSNTKKAGKTGPMKTLLVRVMTPDLRERLENLRKKPENIPQPISNTSRANLNKLLTDYTEMKKAILHVYWEEFQKDPVGLMSRVAQPASKKIDQNKLKPEMDEKGNLTTAGFACSQCGQPLFVYKLEQVSEKGKAYTNYFGRCNVAEHEKLILLAQLKPEKDSDEAVTYSLGKFGQRALDFYSIHVTKESTHPVKPLAQIAGNRYASAPVGKALSDACMGTIASFLSKYQDIIIEHQKVVKGNQKRLESLRELAGKENLEYPSVTLPPQPHTKEGVDAYNEVIARVRMWVNLNLWQKLKLSRDDAKPLLRLKGFPSFPLVERQQANEVDWWDMVCNVKKLINEKKEDGKVFWQNLAGYKRQEALRPYLSSEEDRKKGKKFARYQLGDLLLHLEKKHGEDWGKVYDEAWERIDKKVEGLSKHIKLEEERRSEDAQSKAALTDWLRAKASFVIEGLKEADKDEFCRCELKLQKWYGDLRGKPFAIEAENSILDISGFSKQYNCAFIWQKDGVKKLNLYLIINYFKGGKLRFKKIKPEAFEANRFYTVINKKSGEIVPMEVNFNFDDPNLIILPLAFGKRQGREFIWNDLLSLETGSLKLANGRVIEKTLYNRRTRQDEPALFVALTFERREVLDSSNIKPMNLIGVDRGENIPAVIALTDPEGCPLSRFKDSLGNPTHILRIGESYKEKQRTIQAKKEVEQRRAGGYSRKYASKAKNLADDMVRNTARDLLYYAVTQDAMLIFENLSRGFGRQGKRTFMAERQYTRMEDWLTAKLAYEGLPSKTYLSKTLAQYTSKTCSNCGFTITSADYDRVLEKLKKTATGWMTTINGKELKVEGQITYYNRYKRQNVVKDLSVELDRLSEESVNNDISSWTKGRSGEALSLLKKRFSHRPVQEKFVCLNCGFETHADEQAALNIARSWLFLRSQEYKKYQTNKTTGNTDKRAFVETWQSFYRKKLKEVWKPAV

SEQ ID NO: 36566 - protein, 979 aa, synthetic construct
  REGION 1..979: note = engineered CasX variant
QEIKRLNKIRRRLVKDSNTKKAGKTGPMKTLLVRVMTPDLRERLENLRKKPENIPQPISNTSRANLNKLLTDYTEMKKAILHVYWEEFQKDPVGLMSRVAQPASKKIDQNKLKPEMDEKGNLTTAGFACSQCGQPLFVYKLEQVSEKGKAYTNYFGRCNVAEHEKLILLAQLKPEKDSDEAVTYSLGKFGQRALDFYSIHVTKESTHPVKPLAQIAGNRYASVPVGKALSDACMGTIASFLSKYQDIIIEHQKVVKGNQKRLESLRELAGKENLEYPSVTLPPQPHTKEGVDAYNEVIARVRMWVNLNLWQKLKLSRDDAKPLLRLKGFPSFPLVERQQANEVDWWDMVCNVKKLINEKKEDGKVFWQNLAGYKRQEALRPYLSSEEDRKKGKKFARYQLGDLLLHLEKKHGEDWGKVYDEAWERIDKKVEGLSKHIKLEEERRSEDAQSKAALTDWLRAKASFVIEGLKEADKDEFCRCELKLQKWYGDLRGKPFAIEAENSILDISGFSKQYNCAFIWQKDGVKKLNLYLIINYFKGGKLRFKKIKPEAFEANRFYTVINKKSGEIVPMEVNFNFDDPNLIILPLAFGKRQGREFIWNDLLSLETGSLKLANGRVIEKTLYNRRTRQDEPALFVALTFERREVLDSSNIKPMNLIGVDRGENIPAVIALTDPEGCPLSRFKDSLGNPTHILRIGESYKEKQRTIQAKKEVEQRRAGGYSRKYASKAKNLADDMVRNTARDLLYYAVTQDAMLIFENLSRGFGRQGKRTFMAERQYTRMEDWLTAKLAYEGLPSKTYLSKTLAQYTSKTCSNCGFTITSADYDRVLEKLKKTATGWMTTINGKELKVEGQITYYNRYKRQNVVKDLSVELDRLSEESVNNDISSWTKGRSGEALSLLKKRFSHRPVQEKFVCLNCGFETHADEQAALNIARSWLFLRSQEYKKYQTNKTTGNTDKRAFVETWQSFYRKKLKEVWKPAV

SEQ ID NO: 36567 - protein, 979 aa, synthetic construct
  REGION 1..979: note = engineered CasX variant
QEIKRLNKIRRRLVKDSNTKKAGKTGPMKTLLVRVMTPDLRERLENLRKKPENIPQPISNTSRANLNKLLTDYTEMKKAILHVYWEEFQKDPVGLMSRVAQPASKKIDQNKLKPEMDEKGNLTTAGFACSQCGQPLFVYKLEQVSEKGKAYTNYFGRCNVAEHEKLIKLAQLKPEKDSDEAVTYSLGKFGQRALDFYSIHVTKESTHPVKPLAQIAGNRYASGPVGKALSDACMGTIASFLSKYQDIIIEHQKVVKGNQKRLESLRELAGKENLEYPSVTLPPQPHTKEGVDAYNEVIARVRMWVNLNLWQKLKLSRDDAKPLLRLKGFPSFPLVERQQANEVDWWDMVCNVKKLINEKKEDGKVFWQNLAGYKRQEALRPYLSSEEDRKKGKKFARYQLGDLLLHLEKKHGEDWGKVYDEAWERIDKKVEGLSKHIKLEEERRSEDAQSKAALTDWLRAKASFVIEGLKEADKDEFCRCELKLQKWYGDLRGKPFAIEAENSILDISGFSKQYNCAFIWQKDGVKKLNLYLIINYFKGGKLRFKKIKPEAFEANRFYTVINKKSGEIVPMEVNFNFDDPNLIILPLAFGKRQGREFIWNDLLSLETGSLKLANGRVIEKTLYNRRTRQDEPALFVALTFERREVLDSSNIKPMNLIGVDRGENIPAVIALTDPEGCPLSRFKDSLGNPTHILRIGESYKEKQRTIQAKKEVEQRRAGGYSRKYASKAKNLADDMVRNTARDLLYYAVTQDAMLIFENLSRGFGRQGKRTFMAERQYTRMEDWLTAKLAYEGLPSKTYLSKTLAQYTSKTCSNCGFTITSADYDRVLEKLKKTATGWMTTINGKELKVEGQITYYNRYKRQNVVKDLSVELDRLSEESVNNDISSWTKGRSGEALSLLKKRFSHRPVQEKFVCLNCGFETHADEQAALNIARSWLFLRSQEYKKYQTNKTTGNTDKRAFVETWQSFYRKKLKEVWKPAV

SEQ ID NO: 36568 - protein, 978 aa, synthetic construct
  REGION 1..978: note = engineered CasX variant
QEIKRLNKIRRRLVKDSNTKKAGKTGPMKTLLVRVMTPDLRERLENLRKKPENIPQPISNTSRANLNKLLTDYTEMKKAILHVYWEEFQKDPVGLMSRVAQPASKKIDQNKLKPEMDEKGNLTTAGFACSQCGQPLFVYKLEQVSEKGKAYTNYFGRCNVAEHEKLILLAQLKPEKDSDEAVTYSLGKFGQRALDFYSIHVTKESTHPVKPLAQIAGNRYASPVGKALSDACMGTIASFLSKYQDIIIEHQKVVKGNQKRLESLRELAGKENLEYPSVTLPPQPHTKEGVDAYNEVIARVRMWVNLNLWQKLKLSRDDAKPLLRLKGFPSFPLVERQQANEVDWWDMVCNVKKLINEKKEDGKVFWQNLAGYKRQEALRPYLSSEEDRKKGKKFARYQLGDLLLHLEKKHGEDWGKVYDEAWERIDKKVEGLSKHIKLEEERRSEDAQSKAALTDWLRAKASFVIEGLKEADKDEFCRCELKLQKWYGDLRGKPFAIEAENSILDISGFSKQYNCAFIWQKDGVKKLNLYLIINYFKGGKLRFKKIKPEAFEANRFYTVINKKSGEIVPMEVNFNFDDPNLIILPLAFGKRQGREFIWNDLLSLETGSLKLANGRVIEKTLYNRRTRQDEPALFVALTFERREVLDSSNIKPMNLIGVDRGENIPAVIALTDPEGCPLSRFKDSLGNPTHILRIGESYKEKQRTIQAKKEVEQRRAGGYSRKYASKAKNLADDMVRNTARDLLYYAVTQDAMLIFENLSRGFGRQGKRTFMAERQYTRMEDWLTAKLAYEGLPSKTYLSKTLAQYTSKTCSNCGFTITSADYDRVLEKLKKTATGWMTTINGKELKVEGQITYYNRYKRQNVVKDLSVELDRLSEESVNNDISSWTKGRSGEALSLLKKRFSHRPVQEKFVCLNCGFETHADEQAALNIARSWLFLRSQEYKKYQTNKTTGNTDKRAFVETWQSFYRKKLKEVWKPAV

SEQ ID NO: 36569 - protein, 979 aa, synthetic construct
  REGION 1..979: note = engineered CasX variant
QEIKRINKIRRRLVKDSNTKKAGKTGPMKTLLVRVMTPDLRERLENLRKKPENIPQPISNTSRANLNKLLTDYTEMKKAILHVYWEEFQKDPVGLMSRVAQPASKKIDQNKLKPEMDEKGNLTTAGFACSQCGQPLFVYKLEQVSEKGKAYTNYVGRCNVAEHEKLILLAQLKPEKDSDEAVTYSLGKFGQRALDFYSIHVTKESTHPVKPLAQIAGNRYASYPVGKALSDACMGTIASFLSKYQDIIIEHQKVVKGNQKRLESLRELAGKENLEYPSVTLPPQPHTKEGVDAYNEVIARVRMWVNLNLWQKLKLSRDDAKPLLRLKGFPSFPLVERQQANEVDWWDMVCNVKKLINEKKEDGKVFWQNLAGYKRQEALRPYLSSEEDRKKGKKFARYQLGDLLLHLEKKHGEDWGKVYDEAWERIDKKVEGLSKHIKLEEERRSEDAQSKAALTDWLRAKASFVIEGLKEADKDEFCRCELKLQKWYGDLRGKPFAIEAENSILDISGFSKQYNCAFIWQKDGVKKLNLYLIINYFKGGKLRFKKIKPEAFEANRFYTVINKKSGEIVPMEVNFNFDDPNLIILPLAFGKRQGREFIWNDLLSLETGSLKLANGRVIEKTLYNRRTRQDEPALFVALTFERREVLDSSNIKPMNLIGVDRGENIPAVIALTDPEGCPLSRFKDSLGNPTHILRIGESYKEKQRTIQAKKEVEQRRAGGYSRKYASKAKNLADDMVRNTARDLLYYAVTQDAMLIFENLSRGFGRQGKRTFMAERQYTRMEDWLTAKLAYEGLPSKTYLSKTLAQYTSKTCSNCGFTITSADYDRVLEKLKKTATGWMTTINGKELKVEGQITYYNRYKRQNVVKDLSVELDRLSEESVNNDISSWTKGRSGEALSLLKKRFSHRPVQEKFVCLNCGFETHADEQAALNIARSWLFLRSQEYKKYQTNKTTGNTDKRAFVETWQSFYRKKLKEVWKPAV

SEQ ID NO: 36570 - protein, 979 aa, synthetic construct
  REGION 1..979: note = engineered CasX variant
QEIKRINKIRRRLVKDSNTKKAGKTGPMKTLLVRVMTPDLRERLENLRKKPENIPQPISNTSRANLNKLLTDYTEMKKAILHVYWEEFQKDPVGLMSRVAQPASKKIDQNKLKPEMDEKGNLTTAGFACSQCGQPLFVYKLEQVSEKGKAYTNYVGRCNVAEHEKLILLAQLKPEKDSDEAVTYSLGKFGQRALDFYSIHVTKESTHPVKPLAQIAGNRYASHPVGKALSDACMGTIASFLSKYQDIIIEHQKVVKGNQKRLESLRELAGKENLEYPSVTLPPQPHTKEGVDAYNEVIARVRMWVNLNLWQKLKLSRDDAKPLLRLKGFPSFPLVERQQANEVDWWDMVCNVKKLINEKKEDGKVFWQNLAGYKRQEALRPYLSSEEDRKKGKKFARYQLGDLLLHLEKKHGEDWGKVYDEAWERIDKKVEGLSKHIKLEEERRSEDAQSKAALTDWLRAKASFVIEGLKEADKDEFCRCELKLQKWYGDLRGKPFAIEAENSILDISGFSKQYNCAFIWQKDGVKKLNLYLIINYFKGGKLRFKKIKPEAFEANRFYTVINKKSGEIVPMEVNFNFDDPNLIILPLAFGKRQGREFIWNDLLSLETGSLKLANGRVIEKTLYNRRTRQDEPALFVALTFERREVLDSSNIKPMNLIGVDRGENIPAVIALTDPEGCPLSRFKDSLGNPTHILRIGESYKEKQRTIQAKKEVEQRRAGGYSRKYASKAKNLADDMVRNTARDLLYYAVTQDAMLIFENLSRGFGRQGKRTFMAERQYTRMEDWLTAKLAYEGLPSKTYLSKTLAQYTSKTCSNCGFTITSADYDRVLEKLKKTATGWMTTINGKELKVEGQITYYNRYKRQNVVKDLSVELDRLSEESVNNDISSWTKGRSGEALSLLKKRFSHRPVQEKFVCLNCGFETHADEQAALNIARSWLFLRSQEYKKYQTNKTTGNTDKRAFVETWQSFYRKKLKEVWKPAV

SEQ ID NO: 36571 - protein, 979 aa, synthetic construct
  REGION 1..979: note = engineered CasX variant
QEIKRINKIRRRLVKDSNTKKAGKTGPMKTLLVRVMTPDLRERLENLRKKPENIPQPISNTSRANLNKLLTDYTEMKKAILHVYWEEFQKDPVGLMSRVAQPASKKIDQNKLKPEMDEKGNLTTAGFACSQCGQPLFVYKLEQVSEKGKAYTNYVGRCNVAEHEKLILLAQLKPEKDSDEAVTYSLGKFGQRALDFYSIHVTKESTHPVKPLAQIAGNRYASSPVGKALSDACMGTIASFLSKYQDIIIEHQKVVKGNQKRLESLRELAGKENLEYPSVTLPPQPHTKEGVDAYNEVIARVRMWVNLNLWQKLKLSRDDAKPLLRLKGFPSFPLVERQQANEVDWWDMVCNVKKLINEKKEDGKVFWQNLAGYKRQEALRPYLSSEEDRKKGKKFARYQLGDLLLHLEKKHGEDWGKVYDEAWERIDKKVEGLSKHIKLEEERRSEDAQSKAALTDWLRAKASFVIEGLKEADKDEFCRCELKLQKWYGDLRGKPFAIEAENSILDISGFSKQYNCAFIWQKDGVKKLNLYLIINYFKGGKLRFKKIKPEAFEANRFYTVINKKSGEIVPMEVNFNFDDPNLIILPLAFGKRQGREFIWNDLLSLETGSLKLANGRVIEKTLYNRRTRQDEPALFVALTFERREVLDSSNIKPMNLIGVDRGENIPAVIALTDPEGCPLSRFKDSLGNPTHILRIGESYKEKQRTIQAKKEVEQRRAGGYSRKYASKAKNLADDMVRNTARDLLYYAVTQDAMLIFENLSRGFGRQGKRTFMAERQYTRMEDWLTAKLAYEGLPSKTYLSKTLAQYTSKTCSNCGFTITSADYDRVLEKLKKTATGWMTTINGKELKVEGQITYYNRYKRQNVVKDLSVELDRLSEESVNNDISSWTKGRSGEALSLLKKRFSHRPVQEKFVCLNCGFETHADEQAALNIARSWLFLRSQEYKKYQTNKTTGNTDKRAFVETWQSFYRKKLKEVWKPAV

SEQ ID NO: 36572 - protein, 979 aa, synthetic construct
  REGION 1..979: note = engineered CasX variant
QEIKRINKIRRRLVKDSNTKKAGKTGPMKTLLVRVMTPDLRERLENLRKKPENIPQPISNTSRANLNKLLTDYTEMKKAILHVYWEEFQKDPVGLMSRVAQPASKKIDQNKLKPEMDEKGNLTTAGFACSQCGQPLFVYKLEQVSEKGKAYTNYVGRCNVAEHEKLILLAQLKPEKDSDEAVTYSLGKFGQRALDFYSIHVTKESTHPVKPLAQIAGNRYASTPVGKALSDACMGTIASFLSKYQDIIIEHQKVVKGNQKRLESLRELAGKENLEYPSVTLPPQPHTKEGVDAYNEVIARVRMWVNLNLWQKLKLSRDDAKPLLRLKGFPSFPLVERQQANEVDWWDMVCNVKKLINEKKEDGKVFWQNLAGYKRQEALRPYLSSEEDRKKGKKFARYQLGDLLLHLEKKHGEDWGKVYDEAWERIDKKVEGLSKHIKLEEERRSEDAQSKAALTDWLRAKASFVIEGLKEADKDEFCRCELKLQKWYGDLRGKPFAIEAENSILDISGFSKQYNCAFIWQKDGVKKLNLYLIINYFKGGKLRFKKIKPEAFEANRFYTVINKKSGEIVPMEVNFNFDDPNLIILPLAFGKRQGREFIWNDLLSLETGSLKLANGRVIEKTLYNRRTRQDEPALFVALTFERREVLDSSNIKPMNLIGVDRGENIPAVIALTDPEGCPLSRFKDSLGNPTHILRIGESYKEKQRTIQAKKEVEQRRAGGYSRKYASKAKNLADDMVRNTARDLLYYAVTQDAMLIFENLSRGFGRQGKRTFMAERQYTRMEDWLTAKLAYEGLPSKTYLSKTLAQYTSKTCSNCGFTITSADYDRVLEKLKKTATGWMTTINGKELKVEGQITYYNRYKRQNVVKDLSVELDRLSEESVNNDISSWTKGRSGEALSLLKKRFSHRPVQEKFVCLNCGFETHADEQAALNIARSWLFLRSQEYKKYQTNKTTGNTDKRAFVETWQSFYRKKLKEVWKPAV

SEQ ID NO: 36573 - protein, 979 aa, synthetic construct
  REGION 1..979: note = engineered CasX variant
QEIKRINKIRRRLVKDSNTKKAGKTGPMKTLLVRVMTPDLRERLENLRKKPENIPQPISNTSRANLNKLLTDYTEMKKAILHVYWEEFQKDPVGLMSRVAQPASKKIDQNKLKPEMDEKGNLTTAGFACSQCGQPLFVYKLEQVSEKGKAYTNYVGRCNVAEHEKLILLAQLKPEKDSDEAVTYSLGKFGQRALDFYSIHVTKESTHPVKPLAQIAGNRYASAPVGKALSDACMGTIASFLSKYQDIIIEHQKVVKGNQKRLESLRELAGKENLEYPSVTLPPQPHTKEGVDAYNEVIARVRMWVNLNLWQKLKLSRDDAKPLLRLKGFPSFPLVERQQANEVDWWDMVCNVKKLINEKKEDGKVFWQNLAGYKRQEALRPYLSSEEDRKKGKKFARYQLGDLLLHLEKKHGEDWGKVYDEAWERIDKKVEGLSKHIKLEEERRSEDAQSKAALTDWLRAKASFVIEGLKEADKDEFCRCELKLQKWYGDLRGKPFAIEAENSILDISGFSKQYNCAFIWQKDGVKKLNLYLIINYFKGGKLRFKKIKPEAFEANRFYTVINKKSGEIVPMEVNFNFDDPNLIILPLAFGKRQGREFIWNDLLSLETGSLKLANGRVIEKTLYNRRTRQDEPALFVALTFERREVLDSSNIKPMNLIGVDRGENIPAVIALTDPEGCPLSRFKDSLGNPTHILRIGESYKEKQRTIQAKKEVEQRRAGGYSRKYASKAKNLADDMVRNTARDLLYYAVTQDAMLIFENLSRGFGRQGKRTFMAERQYTRMEDWLTAKLAYEGLPSKTYLSKTLAQYTSKTCSNCGFTITSADYDRVLEKLKKTATGWMTTINGKELKVEGQITYYNRYKRQNVVKDLSVELDRLSEESVNNDISSWTKGRSGEALSLLKKRFSHRPVQEKFVCLNCGFETHADEQAALNIARSWLFLRSQEYKKYQTNKTTGNTDKRAFVETWQSFYRKKLKEVWKPAV

SEQ ID NO: 36574 - protein, 979 aa, synthetic construct
  REGION 1..979: note = engineered CasX variant
QEIKRINKIRRRLVKDSNTKKAGKTGPMKTLLVRVMTPDLRERLENLRKKPENIPQPISNTSRANLNKLLTDYTEMKKAILHVYWEEFQKDPVGLMSRVAQPASKKIDQNKLKPEMDEKGNLTTAGFACSQCGQPLFVYKLEQVSEKGKAYTNYVGRCNVAEHEKLILLAQLKPEKDSDEAVTYSLGKFGQRALDFYSIHVTKESTHPVKPLAQIAGNRYASVPVGKALSDACMGTIASFLSKYQDIIIEHQKVVKGNQKRLESLRELAGKENLEYPSVTLPPQPHTKEGVDAYNEVIARVRMWVNLNLWQKLKLSRDDAKPLLRLKGFPSFPLVERQQANEVDWWDMVCNVKKLINEKKEDGKVFWQNLAGYKRQEALRPYLSSEEDRKKGKKFARYQLGDLLLHLEKKHGEDWGKVYDEAWERIDKKVEGLSKHIKLEEERRSEDAQSKAALTDWLRAKASFVIEGLKEADKDEFCRCELKLQKWYGDLRGKPFAIEAENSILDISGFSKQYNCAFIWQKDGVKKLNLYLIINYFKGGKLRFKKIKPEAFEANRFYTVINKKSGEIVPMEVNFNFDDPNLIILPLAFGKRQGREFIWNDLLSLETGSLKLANGRVIEKTLYNRRTRQDEPALFVALTFERREVLDSSNIKPMNLIGVDRGENIPAVIALTDPEGCPLSRFKDSLGNPTHILRIGESYKEKQRTIQAKKEVEQRRAGGYSRKYASKAKNLADDMVRNTARDLLYYAVTQDAMLIFENLSRGFGRQGKRTFMAERQYTRMEDWLTAKLAYEGLPSKTYLSKTLAQYTSKTCSNCGFTITSADYDRVLEKLKKTATGWMTTINGKELKVEGQITYYNRYKRQNVVKDLSVELDRLSEESVNNDISSWTKGRSGEALSLLKKRFSHRPVQEKFVCLNCGFETHADEQAALNIARSWLFLRSQEYKKYQTNKTTGNTDKRAFVETWQSFYRKKLKEVWKPAV

SEQ ID NO: 36575 - protein, 979 aa, synthetic construct
  REGION 1..979: note = engineered CasX variant
QEIKRINKIRRRLVKDSNTKKAGKTGPMKTLLVRVMTPDLRERLENLRKKPENIPQPISNTSRANLNKLLTDYTEMKKAILHVYWEEFQKDPVGLMSRVAQPASKKIDQNKLKPEMDEKGNLTTAGFACSQCGQPLFVYKLEQVSEKGKAYTNYVGRCNVAEHEKLIKLAQLKPEKDSDEAVTYSLGKFGQRALDFYSIHVTKESTHPVKPLAQIAGNRYASGPVGKALSDACMGTIASFLSKYQDIIIEHQKVVKGNQKRLESLRELAGKENLEYPSVTLPPQPHTKEGVDAYNEVIARVRMWVNLNLWQKLKLSRDDAKPLLRLKGFPSFPLVERQQANEVDWWDMVCNVKKLINEKKEDGKVFWQNLAGYKRQEALRPYLSSEEDRKKGKKFARYQLGDLLLHLEKKHGEDWGKVYDEAWERIDKKVEGLSKHIKLEEERRSEDAQSKAALTDWLRAKASFVIEGLKEADKDEFCRCELKLQKWYGDLRGKPFAIEAENSILDISGFSKQYNCAFIWQKDGVKKLNLYLIINYFKGGKLRFKKIKPEAFEANRFYTVINKKSGEIVPMEVNFNFDDPNLIILPLAFGKRQGREFIWNDLLSLETGSLKLANGRVIEKTLYNRRTRQDEPALFVALTFERREVLDSSNIKPMNLIGVDRGENIPAVIALTDPEGCPLSRFKDSLGNPTHILRIGESYKEKQRTIQAKKEVEQRRAGGYSRKYASKAKNLADDMVRNTARDLLYYAVTQDAMLIFENLSRGFGRQGKRTFMAERQYTRMEDWLTAKLAYEGLPSKTYLSKTLAQYTSKTCSNCGFTITSADYDRVLEKLKKTATGWMTTINGKELKVEGQITYYNRYKRQNVVKDLSVELDRLSEESVNNDISSWTKGRSGEALSLLKKRFSHRPVQEKFVCLNCGFETHADEQAALNIARSWLFLRSQEYKKYQTNKTTGNTDKRAFVETWQSFYRKKLKEVWKPAV

SEQ ID NO: 36576 - protein, 978 aa, synthetic construct
  REGION 1..978: note = engineered CasX variant
QEIKRINKIRRRLVKDSNTKKAGKTGPMKTLLVRVMTPDLRERLENLRKKPENIPQPISNTSRANLNKLLTDYTEMKKAILHVYWEEFQKDPVGLMSRVAQPASKKIDQNKLKPEMDEKGNLTTAGFACSQCGQPLFVYKLEQVSEKGKAYTNYVGRCNVAEHEKLILLAQLKPEKDSDEAVTYSLGKFGQRALDFYSIHVTKESTHPVKPLAQIAGNRYASPVGKALSDACMGTIASFLSKYQDIIIEHQKVVKGNQKRLESLRELAGKENLEYPSVTLPPQPHTKEGVDAYNEVIARVRMWVNLNLWQKLKLSRDDAKPLLRLKGFPSFPLVERQQANEVDWWDMVCNVKKLINEKKEDGKVFWQNLAGYKRQEALRPYLSSEEDRKKGKKFARYQLGDLLLHLEKKHGEDWGKVYDEAWERIDKKVEGLSKHIKLEEERRSEDAQSKAALTDWLRAKASFVIEGLKEADKDEFCRCELKLQKWYGDLRGKPFAIEAENSILDISGFSKQYNCAFIWQKDGVKKLNLYLIINYFKGGKLRFKKIKPEAFEANRFYTVINKKSGEIVPMEVNFNFDDPNLIILPLAFGKRQGREFIWNDLLSLETGSLKLANGRVIEKTLYNRRTRQDEPALFVALTFERREVLDSSNIKPMNLIGVDRGENIPAVIALTDPEGCPLSRFKDSLGNPTHILRIGESYKEKQRTIQAKKEVEQRRAGGYSRKYASKAKNLADDMVRNTARDLLYYAVTQDAMLIFENLSRGFGRQGKRTFMAERQYTRMEDWLTAKLAYEGLPSKTYLSKTLAQYTSKTCSNCGFTITSADYDRVLEKLKKTATGWMTTINGKELKVEGQITYYNRYKRQNVVKDLSVELDRLSEESVNNDISSWTKGRSGEALSLLKKRFSHRPVQEKFVCLNCGFETHADEQAALNIARSWLFLRSQEYKKYQTNKTTGNTDKRAFVETWQSFYRKKLKEVWKPAV

SEQ ID NO: 36577 - protein, 979 aa, synthetic construct
  REGION 1..979: note = engineered CasX variant
QEIKRINKIRRRLVKDSNTKKAGKTGPMKTLLVRVMTPDLRERLENLRKKPENIPQPISNTSRANLNKLLTDYTEMKKAILHVYWEEFQKDPVGLMSRVAQPASKKIDQNKLKPEMDEKGNLTTAGFACSQCGQPLFVYKLEQVSEKGKAYTNYFGRCNVAEHEKLILLAQLKPEKDSDEAVTYSLGKFGQRALDFYSIHVTKESTHPVKPLAQIAGNRYASYPVGKALSDACMGTIASFLSKYQDIIIEHQKVVKGNQKRLESLRELAGKENLEYPSVTLPPQPHTKEGVDAYNEVIARVRMWVNLNLWQKLKLSRDDAKPLLRLKGFPSFPLVERQQANEVDWWDMVCNVKKLINEKKEDGKVFWQNLAGYKRQEALRPYLSSEEDRKKGKKFARYQLGDLLLHLEKKHGEDWGKVYDEAWERIDKKVEGLSKHIKLEEERRSEDAQSKAALTDWLRAKASFVIEGLKEADKDEFCRCELKLQKWYGDLRGKPFAIEAENSILDISGFSKQYNCAFIWQKDGVKKLNLYLIINYFKGGKLRFKKIKPEAFEANRFYTVINKKSGEIVPMEVNFNFDDPNLIILPLAFGKRQGREFIWNDLLSLETGSLKLANGRVIEKTLYNRRTRQDEPALFVALTFERREVLDSSNIKPMNLIGVDRGENIPAVIALTDPEGCPLSRFKDSLGNPTHILRIGESYKEKQRTIQAKKEVEQRRAGGYSRKYASKAKNLADDMVRNTARDLLYYAVTQDAMLIFENLSRGFGRQGKRTFMAERQYTRMEDWLTAKLAYEGLASKTYLSKTLAQYTSKTCSNCGFTITSADYDRVLEKLKKTATGWMTTINGKELKVEGQITYYNRYKRQNVVKDLSVELDRLSEESVNNDISSWTKGRSGEALSLLKKRFSHRPVQEKFVCLNCGFETHADEQAALNIARSWLFLRSQEYKKYQTNKTTGNTDKRAFVETWQSFYRKKLKEVWKPAV

SEQ ID NO: 36578 - protein, 979 aa, synthetic construct
  REGION 1..979: note = engineered CasX variant
QEIKRINKIRRRLVKDSNTKKAGKTGPMKTLLVRVMTPDLRERLENLRKKPENIPQPISNTSRANLNKLLTDYTEMKKAILHVYWEEFQKDPVGLMSRVAQPASKKIDQNKLKPEMDEKGNLTTAGFACSQCGQPLFVYKLEQVSEKGKAYTNYFGRCNVAEHEKLILLAQLKPEKDSDEAVTYSLGKFGQRALDFYSIHVTKESTHPVKPLAQIAGNRYASHPVGKALSDACMGTIASFLSKYQDIIIEHQKVVKGNQKRLESLRELAGKENLEYPSVTLPPQPHTKEGVDAYNEVIARVRMWVNLNLWQKLKLSRDDAKPLLRLKGFPSFPLVERQQANEVDWWDMVCNVKKLINEKKEDGKVFWQNLAGYKRQEALRPYLSSEEDRKKGKKFARYQLGDLLLHLEKKHGEDWGKVYDEAWERIDKKVEGLSKHIKLEEERRSEDAQSKAALTDWLRAKASFVIEGLKEADKDEFCRCELKLQKWYGDLRGKPFAIEAENSILDISGFSKQYNCAFIWQKDGVKKLNLYLIINYFKGGKLRFKKIKPEAFEANRFYTVINKKSGEIVPMEVNFNFDDPNLIILPLAFGKRQGREFIWNDLLSLETGSLKLANGRVIEKTLYNRRTRQDEPALFVALTFERREVLDSSNIKPMNLIGVDRGENIPAVIALTDPEGCPLSRFKDSLGNPTHILRIGESYKEKQRTIQAKKEVEQRRAGGYSRKYASKAKNLADDMVRNTARDLLYYAVTQDAMLIFENLSRGFGRQGKRTFMAERQYTRMEDWLTAKLAYEGLASKTYLSKTLAQYTSKTCSNCGFTITSADYDRVLEKLKKTATGWMTTINGKELKVEGQITYYNRYKRQNVVKDLSVELDRLSEESVNNDISSWTKGRSGEALSLLKKRFSHRPVQEKFVCLNCGFETHADEQAALNIARSWLFLRSQEYKKYQTNKTTGNTDKRAFVETWQSFYRKKLKEVWKPAV

SEQ ID NO: 36579 - protein, 979 aa, synthetic construct
  REGION 1..979: note = engineered CasX variant
QEIKRINKIRRRLVKDSNTKKAGKTGPMKTLLVRVMTPDLRERLENLRKKPENIPQPISNTSRANLNKLLTDYTEMKKAILHVYWEEFQKDPVGLMSRVAQPASKKIDQNKLKPEMDEKGNLTTAGFACSQCGQPLFVYKLEQVSEKGKAYTNYFGRCNVAEHEKLILLAQLKPEKDSDEAVTYSLGKFGQRALDFYSIHVTKESTHPVKPLAQIAGNRYASSPVGKALSDACMGTIASFLSKYQDIIIEHQKVVKGNQKRLESLRELAGKENLEYPSVTLPPQPHTKEGVDAYNEVIARVRMWVNLNLWQKLKLSRDDAKPLLRLKGFPSFPLVERQQANEVDWWDMVCNVKKLINEKKEDGKVFWQNLAGYKRQEALRPYLSSEEDRKKGKKFARYQLGDLLLHLEKKHGEDWGKVYDEAWERIDKKVEGLSKHIKLEEERRSEDAQSKAALTDWLRAKASFVIEGLKEADKDEFCRCELKLQKWYGDLRGKPFAIEAENSILDISGFSKQYNCAFIWQKDGVKKLNLYLIINYFKGGKLRFKKIKPEAFEANRFYTVINKKSGEIVPMEVNFNFDDPNLIILPLAFGKRQGREFIWNDLLSLETGSLKLANGRVIEKTLYNRRTRQDEPALFVALTFERREVLDSSNIKPMNLIGVDRGENIPAVIALTDPEGCPLSRFKDSLGNPTHILRIGESYKEKQRTIQAKKEVEQRRAGGYSRKYASKAKNLADDMVRNTARDLLYYAVTQDAMLIFENLSRGFGRQGKRTFMAERQYTRMEDWLTAKLAYEGLASKTYLSKTLAQYTSKTCSNCGFTITSADYDRVLEKLKKTATGWMTTINGKELKVEGQITYYNRYKRQNVVKDLSVELDRLSEESVNNDISSWTKGRSGEALSLLKKRFSHRPVQEKFVCLNCGFETHADEQAALNIARSWLFLRSQEYKKYQTNKTTGNTDKRAFVETWQSFYRKKLKEVWKPAV

SEQ ID NO: 36580 - protein, 979 aa, synthetic construct
  REGION 1..979: note = engineered CasX variant
QEIKRINKIRRRLVKDSNTKKAGKTGPMKTLLVRVMTPDLRERLENLRKKPENIPQPISNTSRANLNKLLTDYTEMKKAILHVYWEEFQKDPVGLMSRVAQPASKKIDQNKLKPEMDEKGNLTTAGFACSQCGQPLFVYKLEQVSEKGKAYTNYFGRCNVAEHEKLILLAQLKPEKDSDEAVTYSLGKFGQRALDFYSIHVTKESTHPVKPLAQIAGNRYASTPVGKALSDACMGTIASFLSKYQDIIIEHQKVVKGNQKRLESLRELAGKENLEYPSVTLPPQPHTKEGVDAYNEVIARVRMWVNLNLWQKLKLSRDDAKPLLRLKGFPSFPLVERQQANEVDWWDMVCNVKKLINEKKEDGKVFWQNLAGYKRQEALRPYLSSEEDRKKGKKFARYQLGDLLLHLEKKHGEDWGKVYDEAWERIDKKVEGLSKHIKLEEERRSEDAQSKAALTDWLRAKASFVIEGLKEADKDEFCRCELKLQKWYGDLRGKPFAIEAENSILDISGFSKQYNCAFIWQKDGVKKLNLYLIINYFKGGKLRFKKIKPEAFEANRFYTVINKKSGEIVPMEVNFNFDDPNLIILPLAFGKRQGREFIWNDLLSLETGSLKLANGRVIEKTLYNRRTRQDEPALFVALTFERREVLDSSNIKPMNLIGVDRGENIPAVIALTDPEGCPLSRFKDSLGNPTHILRIGESYKEKQRTIQAKKEVEQRRAGGYSRKYASKAKNLADDMVRNTARDLLYYAVTQDAMLIFENLSRGFGRQGKRTFMAERQYTRMEDWLTAKLAYEGLASKTYLSKTLAQYTSKTCSNCGFTITSADYDRVLEKLKKTATGWMTTINGKELKVEGQITYYNRYKRQNVVKDLSVELDRLSEESVNNDISSWTKGRSGEALSLLKKRFSHRPVQEKFVCLNCGFETHADEQAALNIARSWLFLRSQEYKKYQTNKTTGNTDKRAFVETWQSFYRKKLKEVWKPAV

SEQ ID NO: 36581 - protein, 979 aa, synthetic construct
  REGION 1..979: note = engineered CasX variant
QEIKRINKIRRRLVKDSNTKKAGKTGPMKTLLVRVMTPDLRERLENLRKKPENIPQPISNTSRANLNKLLTDYTEMKKAILHVYWEEFQKDPVGLMSRVAQPASKKIDQNKLKPEMDEKGNLTTAGFACSQCGQPLFVYKLEQVSEKGKAYTNYFGRCNVAEHEKLILLAQLKPEKDSDEAVTYSLGKFGQRALDFYSIHVTKESTHPVKPLAQIAGNRYASAPVGKALSDACMGTIASFLSKYQDIIIEHQKVVKGNQKRLESLRELAGKENLEYPSVTLPPQPHTKEGVDAYNEVIARVRMWVNLNLWQKLKLSRDDAKPLLRLKGFPSFPLVERQQANEVDWWDMVCNVKKLINEKKEDGKVFWQNLAGYKRQEALRPYLSSEEDRKKGKKFARYQLGDLLLHLEKKHGEDWGKVYDEAWERIDKKVEGLSKHIKLEEERRSEDAQSKAALTDWLRAKASFVIEGLKEADKDEFCRCELKLQKWYGDLRGKPFAIEAENSILDISGFSKQYNCAFIWQKDGVKKLNLYLIINYFKGGKLRFKKIKPEAFEANRFYTVINKKSGEIVPMEVNFNFDDPNLIILPLAFGKRQGREFIWNDLLSLETGSLKLANGRVIEKTLYNRRTRQDEPALFVALTFERREVLDSSNIKPMNLIGVDRGENIPAVIALTDPEGCPLSRFKDSLGNPTHILRIGESYKEKQRTIQAKKEVEQRRAGGYSRKYASKAKNLADDMVRNTARDLLYYAVTQDAMLIFENLSRGFGRQGKRTFMAERQYTRMEDWLTAKLAYEGLASKTYLSKTLAQYTSKTCSNCGFTITSADYDRVLEKLKKTATGWMTTINGKELKVEGQITYYNRYKRQNVVKDLSVELDRLSEESVNNDISSWTKGRSGEALSLLKKRFSHRPVQEKFVCLNCGFETHADEQAALNIARSWLFLRSQEYKKYQTNKTTGNTDKRAFVETWQSFYRKKLKEVWKPAV

SEQ ID NO: 36582 - protein, 979 aa, synthetic construct
  REGION 1..979: note = engineered CasX variant
QEIKRINKIRRRLVKDSNTKKAGKTGPMKTLLVRVMTPDLRERLENLRKKPENIPQPISNTSRANLNKLLTDYTEMKKAILHVYWEEFQKDPVGLMSRVAQPASKKIDQNKLKPEMDEKGNLTTAGFACSQCGQPLFVYKLEQVSEKGKAYTNYFGRCNVAEHEKLILLAQLKPEKDSDEAVTYSLGKFGQRALDFYSIHVTKESTHPVKPLAQIAGNRYASVPVGKALSDACMGTIASFLSKYQDIIIEHQKVVKGNQKRLESLRELAGKENLEYPSVTLPPQPHTKEGVDAYNEVIARVRMWVNLNLWQKLKLSRDDAKPLLRLKGFPSFPLVERQQANEVDWWDMVCNVKKLINEKKEDGKVFWQNLAGYKRQEALRPYLSSEEDRKKGKKFARYQLGDLLLHLEKKHGEDWGKVYDEAWERIDKKVEGLSKHIKLEEERRSEDAQSKAALTDWLRAKASFVIEGLKEADKDEFCRCELKLQKWYGDLRGKPFAIEAENSILDISGFSKQYNCAFIWQKDGVKKLNLYLIINYFKGGKLRFKKIKPEAFEANRFYTVINKKSGEIVPMEVNFNFDDPNLIILPLAFGKRQGREFIWNDLLSLETGSLKLANGRVIEKTLYNRRTRQDEPALFVALTFERREVLDSSNIKPMNLIGVDRGENIPAVIALTDPEGCPLSRFKDSLGNPTHILRIGESYKEKQRTIQAKKEVEQRRAGGYSRKYASKAKNLADDMVRNTARDLLYYAVTQDAMLIFENLSRGFGRQGKRTFMAERQYTRMEDWLTAKLAYEGLASKTYLSKTLAQYTSKTCSNCGFTITSADYDRVLEKLKKTATGWMTTINGKELKVEGQITYYNRYKRQNVVKDLSVELDRLSEESVNNDISSWTKGRSGEALSLLKKRFSHRPVQEKFVCLNCGFETHADEQAALNIARSWLFLRSQEYKKYQTNKTTGNTDKRAFVETWQSFYRKKLKEVWKPAV

SEQ ID NO: 36583 - protein, 979 aa, synthetic construct
  REGION 1..979: note = engineered CasX variant
QEIKRINKIRRRLVKDSNTKKAGKTGPMKTLLVRVMTPDLRERLENLRKKPENIPQPISNTSRANLNKLLTDYTEMKKAILHVYWEEFQKDPVGLMSRVAQPASKKIDQNKLKPEMDEKGNLTTAGFACSQCGQPLFVYKLEQVSEKGKAYTNYFGRCNVAEHEKLIKLAQLKPEKDSDEAVTYSLGKFGQRALDFYSIHVTKESTHPVKPLAQIAGNRYASGPVGKALSDACMGTIASFLSKYQDIIIEHQKVVKGNQKRLESLRELAGKENLEYPSVTLPPQPHTKEGVDAYNEVIARVRMWVNLNLWQKLKLSRDDAKPLLRLKGFPSFPLVERQQANEVDWWDMVCNVKKLINEKKEDGKVFWQNLAGYKRQEALRPYLSSEEDRKKGKKFARYQLGDLLLHLEKKHGEDWGKVYDEAWERIDKKVEGLSKHIKLEEERRSEDAQSKAALTDWLRAKASFVIEGLKEADKDEFCRCELKLQKWYGDLRGKPFAIEAENSILDISGFSKQYNCAFIWQKDGVKKLNLYLIINYFKGGKLRFKKIKPEAFEANRFYTVINKKSGEIVPMEVNFNFDDPNLIILPLAFGKRQGREFIWNDLLSLETGSLKLANGRVIEKTLYNRRTRQDEPALFVALTFERREVLDSSNIKPMNLIGVDRGENIPAVIALTDPEGCPLSRFKDSLGNPTHILRIGESYKEKQRTIQAKKEVEQRRAGGYSRKYASKAKNLADDMVRNTARDLLYYAVTQDAMLIFENLSRGFGRQGKRTFMAERQYTRMEDWLTAKLAYEGLASKTYLSKTLAQYTSKTCSNCGFTITSADYDRVLEKLKKTATGWMTTINGKELKVEGQITYYNRYKRQNVVKDLSVELDRLSEESVNNDISSWTKGRSGEALSLLKKRFSHRPVQEKFVCLNCGFETHADEQAALNIARSWLFLRSQEYKKYQTNKTTGNTDKRAFVETWQSFYRKKLKEVWKPAV

SEQ ID NO: 36584 - protein, 978 aa, synthetic construct
  REGION 1..978: note = engineered CasX variant
QEIKRINKIRRRLVKDSNTKKAGKTGPMKTLLVRVMTPDLRERLENLRKKPENIPQPISNTSRANLNKLLTDYTEMKKAILHVYWEEFQKDPVGLMSRVAQPASKKIDQNKLKPEMDEKGNLTTAGFACSQCGQPLFVYKLEQVSEKGKAYTNYFGRCNVAEHEKLILLAQLKPEKDSDEAVTYSLGKFGQRALDFYSIHVTKESTHPVKPLAQIAGNRYASPVGKALSDACMGTIASFLSKYQDIIIEHQKVVKGNQKRLESLRELAGKENLEYPSVTLPPQPHTKEGVDAYNEVIARVRMWVNLNLWQKLKLSRDDAKPLLRLKGFPSFPLVERQQANEVDWWDMVCNVKKLINEKKEDGKVFWQNLAGYKRQEALRPYLSSEEDRKKGKKFARYQLGDLLLHLEKKHGEDWGKVYDEAWERIDKKVEGLSKHIKLEEERRSEDAQSKAALTDWLRAKASFVIEGLKEADKDEFCRCELKLQKWYGDLRGKPFAIEAENSILDISGFSKQYNCAFIWQKDGVKKLNLYLIINYFKGGKLRFKKIKPEAFEANRFYTVINKKSGEIVPMEVNFNFDDPNLIILPLAFGKRQGREFIWNDLLSLETGSLKLANGRVIEKTLYNRRTRQDEPALFVALTFERREVLDSSNIKPMNLIGVDRGENIPAVIALTDPEGCPLSRFKDSLGNPTHILRIGESYKEKQRTIQAKKEVEQRRAGGYSRKYASKAKNLADDMVRNTARDLLYYAVTQDAMLIFENLSRGFGRQGKRTFMAERQYTRMEDWLTAKLAYEGLASKTYLSKTLAQYTSKTCSNCGFTITSADYDRVLEKLKKTATGWMTTINGKELKVEGQITYYNRYKRQNVVKDLSVELDRLSEESVNNDISSWTKGRSGEALSLLKKRFSHRPVQEKFVCLNCGFETHADEQAALNIARSWLFLRSQEYKKYQTNKTTGNTDKRAFVETWQSFYRKKLKEVWKPAV

SEQ ID NO: 36585 - protein, 979 aa, synthetic construct
  REGION 1..979: note = engineered CasX variant
QEIKRINKIRRRLVKDSNTKKAGKTGPMKTLLVRVMTPDLRERLENLRKKPENIPQPISNTSRANLNKLLTDYTEMKKAILHVYWEEFQKDPVGLMSRVAQPASKKIDQNKLKPEMDEKGNLTTAGFACSQCGQPLFVYKLEQVSEKGKAYTNYFGRCNVAEHEKLILLAQLKPEKDSDEAVTYSLGKFGQRALDFYSIHVTKESTHPVKPLAQIAGNRYASYPVGKALSDACMGTIASFLSKYQDIIIEHQKVVKGNQKRLESLRELAGKENLEYPSVTLPPQPHTKEGVDAYNEVIARVRMWVNLNLWQKLKLSRDDAKPLLRLKGFPSFPLVERQQANEVDWWDMVCNVKKLINEKKEDGKVFWQNLAGYKRQEALRPYLSSEEDRKKGKKFARYQLGDLLLHLEKKHGEDWGKVYDEAWERIDKKVEGLSKHIKLEEERRSEDAQSKAALTDWLRAKASFVIEGLKEADKDEFCRCELKLQKWYGDLRGKPFAIEAENSILDISGFSKQYNCAFIWQKDGVKKLNLYLIINYFKGGKLRFKKIKPEAFEANRFYTVINKKSGEIVPMEVNFNFDDPNLIILPLAFGKRQGREFIWNDLLSLETGSLKLANGRVIEKTLYNRRTRQDEPALFVALTFERREVLDSSNIKPMNLIGVDRGENIPAVIALTDPEGCPLSRFKDSLGNPTHILRIGESYKEKQRTIQAKKEVEQRRAGGYSRKYASKAKNLADDMVRNTARDLLYYAVTQDAMLIFENLSRGFGRQGKRTFMAERQYTRMEDWLTAKLAYEGLPSKVYLSKTLAQYTSKTCSNCGFTITSADYDRVLEKLKKTATGWMTTINGKELKVEGQITYYNRYKRQNVVKDLSVELDRLSEESVNNDISSWTKGRSGEALSLLKKRFSHRPVQEKFVCLNCGFETHADEQAALNIARSWLFLRSQEYKKYQTNKTTGNTDKRAFVETWQSFYRKKLKEVWKPAV

SEQ ID NO: 36586 - protein, 979 aa, synthetic construct
  REGION 1..979: note = engineered CasX variant
QEIKRINKIRRRLVKDSNTKKAGKTGPMKTLLVRVMTPDLRERLENLRKKPENIPQPISNTSRANLNKLLTDYTEMKKAILHVYWEEFQKDPVGLMSRVAQPASKKIDQNKLKPEMDEKGNLTTAGFACSQCGQPLFVYKLEQVSEKGKAYTNYFGRCNVAEHEKLILLAQLKPEKDSDEAVTYSLGKFGQRALDFYSIHVTKESTHPVKPLAQIAGNRYASHPVGKALSDACMGTIASFLSKYQDIIIEHQKVVKGNQKRLESLRELAGKENLEYPSVTLPPQPHTKEGVDAYNEVIARVRMWVNLNLWQKLKLSRDDAKPLLRLKGFPSFPLVERQQANEVDWWDMVCNVKKLINEKKEDGKVFWQNLAGYKRQEALRPYLSSEEDRKKGKKFARYQLGDLLLHLEKKHGEDWGKVYDEAWERIDKKVEGLSKHIKLEEERRSEDAQSKAALTDWLRAKASFVIEGLKEADKDEFCRCELKLQKWYGDLRGKPFAIEAENSILDISGFSKQYNCAFIWQKDGVKKLNLYLIINYFKGGKLRFKKIKPEAFEANRFYTVINKKSGEIVPMEVNFNFDDPNLIILPLAFGKRQGREFIWNDLLSLETGSLKLANGRVIEKTLYNRRTRQDEPALFVALTFERREVLDSSNIKPMNLIGVDRGENIPAVIALTDPEGCPLSRFKDSLGNPTHILRIGESYKEKQRTIQAKKEVEQRRAGGYSRKYASKAKNLADDMVRNTARDLLYYAVTQDAMLIFENLSRGFGRQGKRTFMAERQYTRMEDWLTAKLAYEGLPSKVYLSKTLAQYTSKTCSNCGFTITSADYDRVLEKLKKTATGWMTTINGKELKVEGQITYYNRYKRQNVVKDLSVELDRLSEESVNNDISSWTKGRSGEALSLLKKRFSHRPVQEKFVCLNCGFETHADEQAALNIARSWLFLRSQEYKKYQTNKTTGNTDKRAFVETWQSFYRKKLKEVWKPAV

SEQ ID NO: 36587 - protein, 979 aa, synthetic construct
  REGION 1..979: note = engineered CasX variant
QEIKRINKIRRRLVKDSNTKKAGKTGPMKTLLVRVMTPDLRERLENLRKKPENIPQPISNTSRANLNKLLTDYTEMKKAILHVYWEEFQKDPVGLMSRVAQPASKKIDQNKLKPEMDEKGNLTTAGFACSQCGQPLFVYKLEQVSEKGKAYTNYFGRCNVAEHEKLILLAQLKPEKDSDEAVTYSLGKFGQRALDFYSIHVTKESTHPVKPLAQIAGNRYASSPVGKALSDACMGTIASFLSKYQDIIIEHQKVVKGNQKRLESLRELAGKENLEYPSVTLPPQPHTKEGVDAYNEVIARVRMWVNLNLWQKLKLSRDDAKPLLRLKGFPSFPLVERQQANEVDWWDMVCNVKKLINEKKEDGKVFWQNLAGYKRQEALRPYLSSEEDRKKGKKFARYQLGDLLLHLEKKHGEDWGKVYDEAWERIDKKVEGLSKHIKLEEERRSEDAQSKAALTDWLRAKASFVIEGLKEADKDEFCRCELKLQKWYGDLRGKPFAIEAENSILDISGFSKQYNCAFIWQKDGVKKLNLYLIINYFKGGKLRFKKIKPEAFEANRFYTVINKKSGEIVPMEVNFNFDDPNLIILPLAFGKRQGREFIWNDLLSLETGSLKLANGRVIEKTLYNRRTRQDEPALFVALTFERREVLDSSNIKPMNLIGVDRGENIPAVIALTDPEGCPLSRFKDSLGNPTHILRIGESYKEKQRTIQAKKEVEQRRAGGYSRKYASKAKNLADDMVRNTARDLLYYAVTQDAMLIFENLSRGFGRQGKRTFMAERQYTRMEDWLTAKLAYEGLPSKVYLSKTLAQYTSKTCSNCGFTITSADYDRVLEKLKKTATGWMTTINGKELKVEGQITYYNRYKRQNVVKDLSVELDRLSEESVNNDISSWTKGRSGEALSLLKKRFSHRPVQEKFVCLNCGFETHADEQAALNIARSWLFLRSQEYKKYQTNKTTGNTDKRAFVETWQSFYRKKLKEVWKPAV

SEQ ID NO: 36588 - protein, 979 aa, synthetic construct
  REGION 1..979: note = engineered CasX variant
QEIKRINKIRRRLVKDSNTKKAGKTGPMKTLLVRVMTPDLRERLENLRKKPENIPQPISNTSRANLNKLLTDYTEMKKAILHVYWEEFQKDPVGLMSRVAQPASKKIDQNKLKPEMDEKGNLTTAGFACSQCGQPLFVYKLEQVSEKGKAYTNYFGRCNVAEHEKLILLAQLKPEKDSDEAVTYSLGKFGQRALDFYSIHVTKESTHPVKPLAQIAGNRYASTPVGKALSDACMGTIASFLSKYQDIIIEHQKVVKGNQKRLESLRELAGKENLEYPSVTLPPQPHTKEGVDAYNEVIARVRMWVNLNLWQKLKLSRDDAKPLLRLKGFPSFPLVERQQANEVDWWDMVCNVKKLINEKKEDGKVFWQNLAGYKRQEALRPYLSSEEDRKKGKKFARYQLGDLLLHLEKKHGEDWGKVYDEAWERIDKKVEGLSKHIKLEEERRSEDAQSKAALTDWLRAKASFVIEGLKEADKDEFCRCELKLQKWYGDLRGKPFAIEAENSILDISGFSKQYNCAFIWQKDGVKKLNLYLIINYFKGGKLRFKKIKPEAFEANRFYTVINKKSGEIVPMEVNFNFDDPNLIILPLAFGKRQGREFIWNDLLSLETGSLKLANGRVIEKTLYNRRTRQDEPALFVALTFERREVLDSSNIKPMNLIGVDRGENIPAVIALTDPEGCPLSRFKDSLGNPTHILRIGESYKEKQRTIQAKKEVEQRRAGGYSRKYASKAKNLADDMVRNTARDLLYYAVTQDAMLIFENLSRGFGRQGKRTFMAERQYTRMEDWLTAKLAYEGLPSKVYLSKTLAQYTSKTCSNCGFTITSADYDRVLEKLKKTATGWMTTINGKELKVEGQITYYNRYKRQNVVKDLSVELDRLSEESVNNDISSWTKGRSGEALSLLKKRFSHRPVQEKFVCLNCGFETHADEQAALNIARSWLFLRSQEYKKYQTNKTTGNTDKRAFVETWQSFYRKKLKEVWKPAV

SEQ ID NO: 36589 - protein, 979 aa, synthetic construct
  REGION 1..979: note = engineered CasX variant
QEIKRINKIRRRLVKDSNTKKAGKTGPMKTLLVRVMTPDLRERLENLRKKPENIPQPISNTSRANLNKLLTDYTEMKKAILHVYWEEFQKDPVGLMSRVAQPASKKIDQNKLKPEMDEKGNLTTAGFACSQCGQPLFVYKLEQVSEKGKAYTNYFGRCNVAEHEKLILLAQLKPEKDSDEAVTYSLGKFGQRALDFYSIHVTKESTHPVKPLAQIAGNRYASAPVGKALSDACMGTIASFLSKYQDIIIEHQKVVKGNQKRLESLRELAGKENLEYPSVTLPPQPHTKEGVDAYNEVIARVRMWVNLNLWQKLKLSRDDAKPLLRLKGFPSFPLVERQQANEVDWWDMVCNVKKLINEKKEDGKVFWQNLAGYKRQEALRPYLSSEEDRKKGKKFARYQLGDLLLHLEKKHGEDWGKVYDEAWERIDKKVEGLSKHIKLEEERRSEDAQSKAALTDWLRAKASFVIEGLKEADKDEFCRCELKLQKWYGDLRGKPFAIEAENSILDISGFSKQYNCAFIWQKDGVKKLNLYLIINYFKGGKLRFKKIKPEAFEANRFYTVINKKSGEIVPMEVNFNFDDPNLIILPLAFGKRQGREFIWNDLLSLETGSLKLANGRVIEKTLYNRRTRQDEPALFVALTFERREVLDSSNIKPMNLIGVDRGENIPAVIALTDPEGCPLSRFKDSLGNPTHILRIGESYKEKQRTIQAKKEVEQRRAGGYSRKYASKAKNLADDMVRNTARDLLYYAVTQDAMLIFENLSRGFGRQGKRTFMAERQYTRMEDWLTAKLAYEGLPSKVYLSKTLAQYTSKTCSNCGFTITSADYDRVLEKLKKTATGWMTTINGKELKVEGQITYYNRYKRQNVVKDLSVELDRLSEESVNNDISSWTKGRSGEALSLLKKRFSHRPVQEKFVCLNCGFETHADEQAALNIARSWLFLRSQEYKKYQTNKTTGNTDKRAFVETWQSFYRKKLKEVWKPAV

SEQ ID NO: 36590 - protein, 979 aa, synthetic construct
  REGION 1..979: note = engineered CasX variant
QEIKRINKIRRRLVKDSNTKKAGKTGPMKTLLVRVMTPDLRERLENLRKKPENIPQPISNTSRANLNKLLTDYTEMKKAILHVYWEEFQKDPVGLMSRVAQPASKKIDQNKLKPEMDEKGNLTTAGFACSQCGQPLFVYKLEQVSEKGKAYTNYFGRCNVAEHEKLILLAQLKPEKDSDEAVTYSLGKFGQRALDFYSIHVTKESTHPVKPLAQIAGNRYASVPVGKALSDACMGTIASFLSKYQDIIIEHQKVVKGNQKRLESLRELAGKENLEYPSVTLPPQPHTKEGVDAYNEVIARVRMWVNLNLWQKLKLSRDDAKPLLRLKGFPSFPLVERQQANEVDWWDMVCNVKKLINEKKEDGKVFWQNLAGYKRQEALRPYLSSEEDRKKGKKFARYQLGDLLLHLEKKHGEDWGKVYDEAWERIDKKVEGLSKHIKLEEERRSEDAQSKAALTDWLRAKASFVIEGLKEADKDEFCRCELKLQKWYGDLRGKPFAIEAENSILDISGFSKQYNCAFIWQKDGVKKLNLYLIINYFKGGKLRFKKIKPEAFEANRFYTVINKKSGEIVPMEVNFNFDDPNLIILPLAFGKRQGREFIWNDLLSLETGSLKLANGRVIEKTLYNRRTRQDEPALFVALTFERREVLDSSNIKPMNLIGVDRGENIPAVIALTDPEGCPLSRFKDSLGNPTHILRIGESYKEKQRTIQAKKEVEQRRAGGYSRKYASKAKNLADDMVRNTARDLLYYAVTQDAMLIFENLSRGFGRQGKRTFMAERQYTRMEDWLTAKLAYEGLPSKVYLSKTLAQYTSKTCSNCGFTITSADYDRVLEKLKKTATGWMTTINGKELKVEGQITYYNRYKRQNVVKDLSVELDRLSEESVNNDISSWTKGRSGEALSLLKKRFSHRPVQEKFVCLNCGFETHADEQAALNIARSWLFLRSQEYKKYQTNKTTGNTDKRAFVETWQSFYRKKLKEVWKPAV

SEQ ID NO: 36591 - protein, 979 aa, synthetic construct
  REGION 1..979: note = engineered CasX variant
QEIKRINKIRRRLVKDSNTKKAGKTGPMKTLLVRVMTPDLRERLENLRKKPENIPQPISNTSRANLNKLLTDYTEMKKAILHVYWEEFQKDPVGLMSRVAQPASKKIDQNKLKPEMDEKGNLTTAGFACSQCGQPLFVYKLEQVSEKGKAYTNYFGRCNVAEHEKLIKLAQLKPEKDSDEAVTYSLGKFGQRALDFYSIHVTKESTHPVKPLAQIAGNRYASGPVGKALSDACMGTIASFLSKYQDIIIEHQKVVKGNQKRLESLRELAGKENLEYPSVTLPPQPHTKEGVDAYNEVIARVRMWVNLNLWQKLKLSRDDAKPLLRLKGFPSFPLVERQQANEVDWWDMVCNVKKLINEKKEDGKVFWQNLAGYKRQEALRPYLSSEEDRKKGKKFARYQLGDLLLHLEKKHGEDWGKVYDEAWERIDKKVEGLSKHIKLEEERRSEDAQSKAALTDWLRAKASFVIEGLKEADKDEFCRCELKLQKWYGDLRGKPFAIEAENSILDISGFSKQYNCAFIWQKDGVKKLNLYLIINYFKGGKLRFKKIKPEAFEANRFYTVINKKSGEIVPMEVNFNFDDPNLIILPLAFGKRQGREFIWNDLLSLETGSLKLANGRVIEKTLYNRRTRQDEPALFVALTFERREVLDSSNIKPMNLIGVDRGENIPAVIALTDPEGCPLSRFKDSLGNPTHILRIGESYKEKQRTIQAKKEVEQRRAGGYSRKYASKAKNLADDMVRNTARDLLYYAVTQDAMLIFENLSRGFGRQGKRTFMAERQYTRMEDWLTAKLAYEGLPSKVYLSKTLAQYTSKTCSNCGFTITSADYDRVLEKLKKTATGWMTTINGKELKVEGQITYYNRYKRQNVVKDLSVELDRLSEESVNNDISSWTKGRSGEALSLLKKRFSHRPVQEKFVCLNCGFETHADEQAALNIARSWLFLRSQEYKKYQTNKTTGNTDKRAFVETWQSFYRKKLKEVWKPAV

SEQ ID NO: 36592 - protein, 978 aa, synthetic construct
  REGION 1..978: note = engineered CasX variant
QEIKRINKIRRRLVKDSNTKKAGKTGPMKTLLVRVMTPDLRERLENLRKKPENIPQPISNTSRANLNKLLTDYTEMKKAILHVYWEEFQKDPVGLMSRVAQPASKKIDQNKLKPEMDEKGNLTTAGFACSQCGQPLFVYKLEQVSEKGKAYTNYFGRCNVAEHEKLILLAQLKPEKDSDEAVTYSLGKFGQRALDFYSIHVTKESTHPVKPLAQIAGNRYASPVGKALSDACMGTIASFLSKYQDIIIEHQKVVKGNQKRLESLRELAGKENLEYPSVTLPPQPHTKEGVDAYNEVIARVRMWVNLNLWQKLKLSRDDAKPLLRLKGFPSFPLVERQQANEVDWWDMVCNVKKLINEKKEDGKVFWQNLAGYKRQEALRPYLSSEEDRKKGKKFARYQLGDLLLHLEKKHGEDWGKVYDEAWERIDKKVEGLSKHIKLEEERRSEDAQSKAALTDWLRAKASFVIEGLKEADKDEFCRCELKLQKWYGDLRGKPFAIEAENSILDISGFSKQYNCAFIWQKDGVKKLNLYLIINYFKGGKLRFKKIKPEAFEANRFYTVINKKSGEIVPMEVNFNFDDPNLIILPLAFGKRQGREFIWNDLLSLETGSLKLANGRVIEKTLYNRRTRQDEPALFVALTFERREVLDSSNIKPMNLIGVDRGENIPAVIALTDPEGCPLSRFKDSLGNPTHILRIGESYKEKQRTIQAKKEVEQRRAGGYSRKYASKAKNLADDMVRNTARDLLYYAVTQDAMLIFENLSRGFGRQGKRTFMAERQYTRMEDWLTAKLAYEGLPSKVYLSKTLAQYTSKTCSNCGFTITSADYDRVLEKLKKTATGWMTTINGKELKVEGQITYYNRYKRQNVVKDLSVELDRLSEESVNNDISSWTKGRSGEALSLLKKRFSHRPVQEKFVCLNCGFETHADEQAALNIARSWLFLRSQEYKKYQTNKTTGNTDKRAFVETWQSFYRKKLKEVWKPAV

SEQ ID NO: 36593 - protein, 980 aa, synthetic construct
  REGION 1..980: note = engineered CasX variant
QEIKRINKIRRRLVKDSNTKKAGKTGPMKTLLVRVMTPDLRERLENLRKKPENIPQPISNTSRANLNKLLTDYTEMKKAILHVYWEEFQKDPVGLMSRVAQPASKKIDQNKLKPEMDEKGNLTTAGFACSQCGQPLFVYKLEQVSEKGKAYTNYFGRCNVAEHEKLILLAQLKPEKDSDEAVTYSLGKFGQRALDFYSIHVTKESTHPVKPLAQIAGNRYASYPVGKALSDACMGTIASFLSKYQDIIIEHQKVVKGNQKRLESLRELAGKENLEYPSVTLPPQPHTKEGVDAYNEVIARVRMWVNLNLWQKLKLSRDDAKPLLRLKGFPSFPLVERQQANEVDWWDMVCNVKKLINEKKEDGKVFWQNLAGYKRQEALRPYLSSEEDRKKGKKFARYQLGDLLLHLEKKHGEDWGKVYDEAWERIDKKVEGLSKHIKLEEERRSEDAQSKAALTDWLRAKASFVIEGLKEADKDEFCRCELKLQKWYGDLRGKPFAIEAENSILDISGFSKQYNCAFIWQKDGVKKLNLYLIINYFKGGKLRFKKIKPEAFEANRFYTVINKKSGEIVPMEVNFNFDDPNLIILPLAFGKRQGREFIWNDLLSLETGSLKLANGRVIEKTLYNRRTRQDEPALFVALTFERREVLDSSNIKPMNLIGVDRGENIPAVIALTDPEGCPLSRFKDSLGNPTHILRIGESYKEKQRTIQAKKEVEQRRAGGYSRKYASKAKNLADDMVRNTARDLLYYAVTQDAMLIFENLSRGFGRQGKRTFMAERQYTRMEDWLTAKLAYEGPLPSKTYLSKTLAQYTSKTCSNCGFTITSADYDRVLEKLKKTATGWMTTINGKELKVEGQITYYNRYKRQNVVKDLSVELDRLSEESVNNDISSWTKGRSGEALSLLKKRFSHRPVQEKFVCLNCGFETHADEQAALNIARSWLFLRSQEYKKYQTNKTTGNTDKRAFVETWQSFYRKKLKEVWKPAV

SEQ ID NO: 36594 - protein, 980 aa, synthetic construct
  REGION 1..980: note = engineered CasX variant
QEIKRINKIRRRLVKDSNTKKAGKTGPMKTLLVRVMTPDLRERLENLRKKPENIPQPISNTSRANLNKLLTDYTEMKKAILHVYWEEFQKDPVGLMSRVAQPASKKIDQNKLKPEMDEKGNLTTAGFACSQCGQPLFVYKLEQVSEKGKAYTNYFGRCNVAEHEKLILLAQLKPEKDSDEAVTYSLGKFGQRALDFYSIHVTKESTHPVKPLAQIAGNRYASHPVGKALSDACMGTIASFLSKYQDIIIEHQKVVKGNQKRLESLRELAGKENLEYPSVTLPPQPHTKEGVDAYNEVIARVRMWVNLNLWQKLKLSRDDAKPLLRLKGFPSFPLVERQQANEVDWWDMVCNVKKLINEKKEDGKVFWQNLAGYKRQEALRPYLSSEEDRKKGKKFARYQLGDLLLHLEKKHGEDWGKVYDEAWERIDKKVEGLSKHIKLEEERRSEDAQSKAALTDWLRAKASFVIEGLKEADKDEFCRCELKLQKWYGDLRGKPFAIEAENSILDISGFSKQYNCAFIWQKDGVKKLNLYLIINYFKGGKLRFKKIKPEAFEANRFYTVINKKSGEIVPMEVNFNFDDPNLIILPLAFGKRQGREFIWNDLLSLETGSLKLANGRVIEKTLYNRRTRQDEPALFVALTFERREVLDSSNIKPMNLIGVDRGENIPAVIALTDPEGCPLSRFKDSLGNPTHILRIGESYKEKQRTIQAKKEVEQRRAGGYSRKYASKAKNLADDMVRNTARDLLYYAVTQDAMLIFENLSRGFGRQGKRTFMAERQYTRMEDWLTAKLAYEGPLPSKTYLSKTLAQYTSKTCSNCGFTITSADYDRVLEKLKKTATGWMTTINGKELKVEGQITYYNRYKRQNVVKDLSVELDRLSEESVNNDISSWTKGRSGEALSLLKKRFSHRPVQEKFVCLNCGFETHADEQAALNIARSWLFLRSQEYKKYQTNKTTGNTDKRAFVETWQSFYRKKLKEVWKPAV

SEQ ID NO: 36595 - protein, 980 aa, synthetic construct
  REGION 1..980: note = engineered CasX variant
QEIKRINKIRRRLVKDSNTKKAGKTGPMKTLLVRVMTPDLRERLENLRKKPENIPQPISNTSRANLNKLLTDYTEMKKAILHVYWEEFQKDPVGLMSRVAQPASKKIDQNKLKPEMDEKGNLTTAGFACSQCGQPLFVYKLEQVSEKGKAYTNYFGRCNVAEHEKLILLAQLKPEKDSDEAVTYSLGKFGQRALDFYSIHVTKESTHPVKPLAQIAGNRYASSPVGKALSDACMGTIASFLSKYQDIIIEHQKVVKGNQKRLESLRELAGKENLEYPSVTLPPQPHTKEGVDAYNEVIARVRMWVNLNLWQKLKLSRDDAKPLLRLKGFPSFPLVERQQANEVDWWDMVCNVKKLINEKKEDGKVFWQNLAGYKRQEALRPYLSSEEDRKKGKKFARYQLGDLLLHLEKKHGEDWGKVYDEAWERIDKKVEGLSKHIKLEEERRSEDAQSKAALTDWLRAKASFVIEGLKEADKDEFCRCELKLQKWYGDLRGKPFAIEAENSILDISGFSKQYNCAFIWQKDGVKKLNLYLIINYFKGGKLRFKKIKPEAFEANRFYTVINKKSGEIVPMEVNFNFDDPNLIILPLAFGKRQGREFIWNDLLSLETGSLKLANGRVIEKTLYNRRTRQDEPALFVALTFERREVLDSSNIKPMNLIGVDRGENIPAVIALTDPEGCPLSRFKDSLGNPTHILRIGESYKEKQRTIQAKKEVEQRRAGGYSRKYASKAKNLADDMVRNTARDLLYYAVTQDAMLIFENLSRGFGRQGKRTFMAERQYTRMEDWLTAKLAYEGPLPSKTYLSKTLAQYTSKTCSNCGFTITSADYDRVLEKLKKTATGWMTTINGKELKVEGQITYYNRYKRQNVVKDLSVELDRLSEESVNNDISSWTKGRSGEALSLLKKRFSHRPVQEKFVCLNCGFETHADEQAALNIARSWLFLRSQEYKKYQTNKTTGNTDKRAFVETWQSFYRKKLKEVWKPAV

SEQ ID NO: 36596 - protein, 980 aa, synthetic construct
  REGION 1..980: note = engineered CasX variant
QEIKRINKIRRRLVKDSNTKKAGKTGPMKTLLVRVMTPDLRERLENLRKKPENIPQPISNTSRANLNKLLTDYTEMKKAILHVYWEEFQKDPVGLMSRVAQPASKKIDQNKLKPEMDEKGNLTTAGFACSQCGQPLFVYKLEQVSEKGKAYTNYFGRCNVAEHEKLILLAQLKPEKDSDEAVTYSLGKFGQRALDFYSIHVTKESTHPVKPLAQIAGNRYASTPVGKALSDACMGTIASFLSKYQDIIIEHQKVVKGNQKRLESLRELAGKENLEYPSVTLPPQPHTKEGVDAYNEVIARVRMWVNLNLWQKLKLSRDDAKPLLRLKGFPSFPLVERQQANEVDWWDMVCNVKKLINEKKEDGKVFWQNLAGYKRQEALRPYLSSEEDRKKGKKFARYQLGDLLLHLEKKHGEDWGKVYDEAWERIDKKVEGLSKHIKLEEERRSEDAQSKAALTDWLRAKASFVIEGLKEADKDEFCRCELKLQKWYGDLRGKPFAIEAENSILDISGFSKQYNCAFIWQKDGVKKLNLYLIINYFKGGKLRFKKIKPEAFEANRFYTVINKKSGEIVPMEVNFNFDDPNLIILPLAFGKRQGREFIWNDLLSLETGSLKLANGRVIEKTLYNRRTRQDEPALFVALTFERREVLDSSNIKPMNLIGVDRGENIPAVIALTDPEGCPLSRFKDSLGNPTHILRIGESYKEKQRTIQAKKEVEQRRAGGYSRKYASKAKNLADDMVRNTARDLLYYAVTQDAMLIFENLSRGFGRQGKRTFMAERQYTRMEDWLTAKLAYEGPLPSKTYLSKTLAQYTSKTCSNCGFTITSADYDRVLEKLKKTATGWMTTINGKELKVEGQITYYNRYKRQNVVKDLSVELDRLSEESVNNDISSWTKGRSGEALSLLKKRFSHRPVQEKFVCLNCGFETHADEQAALNIARSWLFLRSQEYKKYQTNKTTGNTDKRAFVETWQSFYRKKLKEVWKPAV

SEQ ID NO: 36597 - protein, 980 aa, synthetic construct
  REGION 1..980: note = engineered CasX variant
QEIKRINKIRRRLVKDSNTKKAGKTGPMKTLLVRVMTPDLRERLENLRKKPENIPQPISNTSRANLNKLLTDYTEMKKAILHVYWEEFQKDPVGLMSRVAQPASKKIDQNKLKPEMDEKGNLTTAGFACSQCGQPLFVYKLEQVSEKGKAYTNYFGRCNVAEHEKLILLAQLKPEKDSDEAVTYSLGKFGQRALDFYSIHVTKESTHPVKPLAQIAGNRYASAPVGKALSDACMGTIASFLSKYQDIIIEHQKVVKGNQKRLESLRELAGKENLEYPSVTLPPQPHTKEGVDAYNEVIARVRMWVNLNLWQKLKLSRDDAKPLLRLKGFPSFPLVERQQANEVDWWDMVCNVKKLINEKKEDGKVFWQNLAGYKRQEALRPYLSSEEDRKKGKKFARYQLGDLLLHLEKKHGEDWGKVYDEAWERIDKKVEGLSKHIKLEEERRSEDAQSKAALTDWLRAKASFVIEGLKEADKDEFCRCELKLQKWYGDLRGKPFAIEAENSILDISGFSKQYNCAFIWQKDGVKKLNLYLIINYFKGGKLRFKKIKPEAFEANRFYTVINKKSGEIVPMEVNFNFDDPNLIILPLAFGKRQGREFIWNDLLSLETGSLKLANGRVIEKTLYNRRTRQDEPALFVALTFERREVLDSSNIKPMNLIGVDRGENIPAVIALTDPEGCPLSRFKDSLGNPTHILRIGESYKEKQRTIQAKKEVEQRRAGGYSRKYASKAKNLADDMVRNTARDLLYYAVTQDAMLIFENLSRGFGRQGKRTFMAERQYTRMEDWLTAKLAYEGPLPSKTYLSKTLAQYTSKTCSNCGFTITSADYDRVLEKLKKTATGWMTTINGKELKVEGQITYYNRYKRQNVVKDLSVELDRLSEESVNNDISSWTKGRSGEALSLLKKRFSHRPVQEKFVCLNCGFETHADEQAALNIARSWLFLRSQEYKKYQTNKTTGNTDKRAFVETWQSFYRKKLKEVWKPAV

SEQ ID NO: 36598 - protein, 980 aa, synthetic construct
  REGION 1..980: note = engineered CasX variant
QEIKRINKIRRRLVKDSNTKKAGKTGPMKTLLVRVMTPDLRERLENLRKKPENIPQPISNTSRANLNKLLTDYTEMKKAILHVYWEEFQKDPVGLMSRVAQPASKKIDQNKLKPEMDEKGNLTTAGFACSQCGQPLFVYKLEQVSEKGKAYTNYFGRCNVAEHEKLILLAQLKPEKDSDEAVTYSLGKFGQRALDFYSIHVTKESTHPVKPLAQIAGNRYASVPVGKALSDACMGTIASFLSKYQDIIIEHQKVVKGNQKRLESLRELAGKENLEYPSVTLPPQPHTKEGVDAYNEVIARVRMWVNLNLWQKLKLSRDDAKPLLRLKGFPSFPLVERQQANEVDWWDMVCNVKKLINEKKEDGKVFWQNLAGYKRQEALRPYLSSEEDRKKGKKFARYQLGDLLLHLEKKHGEDWGKVYDEAWERIDKKVEGLSKHIKLEEERRSEDAQSKAALTDWLRAKASFVIEGLKEADKDEFCRCELKLQKWYGDLRGKPFAIEAENSILDISGFSKQYNCAFIWQKDGVKKLNLYLIINYFKGGKLRFKKIKPEAFEANRFYTVINKKSGEIVPMEVNFNFDDPNLIILPLAFGKRQGREFIWNDLLSLETGSLKLANGRVIEKTLYNRRTRQDEPALFVALTFERREVLDSSNIKPMNLIGVDRGENIPAVIALTDPEGCPLSRFKDSLGNPTHILRIGESYKEKQRTIQAKKEVEQRRAGGYSRKYASKAKNLADDMVRNTARDLLYYAVTQDAMLIFENLSRGFGRQGKRTFMAERQYTRMEDWLTAKLAYEGPLPSKTYLSKTLAQYTSKTCSNCGFTITSADYDRVLEKLKKTATGWMTTINGKELKVEGQITYYNRYKRQNVVKDLSVELDRLSEESVNNDISSWTKGRSGEALSLLKKRFSHRPVQEKFVCLNCGFETHADEQAALNIARSWLFLRSQEYKKYQTNKTTGNTDKRAFVETWQSFYRKKLKEVWKPAV

SEQ ID NO: 36599 - protein, 980 aa, synthetic construct
  REGION 1..980: note = engineered CasX variant
QEIKRINKIRRRLVKDSNTKKAGKTGPMKTLLVRVMTPDLRERLENLRKKPENIPQPISNTSRANLNKLLTDYTEMKKAILHVYWEEFQKDPVGLMSRVAQPASKKIDQNKLKPEMDEKGNLTTAGFACSQCGQPLFVYKLEQVSEKGKAYTNYFGRCNVAEHEKLIKLAQLKPEKDSDEAVTYSLGKFGQRALDFYSIHVTKESTHPVKPLAQIAGNRYASGPVGKALSDACMGTIASFLSKYQDIIIEHQKVVKGNQKRLESLRELAGKENLEYPSVTLPPQPHTKEGVDAYNEVIARVRMWVNLNLWQKLKLSRDDAKPLLRLKGFPSFPLVERQQANEVDWWDMVCNVKKLINEKKEDGKVFWQNLAGYKRQEALRPYLSSEEDRKKGKKFARYQLGDLLLHLEKKHGEDWGKVYDEAWERIDKKVEGLSKHIKLEEERRSEDAQSKAALTDWLRAKASFVIEGLKEADKDEFCRCELKLQKWYGDLRGKPFAIEAENSILDISGFSKQYNCAFIWQKDGVKKLNLYLIINYFKGGKLRFKKIKPEAFEANRFYTVINKKSGEIVPMEVNFNFDDPNLIILPLAFGKRQGREFIWNDLLSLETGSLKLANGRVIEKTLYNRRTRQDEPALFVALTFERREVLDSSNIKPMNLIGVDRGENIPAVIALTDPEGCPLSRFKDSLGNPTHILRIGESYKEKQRTIQAKKEVEQRRAGGYSRKYASKAKNLADDMVRNTARDLLYYAVTQDAMLIFENLSRGFGRQGKRTFMAERQYTRMEDWLTAKLAYEGPLPSKTYLSKTLAQYTSKTCSNCGFTITSADYDRVLEKLKKTATGWMTTINGKELKVEGQITYYNRYKRQNVVKDLSVELDRLSEESVNNDISSWTKGRSGEALSLLKKRFSHRPVQEKFVCLNCGFETHADEQAALNIARSWLFLRSQEYKKYQTNKTTGNTDKRAFVETWQSFYRKKLKEVWKPAV

SEQ ID NO: 36600 - protein, 979 aa, synthetic construct
  REGION 1..979: note = engineered CasX variant
QEIKRINKIRRRLVKDSNTKKAGKTGPMKTLLVRVMTPDLRERLENLRKKPENIPQPISNTSRANLNKLLTDYTEMKKAILHVYWEEFQKDPVGLMSRVAQPASKKIDQNKLKPEMDEKGNLTTAGFACSQCGQPLFVYKLEQVSEKGKAYTNYFGRCNVAEHEKLILLAQLKPEKDSDEAVTYSLGKFGQRALDFYSIHVTKESTHPVKPLAQIAGNRYASPVGKALSDACMGTIASFLSKYQDIIIEHQKVVKGNQKRLESLRELAGKENLEYPSVTLPPQPHTKEGVDAYNEVIARVRMWVNLNLWQKLKLSRDDAKPLLRLKGFPSFPLVERQQANEVDWWDMVCNVKKLINEKKEDGKVFWQNLAGYKRQEALRPYLSSEEDRKKGKKFARYQLGDLLLHLEKKHGEDWGKVYDEAWERIDKKVEGLSKHIKLEEERRSEDAQSKAALTDWLRAKASFVIEGLKEADKDEFCRCELKLQKWYGDLRGKPFAIEAENSILDISGFSKQYNCAFIWQKDGVKKLNLYLIINYFKGGKLRFKKIKPEAFEANRFYTVINKKSGEIVPMEVNFNFDDPNLIILPLAFGKRQGREFIWNDLLSLETGSLKLANGRVIEKTLYNRRTRQDEPALFVALTFERREVLDSSNIKPMNLIGVDRGENIPAVIALTDPEGCPLSRFKDSLGNPTHILRIGESYKEKQRTIQAKKEVEQRRAGGYSRKYASKAKNLADDMVRNTARDLLYYAVTQDAMLIFENLSRGFGRQGKRTFMAERQYTRMEDWLTAKLAYEGPLPSKTYLSKTLAQYTSKTCSNCGFTITSADYDRVLEKLKKTATGWMTTINGKELKVEGQITYYNRYKRQNVVKDLSVELDRLSEESVNNDISSWTKGRSGEALSLLKKRFSHRPVQEKFVCLNCGFETHADEQAALNIARSWLFLRSQEYKKYQTNKTTGNTDKRAFVETWQSFYRKKLKEVWKPAV

SEQ ID NO: 36601 - protein, 980 aa, synthetic construct
  REGION 1..980: note = engineered CasX variant
QEIKRINKIRRRLVKDSNTKKAGKTGPMKTLLVRVMTPDLRERLENLRKKPENIPQPISNTSRANLNKLLTDYTEMKKAILHVYWEEFQKDPVGLMSRVAQPASKKIDQNKLKPEMDEKGNLTTAGFACSQCGQPLFVYKLEQVSEKGKAYTNYFGRCNVAEHEKLILLAQLKPEKDSDEAVTYSLGKFGQRALDFYSIHVTKESTHPVKPLAQIAGNRYASYPVGKALSDACMGTIASFLSKYQDIIIEHQKVVKGNQKRLESLRELAGKENLEYPSVTLPPQPHTKEGVDAYNEVIARVRMWVNLNLWQKLKLSRDDAKPLLRLKGFPSFPLVERQQANEVDWWDMVCNVKKLINEKKEDGKVFWQNLAGYKRQEALRPYLSSEEDVRKKGKKFARYQLGDLLLHLEKKHGEDWGKVYDEAWERIDKKVEGLSKHIKLEEERRSEDAQSKAALTDWLRAKASFVIEGLKEADKDEFCRCELKLQKWYGDLRGKPFAIEAENSILDISGFSKQYNCAFIWQKDGVKKLNLYLIINYFKGGKLRFKKIKPEAFEANRFYTVINKKSGEIVPMEVNFNFDDPNLIILPLAFGKRQGREFIWNDLLSLETGSLKLANGRVIEKTLYNRRTRQDEPALFVALTFERREVLDSSNIKPMNLIGVDRGENIPAVIALTDPEGCPLSRFKDSLGNPTHILRIGESYKEKQRTIQAKKEVEQRRAGGYSRKYASKAKNLADDMVRNTARDLLYYAVTQDAMLIFENLSRGFGRQGKRTFMAERQYTRMEDWLTAKLAYEGLPSKTYLSKTLAQYTSKTCSNCGFTITSADYDRVLEKLKKTATGWMTTINGKELKVEGQITYYNRYKRQNVVKDLSVELDRLSEESVNNDISSWTKGRSGEALSLLKKRFSHRPVQEKFVCLNCGFETHADEQAALNIARSWLFLRSQEYKKYQTNKTTGNTDKRAFVETWQSFYRKKLKEVWKPAV

SEQ ID NO: 36602 - protein, 980 aa, synthetic construct
  REGION 1..980: note = engineered CasX variant
QEIKRINKIRRRLVKDSNTKKAGKTGPMKTLLVRVMTPDLRERLENLRKKPENIPQPISNTSRANLNKLLTDYTEMKKAILHVYWEEFQKDPVGLMSRVAQPASKKIDQNKLKPEMDEKGNLTTAGFACSQCGQPLFVYKLEQVSEKGKAYTNYFGRCNVAEHEKLILLAQLKPEKDSDEAVTYSLGKFGQRALDFYSIHVTKESTHPVKPLAQIAGNRYASHPVGKALSDACMGTIASFLSKYQDIIIEHQKVVKGNQKRLESLRELAGKENLEYPSVTLPPQPHTKEGVDAYNEVIARVRMWVNLNLWQKLKLSRDDAKPLLRLKGFPSFPLVERQQANEVDWWDMVCNVKKLINEKKEDGKVFWQNLAGYKRQEALRPYLSSEEDVRKKGKKFARYQLGDLLLHLEKKHGEDWGKVYDEAWERIDKKVEGLSKHIKLEEERRSEDAQSKAALTDWLRAKASFVIEGLKEADKDEFCRCELKLQKWYGDLRGKPFAIEAENSILDISGFSKQYNCAFIWQKDGVKKLNLYLIINYFKGGKLRFKKIKPEAFEANRFYTVINKKSGEIVPMEVNFNFDDPNLIILPLAFGKRQGREFIWNDLLSLETGSLKLANGRVIEKTLYNRRTRQDEPALFVALTFERREVLDSSNIKPMNLIGVDRGENIPAVIALTDPEGCPLSRFKDSLGNPTHILRIGESYKEKQRTIQAKKEVEQRRAGGYSRKYASKAKNLADDMVRNTARDLLYYAVTQDAMLIFENLSRGFGRQGKRTFMAERQYTRMEDWLTAKLAYEGLPSKTYLSKTLAQYTSKTCSNCGFTITSADYDRVLEKLKKTATGWMTTINGKELKVEGQITYYNRYKRQNVVKDLSVELDRLSEESVNNDISSWTKGRSGEALSLLKKRFSHRPVQEKFVCLNCGFETHADEQAALNIARSWLFLRSQEYKKYQTNKTTGNTDKRAFVETWQSFYRKKLKEVWKPAV

SEQ ID NO: 36603 - protein, 980 aa, synthetic construct
  REGION 1..980: note = engineered CasX variant
QEIKRINKIRRRLVKDSNTKKAGKTGPMKTLLVRVMTPDLRERLENLRKKPENIPQPISNTSRANLNKLLTDYTEMKKAILHVYWEEFQKDPVGLMSRVAQPASKKIDQNKLKPEMDEKGNLTTAGFACSQCGQPLFVYKLEQVSEKGKAYTNYFGRCNVAEHEKLILLAQLKPEKDSDEAVTYSLGKFGQRALDFYSIHVTKESTHPVKPLAQIAGNRYASSPVGKALSDACMGTIASFLSKYQDIIIEHQKVVKGNQKRLESLRELAGKENLEYPSVTLPPQPHTKEGVDAYNEVIARVRMWVNLNLWQKLKLSRDDAKPLLRLKGFPSFPLVERQQANEVDWWDMVCNVKKLINEKKEDGKVFWQNLAGYKRQEALRPYLSSEEDVRKKGKKFARYQLGDLLLHLEKKHGEDWGKVYDEAWERIDKKVEGLSKHIKLEEERRSEDAQSKAALTDWLRAKASFVIEGLKEADKDEFCRCELKLQKWYGDLRGKPFAIEAENSILDISGFSKQYNCAFIWQKDGVKKLNLYLIINYFKGGKLRFKKIKPEAFEANRFYTVINKKSGEIVPMEVNFNFDDPNLIILPLAFGKRQGREFIWNDLLSLETGSLKLANGRVIEKTLYNRRTRQDEPALFVALTFERREVLDSSNIKPMNLIGVDRGENIPAVIALTDPEGCPLSRFKDSLGNPTHILRIGESYKEKQRTIQAKKEVEQRRAGGYSRKYASKAKNLADDMVRNTARDLLYYAVTQDAMLIFENLSRGFGRQGKRTFMAERQYTRMEDWLTAKLAYEGLPSKTYLSKTLAQYTSKTCSNCGFTITSADYDRVLEKLKKTATGWMTTINGKELKVEGQITYYNRYKRQNVVKDLSVELDRLSEESVNNDISSWTKGRSGEALSLLKKRFSHRPVQEKFVCLNCGFETHADEQAALNIARSWLFLRSQEYKKYQTNKTTGNTDKRAFVETWQSFYRKKLKEVWKPAV

SEQ ID NO: 36604 - protein, 980 aa, synthetic construct
  REGION 1..980: note = engineered CasX variant
QEIKRINKIRRRLVKDSNTKKAGKTGPMKTLLVRVMTPDLRERLENLRKKPENIPQPISNTSRANLNKLLTDYTEMKKAILHVYWEEFQKDPVGLMSRVAQPASKKIDQNKLKPEMDEKGNLTTAGFACSQCGQPLFVYKLEQVSEKGKAYTNYFGRCNVAEHEKLILLAQLKPEKDSDEAVTYSLGKFGQRALDFYSIHVTKESTHPVKPLAQIAGNRYASTPVGKALSDACMGTIASFLSKYQDIIIEHQKVVKGNQKRLESLRELAGKENLEYPSVTLPPQPHTKEGVDAYNEVIARVRMWVNLNLWQKLKLSRDDAKPLLRLKGFPSFPLVERQQANEVDWWDMVCNVKKLINEKKEDGKVFWQNLAGYKRQEALRPYLSSEEDVRKKGKKFARYQLGDLLLHLEKKHGEDWGKVYDEAWERIDKKVEGLSKHIKLEEERRSEDAQSKAALTDWLRAKASFVIEGLKEADKDEFCRCELKLQKWYGDLRGKPFAIEAENSILDISGFSKQYNCAFIWQKDGVKKLNLYLIINYFKGGKLRFKKIKPEAFEANRFYTVINKKSGEIVPMEVNFNFDDPNLIILPLAFGKRQGREFIWNDLLSLETGSLKLANGRVIEKTLYNRRTRQDEPALFVALTFERREVLDSSNIKPMNLIGVDRGENIPAVIALTDPEGCPLSRFKDSLGNPTHILRIGESYKEKQRTIQAKKEVEQRRAGGYSRKYASKAKNLADDMVRNTARDLLYYAVTQDAMLIFENLSRGFGRQGKRTFMAERQYTRMEDWLTAKLAYEGLPSKTYLSKTLAQYTSKTCSNCGFTITSADYDRVLEKLKKTATGWMTTINGKELKVEGQITYYNRYKRQNVVKDLSVELDRLSEESVNNDISSWTKGRSGEALSLLKKRFSHRPVQEKFVCLNCGFETHADEQAALNIARSWLFLRSQEYKKYQTNKTTGNTDKRAFVETWQSFYRKKLKEVWKPAV

SEQ ID NO: 36605 - protein, 980 aa, synthetic construct
  REGION 1..980: note = engineered CasX variant
QEIKRINKIRRRLVKDSNTKKAGKTGPMKTLLVRVMTPDLRERLENLRKKPENIPQPISNTSRANLNKLLTDYTEMKKAILHVYWEEFQKDPVGLMSRVAQPASKKIDQNKLKPEMDEKGNLTTAGFACSQCGQPLFVYKLEQVSEKGKAYTNYFGRCNVAEHEKLILLAQLKPEKDSDEAVTYSLGKFGQRALDFYSIHVTKESTHPVKPLAQIAGNRYASAPVGKALSDACMGTIASFLSKYQDIIIEHQKVVKGNQKRLESLRELAGKENLEYPSVTLPPQPHTKEGVDAYNEVIARVRMWVNLNLWQKLKLSRDDAKPLLRLKGFPSFPLVERQQANEVDWWDMVCNVKKLINEKKEDGKVFWQNLAGYKRQEALRPYLSSEEDVRKKGKKFARYQLGDLLLHLEKKHGEDWGKVYDEAWERIDKKVEGLSKHIKLEEERRSEDAQSKAALTDWLRAKASFVIEGLKEADKDEFCRCELKLQKWYGDLRGKPFAIEAENSILDISGFSKQYNCAFIWQKDGVKKLNLYLIINYFKGGKLRFKKIKPEAFEANRFYTVINKKSGEIVPMEVNFNFDDPNLIILPLAFGKRQGREFIWNDLLSLETGSLKLANGRVIEKTLYNRRTRQDEPALFVALTFERREVLDSSNIKPMNLIGVDRGENIPAVIALTDPEGCPLSRFKDSLGNPTHILRIGESYKEKQRTIQAKKEVEQRRAGGYSRKYASKAKNLADDMVRNTARDLLYYAVTQDAMLIFENLSRGFGRQGKRTFMAERQYTRMEDWLTAKLAYEGLPSKTYLSKTLAQYTSKTCSNCGFTITSADYDRVLEKLKKTATGWMTTINGKELKVEGQITYYNRYKRQNVVKDLSVELDRLSEESVNNDISSWTKGRSGEALSLLKKRFSHRPVQEKFVCLNCGFETHADEQAALNIARSWLFLRSQEYKKYQTNKTTGNTDKRAFVETWQSFYRKKLKEVWKPAV

SEQ ID NO: 36606 - protein, 980 aa, synthetic construct
  REGION 1..980: note = engineered CasX variant
QEIKRINKIRRRLVKDSNTKKAGKTGPMKTLLVRVMTPDLRERLENLRKKPENIPQPISNTSRANLNKLLTDYTEMKKAILHVYWEEFQKDPVGLMSRVAQPASKKIDQNKLKPEMDEKGNLTTAGFACSQCGQPLFVYKLEQVSEKGKAYTNYFGRCNVAEHEKLILLAQLKPEKDSDEAVTYSLGKFGQRALDFYSIHVTKESTHPVKPLAQIAGNRYASVPVGKALSDACMGTIASFLSKYQDIIIEHQKVVKGNQKRLESLRELAGKENLEYPSVTLPPQPHTKEGVDAYNEVIARVRMWVNLNLWQKLKLSRDDAKPLLRLKGFPSFPLVERQQANEVDWWDMVCNVKKLINEKKEDGKVFWQNLAGYKRQEALRPYLSSEEDVRKKGKKFARYQLGDLLLHLEKKHGEDWGKVYDEAWERIDKKVEGLSKHIKLEEERRSEDAQSKAALTDWLRAKASFVIEGLKEADKDEFCRCELKLQKWYGDLRGKPFAIEAENSILDISGFSKQYNCAFIWQKDGVKKLNLYLIINYFKGGKLRFKKIKPEAFEANRFYTVINKKSGEIVPMEVNFNFDDPNLIILPLAFGKRQGREFIWNDLLSLETGSLKLANGRVIEKTLYNRRTRQDEPALFVALTFERREVLDSSNIKPMNLIGVDRGENIPAVIALTDPEGCPLSRFKDSLGNPTHILRIGESYKEKQRTIQAKKEVEQRRAGGYSRKYASKAKNLADDMVRNTARDLLYYAVTQDAMLIFENLSRGFGRQGKRTFMAERQYTRMEDWLTAKLAYEGLPSKTYLSKTLAQYTSKTCSNCGFTITSADYDRVLEKLKKTATGWMTTINGKELKVEGQITYYNRYKRQNVVKDLSVELDRLSEESVNNDISSWTKGRSGEALSLLKKRFSHRPVQEKFVCLNCGFETHADEQAALNIARSWLFLRSQEYKKYQTNKTTGNTDKRAFVETWQSFYRKKLKEVWKPAV

SEQ ID NO: 36607 - protein, 980 aa, synthetic construct
  REGION 1..980: note = engineered CasX variant
QEIKRINKIRRRLVKDSNTKKAGKTGPMKTLLVRVMTPDLRERLENLRKKPENIPQPISNTSRANLNKLLTDYTEMKKAILHVYWEEFQKDPVGLMSRVAQPASKKIDQNKLKPEMDEKGNLTTAGFACSQCGQPLFVYKLEQVSEKGKAYTNYFGRCNVAEHEKLIKLAQLKPEKDSDEAVTYSLGKFGQRALDFYSIHVTKESTHPVKPLAQIAGNRYASGPVGKALSDACMGTIASFLSKYQDIIIEHQKVVKGNQKRLESLRELAGKENLEYPSVTLPPQPHTKEGVDAYNEVIARVRMWVNLNLWQKLKLSRDDAKPLLRLKGFPSFPLVERQQANEVDWWDMVCNVKKLINEKKEDGKVFWQNLAGYKRQEALRPYLSSEEDVRKKGKKFARYQLGDLLLHLEKKHGEDWGKVYDEAWERIDKKVEGLSKHIKLEEERRSEDAQSKAALTDWLRAKASFVIEGLKEADKDEFCRCELKLQKWYGDLRGKPFAIEAENSILDISGFSKQYNCAFIWQKDGVKKLNLYLIINYFKGGKLRFKKIKPEAFEANRFYTVINKKSGEIVPMEVNFNFDDPNLIILPLAFGKRQGREFIWNDLLSLETGSLKLANGRVIEKTLYNRRTRQDEPALFVALTFERREVLDSSNIKPMNLIGVDRGENIPAVIALTDPEGCPLSRFKDSLGNPTHILRIGESYKEKQRTIQAKKEVEQRRAGGYSRKYASKAKNLADDMVRNTARDLLYYAVTQDAMLIFENLSRGFGRQGKRTFMAERQYTRMEDWLTAKLAYEGLPSKTYLSKTLAQYTSKTCSNCGFTITSADYDRVLEKLKKTATGWMTTINGKELKVEGQITYYNRYKRQNVVKDLSVELDRLSEESVNNDISSWTKGRSGEALSLLKKRFSHRPVQEKFVCLNCGFETHADEQAALNIARSWLFLRSQEYKKYQTNKTTGNTDKRAFVETWQSFYRKKLKEVWKPAV

SEQ ID NO: 36608 - protein, 979 aa, synthetic construct
  REGION 1..979: note = engineered CasX variant
QEIKRINKIRRRLVKDSNTKKAGKTGPMKTLLVRVMTPDLRERLENLRKKPENIPQPISNTSRANLNKLLTDYTEMKKAILHVYWEEFQKDPVGLMSRVAQPASKKIDQNKLKPEMDEKGNLTTAGFACSQCGQPLFVYKLEQVSEKGKAYTNYFGRCNVAEHEKLILLAQLKPEKDSDEAVTYSLGKFGQRALDFYSIHVTKESTHPVKPLAQIAGNRYASPVGKALSDACMGTIASFLSKYQDIIIEHQKVVKGNQKRLESLRELAGKENLEYPSVTLPPQPHTKEGVDAYNEVIARVRMWVNLNLWQKLKLSRDDAKPLLRLKGFPSFPLVERQQANEVDWWDMVCNVKKLINEKKEDGKVFWQNLAGYKRQEALRPYLSSEEDVRKKGKKFARYQLGDLLLHLEKKHGEDWGKVYDEAWERIDKKVEGLSKHIKLEEERRSEDAQSKAALTDWLRAKASFVIEGLKEADKDEFCRCELKLQKWYGDLRGKPFAIEAENSILDISGFSKQYNCAFIWQKDGVKKLNLYLIINYFKGGKLRFKKIKPEAFEANRFYTVINKKSGEIVPMEVNFNFDDPNLIILPLAFGKRQGREFIWNDLLSLETGSLKLANGRVIEKTLYNRRTRQDEPALFVALTFERREVLDSSNIKPMNLIGVDRGENIPAVIALTDPEGCPLSRFKDSLGNPTHILRIGESYKEKQRTIQAKKEVEQRRAGGYSRKYASKAKNLADDMVRNTARDLLYYAVTQDAMLIFENLSRGFGRQGKRTFMAERQYTRMEDWLTAKLAYEGLPSKTYLSKTLAQYTSKTCSNCGFTITSADYDRVLEKLKKTATGWMTTINGKELKVEGQITYYNRYKRQNVVKDLSVELDRLSEESVNNDISSWTKGRSGEALSLLKKRFSHRPVQEKFVCLNCGFETHADEQAALNIARSWLFLRSQEYKKYQTNKTTGNTDKRAFVETWQSFYRKKLKEVWKPAV

SEQ ID NO: 36609 - protein, 979 aa, synthetic construct
  REGION 1..979: note = engineered CasX variant
QEIKRINKIRRRLVKDSNTKKAGKTGPMKTLLVRVMTPDLRERLENLRKKPENIPQPISNTSRANLNKLLTDYTEMKKAILHVYWEEFQKDPVGLMSRVAQPASKKIDQNKLKPEMDEKGNLTTAGFACSQCGQPLFVYKLEQVSEKGKAYTNYFGRCNVAEHEKLILLAQLKPEKDSDEAVTYSLGKFGQRALDFYSIHVTKESTHPVKPLAQIAGNRYASYPVGKALSDACMGTIASFLSKYQDIIIEHQKVVKGNQKRLESLRELAGKENLEYPSVTLPPQPHTKEGVDAYNEVIARVRMWVNLNLWQKLKLSRDDAKPLLRLKGFPSFPLVERQQANEVDWWDMVCNVKKLINEKKEDGKVFWQNLAGYKRQEALRPYLSSEEDRKKGKKFARYQLGDLLLHLEKKHGEDWGKVYDEAWERIDKKVEGLSKHIKLEEERRSEDAQSKAALTDWLRAKASFVIEGLKEADKDEFCRCELKLQKWYGDLRGKPFAIEAENSILDISGFSKQYNCAFIWQKDGVKKLNLYLIINYFKGGKLRFKKIKPEAFEANRFYTVINKKSGEIVPMEVNFNFDDPNLIILPLAFGKRQGREFIWNDLLSLETGSLKLANGRVIEKTLYNRRTRQDEPALFVALTFERREVLDSSNIKPMNLIGVDRGENIPAVIALTDPEGCPLSRFKDSLGNPTHILRIGESYKEKQRTIQAKKEVEQRRAGGYSRKYASKAKNLADDMVRNTARDLLYYAVTQDAMLIFENLSRGFGRQGKRTFMAERQYTRMEDWLTAKLAYEGLPSKTYLSKTLAQYTSKTCSNCGFTITSADYDRMLEKLKKTATGWMTTINGKELKVEGQITYYNRYKRQNVVKDLSVELDRLSEESVNNDISSWTKGRSGEALSLLKKRFSHRPVQEKFVCLNCGFETHADEQAALNIARSWLFLRSQEYKKYQTNKTTGNTDKRAFVETWQSFYRKKLKEVWKPAV

SEQ ID NO: 36610 - protein, 979 aa, synthetic construct
  REGION 1..979: note = engineered CasX variant
QEIKRINKIRRRLVKDSNTKKAGKTGPMKTLLVRVMTPDLRERLENLRKKPENIPQPISNTSRANLNKLLTDYTEMKKAILHVYWEEFQKDPVGLMSRVAQPASKKIDQNKLKPEMDEKGNLTTAGFACSQCGQPLFVYKLEQVSEKGKAYTNYFGRCNVAEHEKLILLAQLKPEKDSDEAVTYSLGKFGQRALDFYSIHVTKESTHPVKPLAQIAGNRYASHPVGKALSDACMGTIASFLSKYQDIIIEHQKVVKGNQKRLESLRELAGKENLEYPSVTLPPQPHTKEGVDAYNEVIARVRMWVNLNLWQKLKLSRDDAKPLLRLKGFPSFPLVERQQANEVDWWDMVCNVKKLINEKKEDGKVFWQNLAGYKRQEALRPYLSSEEDRKKGKKFARYQLGDLLLHLEKKHGEDWGKVYDEAWERIDKKVEGLSKHIKLEEERRSEDAQSKAALTDWLRAKASFVIEGLKEADKDEFCRCELKLQKWYGDLRGKPFAIEAENSILDISGFSKQYNCAFIWQKDGVKKLNLYLIINYFKGGKLRFKKIKPEAFEANRFYTVINKKSGEIVPMEVNFNFDDPNLIILPLAFGKRQGREFIWNDLLSLETGSLKLANGRVIEKTLYNRRTRQDEPALFVALTFERREVLDSSNIKPMNLIGVDRGENIPAVIALTDPEGCPLSRFKDSLGNPTHILRIGESYKEKQRTIQAKKEVEQRRAGGYSRKYASKAKNLADDMVRNTARDLLYYAVTQDAMLIFENLSRGFGRQGKRTFMAERQYTRMEDWLTAKLAYEGLPSKTYLSKTLAQYTSKTCSNCGFTITSADYDRMLEKLKKTATGWMTTINGKELKVEGQITYYNRYKRQNVVKDLSVELDRLSEESVNNDISSWTKGRSGEALSLLKKRFSHRPVQEKFVCLNCGFETHADEQAALNIARSWLFLRSQEYKKYQTNKTTGNTDKRAFVETWQSFYRKKLKEVWKPAV

SEQ ID NO: 36611 - protein, 979 aa, synthetic construct
  REGION 1..979: note = engineered CasX variant
QEIKRINKIRRRLVKDSNTKKAGKTGPMKTLLVRVMTPDLRERLENLRKKPENIPQPISNTSRANLNKLLTDYTEMKKAILHVYWEEFQKDPVGLMSRVAQPASKKIDQNKLKPEMDEKGNLTTAGFACSQCGQPLFVYKLEQVSEKGKAYTNYFGRCNVAEHEKLILLAQLKPEKDSDEAVTYSLGKFGQRALDFYSIHVTKESTHPVKPLAQIAGNRYASSPVGKALSDACMGTIASFLSKYQDIIIEHQKVVKGNQKRLESLRELAGKENLEYPSVTLPPQPHTKEGVDAYNEVIARVRMWVNLNLWQKLKLSRDDAKPLLRLKGFPSFPLVERQQANEVDWWDMVCNVKKLINEKKEDGKVFWQNLAGYKRQEALRPYLSSEEDRKKGKKFARYQLGDLLLHLEKKHGEDWGKVYDEAWERIDKKVEGLSKHIKLEEERRSEDAQSKAALTDWLRAKASFVIEGLKEADKDEFCRCELKLQKWYGDLRGKPFAIEAENSILDISGFSKQYNCAFIWQKDGVKKLNLYLIINYFKGGKLRFKKIKPEAFEANRFYTVINKKSGEIVPMEVNFNFDDPNLIILPLAFGKRQGREFIWNDLLSLETGSLKLANGRVIEKTLYNRRTRQDEPALFVALTFERREVLDSSNIKPMNLIGVDRGENIPAVIALTDPEGCPLSRFKDSLGNPTHILRIGESYKEKQRTIQAKKEVEQRRAGGYSRKYASKAKNLADDMVRNTARDLLYYAVTQDAMLIFENLSRGFGRQGKRTFMAERQYTRMEDWLTAKLAYEGLPSKTYLSKTLAQYTSKTCSNCGFTITSADYDRMLEKLKKTATGWMTTINGKELKVEGQITYYNRYKRQNVVKDLSVELDRLSEESVNNDISSWTKGRSGEALSLLKKRFSHRPVQEKFVCLNCGFETHADEQAALNIARSWLFLRSQEYKKYQTNKTTGNTDKRAFVETWQSFYRKKLKEVWKPAV

SEQ ID NO: 36612 - protein, 979 aa, synthetic construct
  REGION 1..979: note = engineered CasX variant
QEIKRINKIRRRLVKDSNTKKAGKTGPMKTLLVRVMTPDLRERLENLRKKPENIPQPISNTSRANLNKLLTDYTEMKKAILHVYWEEFQKDPVGLMSRVAQPASKKIDQNKLKPEMDEKGNLTTAGFACSQCGQPLFVYKLEQVSEKGKAYTNYFGRCNVAEHEKLILLAQLKPEKDSDEAVTYSLGKFGQRALDFYSIHVTKESTHPVKPLAQIAGNRYASTPVGKALSDACMGTIASFLSKYQDIIIEHQKVVKGNQKRLESLRELAGKENLEYPSVTLPPQPHTKEGVDAYNEVIARVRMWVNLNLWQKLKLSRDDAKPLLRLKGFPSFPLVERQQANEVDWWDMVCNVKKLINEKKEDGKVFWQNLAGYKRQEALRPYLSSEEDRKKGKKFARYQLGDLLLHLEKKHGEDWGKVYDEAWERIDKKVEGLSKHIKLEEERRSEDAQSKAALTDWLRAKASFVIEGLKEADKDEFCRCELKLQKWYGDLRGKPFAIEAENSILDISGFSKQYNCAFIWQKDGVKKLNLYLIINYFKGGKLRFKKIKPEAFEANRFYTVINKKSGEIVPMEVNFNFDDPNLIILPLAFGKRQGREFIWNDLLSLETGSLKLANGRVIEKTLYNRRTRQDEPALFVALTFERREVLDSSNIKPMNLIGVDRGENIPAVIALTDPEGCPLSRFKDSLGNPTHILRIGESYKEKQRTIQAKKEVEQRRAGGYSRKYASKAKNLADDMVRNTARDLLYYAVTQDAMLIFENLSRGFGRQGKRTFMAERQYTRMEDWLTAKLAYEGLPSKTYLSKTLAQYTSKTCSNCGFTITSADYDRMLEKLKKTATGWMTTINGKELKVEGQITYYNRYKRQNVVKDLSVELDRLSEESVNNDISSWTKGRSGEALSLLKKRFSHRPVQEKFVCLNCGFETHADEQAALNIARSWLFLRSQEYKKYQTNKTTGNTDKRAFVETWQSFYRKKLKEVWKPAV

SEQ ID NO: 36613 - protein, 979 aa, synthetic construct
  REGION 1..979: note = engineered CasX variant
QEIKRINKIRRRLVKDSNTKKAGKTGPMKTLLVRVMTPDLRERLENLRKKPENIPQPISNTSRANLNKLLTDYTEMKKAILHVYWEEFQKDPVGLMSRVAQPASKKIDQNKLKPEMDEKGNLTTAGFACSQCGQPLFVYKLEQVSEKGKAYTNYFGRCNVAEHEKLILLAQLKPEKDSDEAVTYSLGKFGQRALDFYSIHVTKESTHPVKPLAQIAGNRYASAPVGKALSDACMGTIASFLSKYQDIIIEHQKVVKGNQKRLESLRELAGKENLEYPSVTLPPQPHTKEGVDAYNEVIARVRMWVNLNLWQKLKLSRDDAKPLLRLKGFPSFPLVERQQANEVDWWDMVCNVKKLINEKKEDGKVFWQNLAGYKRQEALRPYLSSEEDRKKGKKFARYQLGDLLLHLEKKHGEDWGKVYDEAWERIDKKVEGLSKHIKLEEERRSEDAQSKAALTDWLRAKASFVIEGLKEADKDEFCRCELKLQKWYGDLRGKPFAIEAENSILDISGFSKQYNCAFIWQKDGVKKLNLYLIINYFKGGKLRFKKIKPEAFEANRFYTVINKKSGEIVPMEVNFNFDDPNLIILPLAFGKRQGREFIWNDLLSLETGSLKLANGRVIEKTLYNRRTRQDEPALFVALTFERREVLDSSNIKPMNLIGVDRGENIPAVIALTDPEGCPLSRFKDSLGNPTHILRIGESYKEKQRTIQAKKEVEQRRAGGYSRKYASKAKNLADDMVRNTARDLLYYAVTQDAMLIFENLSRGFGRQGKRTFMAERQYTRMEDWLTAKLAYEGLPSKTYLSKTLAQYTSKTCSNCGFTITSADYDRMLEKLKKTATGWMTTINGKELKVEGQITYYNRYKRQNVVKDLSVELDRLSEESVNNDISSWTKGRSGEALSLLKKRFSHRPVQEKFVCLNCGFETHADEQAALNIARSWLFLRSQEYKKYQTNKTTGNTDKRAFVETWQSFYRKKLKEVWKPAV

SEQ ID NO: 36614 - protein, 979 aa, synthetic construct
  REGION 1..979: note = engineered CasX variant
QEIKRINKIRRRLVKDSNTKKAGKTGPMKTLLVRVMTPDLRERLENLRKKPENIPQPISNTSRANLNKLLTDYTEMKKAILHVYWEEFQKDPVGLMSRVAQPASKKIDQNKLKPEMDEKGNLTTAGFACSQCGQPLFVYKLEQVSEKGKAYTNYFGRCNVAEHEKLILLAQLKPEKDSDEAVTYSLGKFGQRALDFYSIHVTKESTHPVKPLAQIAGNRYASVPVGKALSDACMGTIASFLSKYQDIIIEHQKVVKGNQKRLESLRELAGKENLEYPSVTLPPQPHTKEGVDAYNEVIARVRMWVNLNLWQKLKLSRDDAKPLLRLKGFPSFPLVERQQANEVDWWDMVCNVKKLINEKKEDGKVFWQNLAGYKRQEALRPYLSSEEDRKKGKKFARYQLGDLLLHLEKKHGEDWGKVYDEAWERIDKKVEGLSKHIKLEEERRSEDAQSKAALTDWLRAKASFVIEGLKEADKDEFCRCELKLQKWYGDLRGKPFAIEAENSILDISGFSKQYNCAFIWQKDGVKKLNLYLIINYFKGGKLRFKKIKPEAFEANRFYTVINKKSGEIVPMEVNFNFDDPNLIILPLAFGKRQGREFIWNDLLSLETGSLKLANGRVIEKTLYNRRTRQDEPALFVALTFERREVLDSSNIKPMNLIGVDRGENIPAVIALTDPEGCPLSRFKDSLGNPTHILRIGESYKEKQRTIQAKKEVEQRRAGGYSRKYASKAKNLADDMVRNTARDLLYYAVTQDAMLIFENLSRGFGRQGKRTFMAERQYTRMEDWLTAKLAYEGLPSKTYLSKTLAQYTSKTCSNCGFTITSADYDRMLEKLKKTATGWMTTINGKELKVEGQITYYNRYKRQNVVKDLSVELDRLSEESVNNDISSWTKGRSGEALSLLKKRFSHRPVQEKFVCLNCGFETHADEQAALNIARSWLFLRSQEYKKYQTNKTTGNTDKRAFVETWQSFYRKKLKEVWKPAV

SEQ ID NO: 36615 - protein, 979 aa, synthetic construct
  REGION 1..979: note = engineered CasX variant
QEIKRINKIRRRLVKDSNTKKAGKTGPMKTLLVRVMTPDLRERLENLRKKPENIPQPISNTSRANLNKLLTDYTEMKKAILHVYWEEFQKDPVGLMSRVAQPASKKIDQNKLKPEMDEKGNLTTAGFACSQCGQPLFVYKLEQVSEKGKAYTNYFGRCNVAEHEKLIKLAQLKPEKDSDEAVTYSLGKFGQRALDFYSIHVTKESTHPVKPLAQIAGNRYASGPVGKALSDACMGTIASFLSKYQDIIIEHQKVVKGNQKRLESLRELAGKENLEYPSVTLPPQPHTKEGVDAYNEVIARVRMWVNLNLWQKLKLSRDDAKPLLRLKGFPSFPLVERQQANEVDWWDMVCNVKKLINEKKEDGKVFWQNLAGYKRQEALRPYLSSEEDRKKGKKFARYQLGDLLLHLEKKHGEDWGKVYDEAWERIDKKVEGLSKHIKLEEERRSEDAQSKAALTDWLRAKASFVIEGLKEADKDEFCRCELKLQKWYGDLRGKPFAIEAENSILDISGFSKQYNCAFIWQKDGVKKLNLYLIINYFKGGKLRFKKIKPEAFEANRFYTVINKKSGEIVPMEVNFNFDDPNLIILPLAFGKRQGREFIWNDLLSLETGSLKLANGRVIEKTLYNRRTRQDEPALFVALTFERREVLDSSNIKPMNLIGVDRGENIPAVIALTDPEGCPLSRFKDSLGNPTHILRIGESYKEKQRTIQAKKEVEQRRAGGYSRKYASKAKNLADDMVRNTARDLLYYAVTQDAMLIFENLSRGFGRQGKRTFMAERQYTRMEDWLTAKLAYEGLPSKTYLSKTLAQYTSKTCSNCGFTITSADYDRMLEKLKKTATGWMTTINGKELKVEGQITYYNRYKRQNVVKDLSVELDRLSEESVNNDISSWTKGRSGEALSLLKKRFSHRPVQEKFVCLNCGFETHADEQAALNIARSWLFLRSQEYKKYQTNKTTGNTDKRAFVETWQSFYRKKLKEVWKPAV

SEQ ID NO: 36616 - protein, 978 aa, synthetic construct
  REGION 1..978: note = engineered CasX variant
QEIKRINKIRRRLVKDSNTKKAGKTGPMKTLLVRVMTPDLRERLENLRKKPENIPQPISNTSRANLNKLLTDYTEMKKAILHVYWEEFQKDPVGLMSRVAQPASKKIDQNKLKPEMDEKGNLTTAGFACSQCGQPLFVYKLEQVSEKGKAYTNYFGRCNVAEHEKLILLAQLKPEKDSDEAVTYSLGKFGQRALDFYSIHVTKESTHPVKPLAQIAGNRYASPVGKALSDACMGTIASFLSKYQDIIIEHQKVVKGNQKRLESLRELAGKENLEYPSVTLPPQPHTKEGVDAYNEVIARVRMWVNLNLWQKLKLSRDDAKPLLRLKGFPSFPLVERQQANEVDWWDMVCNVKKLINEKKEDGKVFWQNLAGYKRQEALRPYLSSEEDRKKGKKFARYQLGDLLLHLEKKHGEDWGKVYDEAWERIDKKVEGLSKHIKLEEERRSEDAQSKAALTDWLRAKASFVIEGLKEADKDEFCRCELKLQKWYGDLRGKPFAIEAENSILDISGFSKQYNCAFIWQKDGVKKLNLYLIINYFKGGKLRFKKIKPEAFEANRFYTVINKKSGEIVPMEVNFNFDDPNLIILPLAFGKRQGREFIWNDLLSLETGSLKLANGRVIEKTLYNRRTRQDEPALFVALTFERREVLDSSNIKPMNLIGVDRGENIPAVIALTDPEGCPLSRFKDSLGNPTHILRIGESYKEKQRTIQAKKEVEQRRAGGYSRKYASKAKNLADDMVRNTARDLLYYAVTQDAMLIFENLSRGFGRQGKRTFMAERQYTRMEDWLTAKLAYEGLPSKTYLSKTLAQYTSKTCSNCGFTITSADYDRMLEKLKKTATGWMTTINGKELKVEGQITYYNRYKRQNVVKDLSVELDRLSEESVNNDISSWTKGRSGEALSLLKKRFSHRPVQEKFVCLNCGFETHADEQAALNIARSWLFLRSQEYKKYQTNKTTGNTDKRAFVETWQSFYRKKLKEVWKPAV

SEQ ID NO: 36617 - protein, 979 aa, synthetic construct
  REGION 1..979: note = engineered CasX variant
QEIKRINKIRRRLVKDSNTKKAGKTGPMKTLLVRVMTPDLRERLENLRKKPENIPQPISNTSRANLNKLLTDYTEMKKAILHVYWEEFQKDPVGLMSRVAQPASKKIDQNKLKPEMDEKGNLTTAGFACSQCGQPLFVYKLEQVSEKGKAYTNYFGRCNVAEHEKLILLAQLKPEKDSDEAVTYSLGKFGQRALDFYSIHVTKESTHPVKPLAQIAGNRYASYPVGKALSDACMGTIASFLSKYQDIIIEHQKVVKGNQKRLESLRELAGKENLEYPSVTLPPQPHTKEGVDAYNEVIARVRMWVNLNLWQKLKLSRDDAKPLLRLKGFPSFPLVERQQANEVDWWDMVCNVKKLINEKKEDGKVFWQNLAGYKRQEALRPYLSSEEDRKKGKKFARYQLGDLLLHLEKKHGEDWGKVYDEAWERIDKKVEGLSKHIKLEEERRSEDAQSKAALTDWLRAKASFVIEGLKEADKDEFCRCELKLQKWYGDLRGKPFAIEAENSILDISGFSKQYNCAFIWQKDGVKKLNLYLIINYFKGGKLRFKKIKPEAFEANRFYTVINKKSGEIVPMEVNFNFDDPNLIILPLAFGKRQGREFIWNDLLSLETGSLKLANGRVIEKTLYNRRTRQDEPALFVALTFERREVLDSSNIKPMNLIGVDRGENIPAVIALTDPEGCPLSRFKDSLGNPTHILRIGESYKEKQRTIQAKKEVEQRRAGGYSRKYASKAKNLADDMVRNTARDLLYYAVTQDAMLIFENLSRGFGRQGKRTFMAERQYTRMEDWLTAKLAYEGLPSKTYLSKTLAQYTSKTCSNCGFTITSADYDRVLEKLKKTATGWMTTINGKELKVEGQITYYNRYKRQNVVKDLSVELDRLSEESVNNDISSWTKGRQGEALSLLKKRFSHRPVQEKFVCLNCGFETHADEQAALNIARSWLFLRSQEYKKYQTNKTTGNTDKRAFVETWQSFYRKKLKEVWKPAV

SEQ ID NO: 36618 - protein, 979 aa, synthetic construct
  REGION 1..979: note = engineered CasX variant
QEIKRINKIRRRLVKDSNTKKAGKTGPMKTLLVRVMTPDLRERLENLRKKPENIPQPISNTSRANLNKLLTDYTEMKKAILHVYWEEFQKDPVGLMSRVAQPASKKIDQNKLKPEMDEKGNLTTAGFACSQCGQPLFVYKLEQVSEKGKAYTNYFGRCNVAEHEKLILLAQLKPEKDSDEAVTYSLGKFGQRALDFYSIHVTKESTHPVKPLAQIAGNRYASHPVGKALSDACMGTIASFLSKYQDIIIEHQKVVKGNQKRLESLRELAGKENLEYPSVTLPPQPHTKEGVDAYNEVIARVRMWVNLNLWQKLKLSRDDAKPLLRLKGFPSFPLVERQQANEVDWWDMVCNVKKLINEKKEDGKVFWQNLAGYKRQEALRPYLSSEEDRKKGKKFARYQLGDLLLHLEKKHGEDWGKVYDEAWERIDKKVEGLSKHIKLEEERRSEDAQSKAALTDWLRAKASFVIEGLKEADKDEFCRCELKLQKWYGDLRGKPFAIEAENSILDISGFSKQYNCAFIWQKDGVKKLNLYLIINYFKGGKLRFKKIKPEAFEANRFYTVINKKSGEIVPMEVNFNFDDPNLIILPLAFGKRQGREFIWNDLLSLETGSLKLANGRVIEKTLYNRRTRQDEPALFVALTFERREVLDSSNIKPMNLIGVDRGENIPAVIALTDPEGCPLSRFKDSLGNPTHILRIGESYKEKQRTIQAKKEVEQRRAGGYSRKYASKAKNLADDMVRNTARDLLYYAVTQDAMLIFENLSRGFGRQGKRTFMAERQYTRMEDWLTAKLAYEGLPSKTYLSKTLAQYTSKTCSNCGFTITSADYDRVLEKLKKTATGWMTTINGKELKVEGQITYYNRYKRQNVVKDLSVELDRLSEESVNNDISSWTKGRQGEALSLLKKRFSHRPVQEKFVCLNCGFETHADEQAALNIARSWLFLRSQEYKKYQTNKTTGNTDKRAFVETWQSFYRKKLKEVWKPAV

SEQ ID NO: 36619 - protein, 979 aa, synthetic construct
  REGION 1..979: note = engineered CasX variant
QEIKRINKIRRRLVKDSNTKKAGKTGPMKTLLVRVMTPDLRERLENLRKKPENIPQPISNTSRANLNKLLTDYTEMKKAILHVYWEEFQKDPVGLMSRVAQPASKKIDQNKLKPEMDEKGNLTTAGFACSQCGQPLFVYKLEQVSEKGKAYTNYFGRCNVAEHEKLILLAQLKPEKDSDEAVTYSLGKFGQRALDFYSIHVTKESTHPVKPLAQIAGNRYASSPVGKALSDACMGTIASFLSKYQDIIIEHQKVVKGNQKRLESLRELAGKENLEYPSVTLPPQPHTKEGVDAYNEVIARVRMWVNLNLWQKLKLSRDDAKPLLRLKGFPSFPLVERQQANEVDWWDMVCNVKKLINEKKEDGKVFWQNLAGYKRQEALRPYLSSEEDRKKGKKFARYQLGDLLLHLEKKHGEDWGKVYDEAWERIDKKVEGLSKHIKLEEERRSEDAQSKAALTDWLRAKASFVIEGLKEADKDEFCRCELKLQKWYGDLRGKPFAIEAENSILDISGFSKQYNCAFIWQKDGVKKLNLYLIINYFKGGKLRFKKIKPEAFEANRFYTVINKKSGEIVPMEVNFNFDDPNLIILPLAFGKRQGREFIWNDLLSLETGSLKLANGRVIEKTLYNRRTRQDEPALFVALTFERREVLDSSNIKPMNLIGVDRGENIPAVIALTDPEGCPLSRFKDSLGNPTHILRIGESYKEKQRTIQAKKEVEQRRAGGYSRKYASKAKNLADDMVRNTARDLLYYAVTQDAMLIFENLSRGFGRQGKRTFMAERQYTRMEDWLTAKLAYEGLPSKTYLSKTLAQYTSKTCSNCGFTITSADYDRVLEKLKKTATGWMTTINGKELKVEGQITYYNRYKRQNVVKDLSVELDRLSEESVNNDISSWTKGRQGEALSLLKKRFSHRPVQEKFVCLNCGFETHADEQAALNIARSWLFLRSQEYKKYQTNKTTGNTDKRAFVETWQSFYRKKLKEVWKPAV

SEQ ID NO: 36620 - protein, 979 aa, synthetic construct
  REGION 1..979: note = engineered CasX variant
QEIKRINKIRRRLVKDSNTKKAGKTGPMKTLLVRVMTPDLRERLENLRKKPENIPQPISNTSRANLNKLLTDYTEMKKAILHVYWEEFQKDPVGLMSRVAQPASKKIDQNKLKPEMDEKGNLTTAGFACSQCGQPLFVYKLEQVSEKGKAYTNYFGRCNVAEHEKLILLAQLKPEKDSDEAVTYSLGKFGQRALDFYSIHVTKESTHPVKPLAQIAGNRYASTPVGKALSDACMGTIASFLSKYQDIIIEHQKVVKGNQKRLESLRELAGKENLEYPSVTLPPQPHTKEGVDAYNEVIARVRMWVNLNLWQKLKLSRDDAKPLLRLKGFPSFPLVERQQANEVDWWDMVCNVKKLINEKKEDGKVFWQNLAGYKRQEALRPYLSSEEDRKKGKKFARYQLGDLLLHLEKKHGEDWGKVYDEAWERIDKKVEGLSKHIKLEEERRSEDAQSKAALTDWLRAKASFVIEGLKEADKDEFCRCELKLQKWYGDLRGKPFAIEAENSILDISGFSKQYNCAFIWQKDGVKKLNLYLIINYFKGGKLRFKKIKPEAFEANRFYTVINKKSGEIVPMEVNFNFDDPNLIILPLAFGKRQGREFIWNDLLSLETGSLKLANGRVIEKTLYNRRTRQDEPALFVALTFERREVLDSSNIKPMNLIGVDRGENIPAVIALTDPEGCPLSRFKDSLGNPTHILRIGESYKEKQRTIQAKKEVEQRRAGGYSRKYASKAKNLADDMVRNTARDLLYYAVTQDAMLIFENLSRGFGRQGKRTFMAERQYTRMEDWLTAKLAYEGLPSKTYLSKTLAQYTSKTCSNCGFTITSADYDRVLEKLKKTATGWMTTINGKELKVEGQITYYNRYKRQNVVKDLSVELDRLSEESVNNDISSWTKGRQGEALSLLKKRFSHRPVQEKFVCLNCGFETHADEQAALNIARSWLFLRSQEYKKYQTNKTTGNTDKRAFVETWQSFYRKKLKEVWKPAV

SEQ ID NO: 36621 - protein, 979 aa, synthetic construct
  REGION 1..979: note = engineered CasX variant
QEIKRINKIRRRLVKDSNTKKAGKTGPMKTLLVRVMTPDLRERLENLRKKPENIPQPISNTSRANLNKLLTDYTEMKKAILHVYWEEFQKDPVGLMSRVAQPASKKIDQNKLKPEMDEKGNLTTAGFACSQCGQPLFVYKLEQVSEKGKAYTNYFGRCNVAEHEKLILLAQLKPEKDSDEAVTYSLGKFGQRALDFYSIHVTKESTHPVKPLAQIAGNRYASAPVGKALSDACMGTIASFLSKYQDIIIEHQKVVKGNQKRLESLRELAGKENLEYPSVTLPPQPHTKEGVDAYNEVIARVRMWVNLNLWQKLKLSRDDAKPLLRLKGFPSFPLVERQQANEVDWWDMVCNVKKLINEKKEDGKVFWQNLAGYKRQEALRPYLSSEEDRKKGKKFARYQLGDLLLHLEKKHGEDWGKVYDEAWERIDKKVEGLSKHIKLEEERRSEDAQSKAALTDWLRAKASFVIEGLKEADKDEFCRCELKLQKWYGDLRGKPFAIEAENSILDISGFSKQYNCAFIWQKDGVKKLNLYLIINYFKGGKLRFKKIKPEAFEANRFYTVINKKSGEIVPMEVNFNFDDPNLIILPLAFGKRQGREFIWNDLLSLETGSLKLANGRVIEKTLYNRRTRQDEPALFVALTFERREVLDSSNIKPMNLIGVDRGENIPAVIALTDPEGCPLSRFKDSLGNPTHILRIGESYKEKQRTIQAKKEVEQRRAGGYSRKYASKAKNLADDMVRNTARDLLYYAVTQDAMLIFENLSRGFGRQGKRTFMAERQYTRMEDWLTAKLAYEGLPSKTYLSKTLAQYTSKTCSNCGFTITSADYDRVLEKLKKTATGWMTTINGKELKVEGQITYYNRYKRQNVVKDLSVELDRLSEESVNNDISSWTKGRQGEALSLLKKRFSHRPVQEKFVCLNCGFETHADEQAALNIARSWLFLRSQEYKKYQTNKTTGNTDKRAFVETWQSFYRKKLKEVWKPAV

SEQ ID NO: 36622 - protein, 979 aa, synthetic construct
  REGION 1..979: note = engineered CasX variant
QEIKRINKIRRRLVKDSNTKKAGKTGPMKTLLVRVMTPDLRERLENLRKKPENIPQPISNTSRANLNKLLTDYTEMKKAILHVYWEEFQKDPVGLMSRVAQPASKKIDQNKLKPEMDEKGNLTTAGFACSQCGQPLFVYKLEQVSEKGKAYTNYFGRCNVAEHEKLILLAQLKPEKDSDEAVTYSLGKFGQRALDFYSIHVTKESTHPVKPLAQIAGNRYASVPVGKALSDACMGTIASFLSKYQDIIIEHQKVVKGNQKRLESLRELAGKENLEYPSVTLPPQPHTKEGVDAYNEVIARVRMWVNLNLWQKLKLSRDDAKPLLRLKGFPSFPLVERQQANEVDWWDMVCNVKKLINEKKEDGKVFWQNLAGYKRQEALRPYLSSEEDRKKGKKFARYQLGDLLLHLEKKHGEDWGKVYDEAWERIDKKVEGLSKHIKLEEERRSEDAQSKAALTDWLRAKASFVIEGLKEADKDEFCRCELKLQKWYGDLRGKPFAIEAENSILDISGFSKQYNCAFIWQKDGVKKLNLYLIINYFKGGKLRFKKIKPEAFEANRFYTVINKKSGEIVPMEVNFNFDDPNLIILPLAFGKRQGREFIWNDLLSLETGSLKLANGRVIEKTLYNRRTRQDEPALFVALTFERREVLDSSNIKPMNLIGVDRGENIPAVIALTDPEGCPLSRFKDSLGNPTHILRIGESYKEKQRTIQAKKEVEQRRAGGYSRKYASKAKNLADDMVRNTARDLLYYAVTQDAMLIFENLSRGFGRQGKRTFMAERQYTRMEDWLTAKLAYEGLPSKTYLSKTLAQYTSKTCSNCGFTITSADYDRVLEKLKKTATGWMTTINGKELKVEGQITYYNRYKRQNVVKDLSVELDRLSEESVNNDISSWTKGRQGEALSLLKKRFSHRPVQEKFVCLNCGFETHADEQAALNIARSWLFLRSQEYKKYQTNKTTGNTDKRAFVETWQSFYRKKLKEVWKPAV

SEQ ID NO: 36623 - protein, 979 aa, synthetic construct
  REGION 1..979: note = engineered CasX variant
QEIKRINKIRRRLVKDSNTKKAGKTGPMKTLLVRVMTPDLRERLENLRKKPENIPQPISNTSRANLNKLLTDYTEMKKAILHVYWEEFQKDPVGLMSRVAQPASKKIDQNKLKPEMDEKGNLTTAGFACSQCGQPLFVYKLEQVSEKGKAYTNYFGRCNVAEHEKLIKLAQLKPEKDSDEAVTYSLGKFGQRALDFYSIHVTKESTHPVKPLAQIAGNRYASGPVGKALSDACMGTIASFLSKYQDIIIEHQKVVKGNQKRLESLRELAGKENLEYPSVTLPPQPHTKEGVDAYNEVIARVRMWVNLNLWQKLKLSRDDAKPLLRLKGFPSFPLVERQQANEVDWWDMVCNVKKLINEKKEDGKVFWQNLAGYKRQEALRPYLSSEEDRKKGKKFARYQLGDLLLHLEKKHGEDWGKVYDEAWERIDKKVEGLSKHIKLEEERRSEDAQSKAALTDWLRAKASFVIEGLKEADKDEFCRCELKLQKWYGDLRGKPFAIEAENSILDISGFSKQYNCAFIWQKDGVKKLNLYLIINYFKGGKLRFKKIKPEAFEANRFYTVINKKSGEIVPMEVNFNFDDPNLIILPLAFGKRQGREFIWNDLLSLETGSLKLANGRVIEKTLYNRRTRQDEPALFVALTFERREVLDSSNIKPMNLIGVDRGENIPAVIALTDPEGCPLSRFKDSLGNPTHILRIGESYKEKQRTIQAKKEVEQRRAGGYSRKYASKAKNLADDMVRNTARDLLYYAVTQDAMLIFENLSRGFGRQGKRTFMAERQYTRMEDWLTAKLAYEGLPSKTYLSKTLAQYTSKTCSNCGFTITSADYDRVLEKLKKTATGWMTTINGKELKVEGQITYYNRYKRQNVVKDLSVELDRLSEESVNNDISSWTKGRQGEALSLLKKRFSHRPVQEKFVCLNCGFETHADEQAALNIARSWLFLRSQEYKKYQTNKTTGNTDKRAFVETWQSFYRKKLKEVWKPAV

SEQ ID NO: 36624 - protein, 978 aa, synthetic construct
  REGION 1..978: note = engineered CasX variant
QEIKRINKIRRRLVKDSNTKKAGKTGPMKTLLVRVMTPDLRERLENLRKKPENIPQPISNTSRANLNKLLTDYTEMKKAILHVYWEEFQKDPVGLMSRVAQPASKKIDQNKLKPEMDEKGNLTTAGFACSQCGQPLFVYKLEQVSEKGKAYTNYFGRCNVAEHEKLILLAQLKPEKDSDEAVTYSLGKFGQRALDFYSIHVTKESTHPVKPLAQIAGNRYASPVGKALSDACMGTIASFLSKYQDIIIEHQKVVKGNQKRLESLRELAGKENLEYPSVTLPPQPHTKEGVDAYNEVIARVRMWVNLNLWQKLKLSRDDAKPLLRLKGFPSFPLVERQQANEVDWWDMVCNVKKLINEKKEDGKVFWQNLAGYKRQEALRPYLSSEEDRKKGKKFARYQLGDLLLHLEKKHGEDWGKVYDEAWERIDKKVEGLSKHIKLEEERRSEDAQSKAALTDWLRAKASFVIEGLKEADKDEFCRCELKLQKWYGDLRGKPFAIEAENSILDISGFSKQYNCAFIWQKDGVKKLNLYLIINYFKGGKLRFKKIKPEAFEANRFYTVINKKSGEIVPMEVNFNFDDPNLIILPLAFGKRQGREFIWNDLLSLETGSLKLANGRVIEKTLYNRRTRQDEPALFVALTFERREVLDSSNIKPMNLIGVDRGENIPAVIALTDPEGCPLSRFKDSLGNPTHILRIGESYKEKQRTIQAKKEVEQRRAGGYSRKYASKAKNLADDMVRNTARDLLYYAVTQDAMLIFENLSRGFGRQGKRTFMAERQYTRMEDWLTAKLAYEGLPSKTYLSKTLAQYTSKTCSNCGFTITSADYDRVLEKLKKTATGWMTTINGKELKVEGQITYYNRYKRQNVVKDLSVELDRLSEESVNNDISSWTKGRQGEALSLLKKRFSHRPVQEKFVCLNCGFETHADEQAALNIARSWLFLRSQEYKKYQTNKTTGNTDKRAFVETWQSFYRKKLKEVWKPAV

SEQ ID NO: 36625 - protein, 979 aa, synthetic construct
  REGION 1..979: note = engineered CasX variant
QEIKRINKIRRRLVKDSNTKKAGKTGPMKTLLVRVMTPDLRERLENLRKKPENIPQPISNTSRANLNKLLTDYTEMKKAILHVYWEEFQKDPVGLMSRVAQPASKKIDQNKLKPEMDEKGNLTTAGFACSQCGQPLFVYKLEQVSEKGKAYTNYFGRCNVAEHEKLILLAQLKPEKDSDEAVTYSLGKFGQRALDFYSIHVTKESTHPVKPLAQIAGNRYASYPVGKALSDACMGTIASFLSKYQDIIIEHQKVVKGNQKRLESLRELAGKENLEYPSVTLPPQPHTKEGVDAYNEVIARVRMWVNLNLWQKLKLSRDDAKPLLRLKGFPSFPLVERQQANEVDWWDMVCNVKKLINEKKEDGKVFWQNLAGYKRQEALRPYLSSEEDRKKGKKFARYQLGDLLLHLEKKHGEDWGKVYDEAWERIDKKVEGLSKHIKLEEERRSEDAQSKAALTDWLRAKASFVIEGLKEADKDEFCRCELKLQKWYGDLRGKPFAIEAENSILDISGFSKQYNCAFIWQKDGVKKLNLYLIINYFKGGKLRFKKIKPEAFEANRFYTVINKKSGEIVPMEVNFNFDDPNLIILPLAFGKRQGREFIWNDLLSLETGSLKLANGRVIEKTLYNRRTRQDEPALFVALTFERREVLDSSNIKPMNLIGVDRGENIPAVIALTDPEGCPLSRFKDSLGNPTHILRIGESYKEKQRTIQAKKEVEQRRAGGYSRKYASKAKNLADDMVRNTARDLLYYAVTQDAMLIFENLSRGFGRQGKRTFMAERQYTRMEDWLTAKLAYEGLPSKTYLSKTLAQYTSKTCSNCGFTITSADYDRVLEKLKKTATGWMTTINGKELKVEGQITYYNRYKRQNVVKDLSVELDRLSEESVNNDISSWTKGRSGEALSLLKKRFSHRPVQEKFVCLNCEFETHADEQAALNIARSWLFLRSQEYKKYQTNKTTGNTDKRAFVETWQSFYRKKLKEVWKPAV

SEQ ID NO: 36626 - protein, 979 aa, synthetic construct
  REGION 1..979: note = engineered CasX variant
QEIKRINKIRRRLVKDSNTKKAGKTGPMKTLLVRVMTPDLRERLENLRKKPENIPQPISNTSRANLNKLLTDYTEMKKAILHVYWEEFQKDPVGLMSRVAQPASKKIDQNKLKPEMDEKGNLTTAGFACSQCGQPLFVYKLEQVSEKGKAYTNYFGRCNVAEHEKLILLAQLKPEKDSDEAVTYSLGKFGQRALDFYSIHVTKESTHPVKPLAQIAGNRYASHPVGKALSDACMGTIASFLSKYQDIIIEHQKVVKGNQKRLESLRELAGKENLEYPSVTLPPQPHTKEGVDAYNEVIARVRMWVNLNLWQKLKLSRDDAKPLLRLKGFPSFPLVERQQANEVDWWDMVCNVKKLINEKKEDGKVFWQNLAGYKRQEALRPYLSSEEDRKKGKKFARYQLGDLLLHLEKKHGEDWGKVYDEAWERIDKKVEGLSKHIKLEEERRSEDAQSKAALTDWLRAKASFVIEGLKEADKDEFCRCELKLQKWYGDLRGKPFAIEAENSILDISGFSKQYNCAFIWQKDGVKKLNLYLIINYFKGGKLRFKKIKPEAFEANRFYTVINKKSGEIVPMEVNFNFDDPNLIILPLAFGKRQGREFIWNDLLSLETGSLKLANGRVIEKTLYNRRTRQDEPALFVALTFERREVLDSSNIKPMNLIGVDRGENIPAVIALTDPEGCPLSRFKDSLGNPTHILRIGESYKEKQRTIQAKKEVEQRRAGGYSRKYASKAKNLADDMVRNTARDLLYYAVTQDAMLIFENLSRGFGRQGKRTFMAERQYTRMEDWLTAKLAYEGLPSKTYLSKTLAQYTSKTCSNCGFTITSADYDRVLEKLKKTATGWMTTINGKELKVEGQITYYNRYKRQNVVKDLSVELDRLSEESVNNDISSWTKGRSGEALSLLKKRFSHRPVQEKFVCLNCEFETHADEQAALNIARSWLFLRSQEYKKYQTNKTTGNTDKRAFVETWQSFYRKKLKEVWKPAV

SEQ ID NO: 36627 - protein, 979 aa, synthetic construct
  REGION 1..979: note = engineered CasX variant
QEIKRINKIRRRLVKDSNTKKAGKTGPMKTLLVRVMTPDLRERLENLRKKPENIPQPISNTSRANLNKLLTDYTEMKKAILHVYWEEFQKDPVGLMSRVAQPASKKIDQNKLKPEMDEKGNLTTAGFACSQCGQPLFVYKLEQVSEKGKAYTNYFGRCNVAEHEKLILLAQLKPEKDSDEAVTYSLGKFGQRALDFYSIHVTKESTHPVKPLAQIAGNRYASSPVGKALSDACMGTIASFLSKYQDIIIEHQKVVKGNQKRLESLRELAGKENLEYPSVTLPPQPHTKEGVDAYNEVIARVRMWVNLNLWQKLKLSRDDAKPLLRLKGFPSFPLVERQQANEVDWWDMVCNVKKLINEKKEDGKVFWQNLAGYKRQEALRPYLSSEEDRKKGKKFARYQLGDLLLHLEKKHGEDWGKVYDEAWERIDKKVEGLSKHIKLEEERRSEDAQSKAALTDWLRAKASFVIEGLKEADKDEFCRCELKLQKWYGDLRGKPFAIEAENSILDISGFSKQYNCAFIWQKDGVKKLNLYLIINYFKGGKLRFKKIKPEAFEANRFYTVINKKSGEIVPMEVNFNFDDPNLIILPLAFGKRQGREFIWNDLLSLETGSLKLANGRVIEKTLYNRRTRQDEPALFVALTFERREVLDSSNIKPMNLIGVDRGENIPAVIALTDPEGCPLSRFKDSLGNPTHILRIGESYKEKQRTIQAKKEVEQRRAGGYSRKYASKAKNLADDMVRNTARDLLYYAVTQDAMLIFENLSRGFGRQGKRTFMAERQYTRMEDWLTAKLAYEGLPSKTYLSKTLAQYTSKTCSNCGFTITSADYDRVLEKLKKTATGWMTTINGKELKVEGQITYYNRYKRQNVVKDLSVELDRLSEESVNNDISSWTKGRSGEALSLLKKRFSHRPVQEKFVCLNCEFETHADEQAALNIARSWLFLRSQEYKKYQTNKTTGNTDKRAFVETWQSFYRKKLKEVWKPAV

SEQ ID NO: 36628 - protein, 979 aa, synthetic construct
  REGION 1..979: note = engineered CasX variant
QEIKRINKIRRRLVKDSNTKKAGKTGPMKTLLVRVMTPDLRERLENLRKKPENIPQPISNTSRANLNKLLTDYTEMKKAILHVYWEEFQKDPVGLMSRVAQPASKKIDQNKLKPEMDEKGNLTTAGFACSQCGQPLFVYKLEQVSEKGKAYTNYFGRCNVAEHEKLILLAQLKPEKDSDEAVTYSLGKFGQRALDFYSIHVTKESTHPVKPLAQIAGNRYASTPVGKALSDACMGTIASFLSKYQDIIIEHQKVVKGNQKRLESLRELAGKENLEYPSVTLPPQPHTKEGVDAYNEVIARVRMWVNLNLWQKLKLSRDDAKPLLRLKGFPSFPLVERQQANEVDWWDMVCNVKKLINEKKEDGKVFWQNLAGYKRQEALRPYLSSEEDRKKGKKFARYQLGDLLLHLEKKHGEDWGKVYDEAWERIDKKVEGLSKHIKLEEERRSEDAQSKAALTDWLRAKASFVIEGLKEADKDEFCRCELKLQKWYGDLRGKPFAIEAENSILDISGFSKQYNCAFIWQKDGVKKLNLYLIINYFKGGKLRFKKIKPEAFEANRFYTVINKKSGEIVPMEVNFNFDDPNLIILPLAFGKRQGREFIWNDLLSLETGSLKLANGRVIEKTLYNRRTRQDEPALFVALTFERREVLDSSNIKPMNLIGVDRGENIPAVIALTDPEGCPLSRFKDSLGNPTHILRIGESYKEKQRTIQAKKEVEQRRAGGYSRKYASKAKNLADDMVRNTARDLLYYAVTQDAMLIFENLSRGFGRQGKRTFMAERQYTRMEDWLTAKLAYEGLPSKTYLSKTLAQYTSKTCSNCGFTITSADYDRVLEKLKKTATGWMTTINGKELKVEGQITYYNRYKRQNVVKDLSVELDRLSEESVNNDISSWTKGRSGEALSLLKKRFSHRPVQEKFVCLNCEFETHADEQAALNIARSWLFLRSQEYKKYQTNKTTGNTDKRAFVETWQSFYRKKLKEVWKPAV

SEQ ID NO: 36629 - protein, 979 aa, synthetic construct
  REGION 1..979: note = engineered CasX variant
QEIKRINKIRRRLVKDSNTKKAGKTGPMKTLLVRVMTPDLRERLENLRKKPENIPQPISNTSRANLNKLLTDYTEMKKAILHVYWEEFQKDPVGLMSRVAQPASKKIDQNKLKPEMDEKGNLTTAGFACSQCGQPLFVYKLEQVSEKGKAYTNYFGRCNVAEHEKLILLAQLKPEKDSDEAVTYSLGKFGQRALDFYSIHVTKESTHPVKPLAQIAGNRYASAPVGKALSDACMGTIASFLSKYQDIIIEHQKVVKGNQKRLESLRELAGKENLEYPSVTLPPQPHTKEGVDAYNEVIARVRMWVNLNLWQKLKLSRDDAKPLLRLKGFPSFPLVERQQANEVDWWDMVCNVKKLINEKKEDGKVFWQNLAGYKRQEALRPYLSSEEDRKKGKKFARYQLGDLLLHLEKKHGEDWGKVYDEAWERIDKKVEGLSKHIKLEEERRSEDAQSKAALTDWLRAKASFVIEGLKEADKDEFCRCELKLQKWYGDLRGKPFAIEAENSILDISGFSKQYNCAFIWQKDGVKKLNLYLIINYFKGGKLRFKKIKPEAFEANRFYTVINKKSGEIVPMEVNFNFDDPNLIILPLAFGKRQGREFIWNDLLSLETGSLKLANGRVIEKTLYNRRTRQDEPALFVALTFERREVLDSSNIKPMNLIGVDRGENIPAVIALTDPEGCPLSRFKDSLGNPTHILRIGESYKEKQRTIQAKKEVEQRRAGGYSRKYASKAKNLADDMVRNTARDLLYYAVTQDAMLIFENLSRGFGRQGKRTFMAERQYTRMEDWLTAKLAYEGLPSKTYLSKTLAQYTSKTCSNCGFTITSADYDRVLEKLKKTATGWMTTINGKELKVEGQITYYNRYKRQNVVKDLSVELDRLSEESVNNDISSWTKGRSGEALSLLKKRFSHRPVQEKFVCLNCEFETHADEQAALNIARSWLFLRSQEYKKYQTNKTTGNTDKRAFVETWQSFYRKKLKEVWKPAV

SEQ ID NO: 36630 - protein, 979 aa, synthetic construct
  REGION 1..979: note = engineered CasX variant
QEIKRINKIRRRLVKDSNTKKAGKTGPMKTLLVRVMTPDLRERLENLRKKPENIPQPISNTSRANLNKLLTDYTEMKKAILHVYWEEFQKDPVGLMSRVAQPASKKIDQNKLKPEMDEKGNLTTAGFACSQCGQPLFVYKLEQVSEKGKAYTNYFGRCNVAEHEKLILLAQLKPEKDSDEAVTYSLGKFGQRALDFYSIHVTKESTHPVKPLAQIAGNRYASVPVGKALSDACMGTIASFLSKYQDIIIEHQKVVKGNQKRLESLRELAGKENLEYPSVTLPPQPHTKEGVDAYNEVIARVRMWVNLNLWQKLKLSRDDAKPLLRLKGFPSFPLVERQQANEVDWWDMVCNVKKLINEKKEDGKVFWQNLAGYKRQEALRPYLSSEEDRKKGKKFARYQLGDLLLHLEKKHGEDWGKVYDEAWERIDKKVEGLSKHIKLEEERRSEDAQSKAALTDWLRAKASFVIEGLKEADKDEFCRCELKLQKWYGDLRGKPFAIEAENSILDISGFSKQYNCAFIWQKDGVKKLNLYLIINYFKGGKLRFKKIKPEAFEANRFYTVINKKSGEIVPMEVNFNFDDPNLIILPLAFGKRQGREFIWNDLLSLETGSLKLANGRVIEKTLYNRRTRQDEPALFVALTFERREVLDSSNIKPMNLIGVDRGENIPAVIALTDPEGCPLSRFKDSLGNPTHILRIGESYKEKQRTIQAKKEVEQRRAGGYSRKYASKAKNLADDMVRNTARDLLYYAVTQDAMLIFENLSRGFGRQGKRTFMAERQYTRMEDWLTAKLAYEGLPSKTYLSKTLAQYTSKTCSNCGFTITSADYDRVLEKLKKTATGWMTTINGKELKVEGQITYYNRYKRQNVVKDLSVELDRLSEESVNNDISSWTKGRSGEALSLLKKRFSHRPVQEKFVCLNCEFETHADEQAALNIARSWLFLRSQEYKKYQTNKTTGNTDKRAFVETWQSFYRKKLKEVWKPAV

SEQ ID NO: 36631 - protein, 979 aa, synthetic construct
  REGION 1..979: note = engineered CasX variant
QEIKRINKIRRRLVKDSNTKKAGKTGPMKTLLVRVMTPDLRERLENLRKKPENIPQPISNTSRANLNKLLTDYTEMKKAILHVYWEEFQKDPVGLMSRVAQPASKKIDQNKLKPEMDEKGNLTTAGFACSQCGQPLFVYKLEQVSEKGKAYTNYFGRCNVAEHEKLIKLAQLKPEKDSDEAVTYSLGKFGQRALDFYSIHVTKESTHPVKPLAQIAGNRYASGPVGKALSDACMGTIASFLSKYQDIIIEHQKVVKGNQKRLESLRELAGKENLEYPSVTLPPQPHTKEGVDAYNEVIARVRMWVNLNLWQKLKLSRDDAKPLLRLKGFPSFPLVERQQANEVDWWDMVCNVKKLINEKKEDGKVFWQNLAGYKRQEALRPYLSSEEDRKKGKKFARYQLGDLLLHLEKKHGEDWGKVYDEAWERIDKKVEGLSKHIKLEEERRSEDAQSKAALTDWLRAKASFVIEGLKEADKDEFCRCELKLQKWYGDLRGKPFAIEAENSILDISGFSKQYNCAFIWQKDGVKKLNLYLIINYFKGGKLRFKKIKPEAFEANRFYTVINKKSGEIVPMEVNFNFDDPNLIILPLAFGKRQGREFIWNDLLSLETGSLKLANGRVIEKTLYNRRTRQDEPALFVALTFERREVLDSSNIKPMNLIGVDRGENIPAVIALTDPEGCPLSRFKDSLGNPTHILRIGESYKEKQRTIQAKKEVEQRRAGGYSRKYASKAKNLADDMVRNTARDLLYYAVTQDAMLIFENLSRGFGRQGKRTFMAERQYTRMEDWLTAKLAYEGLPSKTYLSKTLAQYTSKTCSNCGFTITSADYDRVLEKLKKTATGWMTTINGKELKVEGQITYYNRYKRQNVVKDLSVELDRLSEESVNNDISSWTKGRSGEALSLLKKRFSHRPVQEKFVCLNCEFETHADEQAALNIARSWLFLRSQEYKKYQTNKTTGNTDKRAFVETWQSFYRKKLKEVWKPAV

SEQ ID NO: 36632 - protein, 978 aa, synthetic construct
  REGION 1..978: note = engineered CasX variant
QEIKRINKIRRRLVKDSNTKKAGKTGPMKTLLVRVMTPDLRERLENLRKKPENIPQPISNTSRANLNKLLTDYTEMKKAILHVYWEEFQKDPVGLMSRVAQPASKKIDQNKLKPEMDEKGNLTTAGFACSQCGQPLFVYKLEQVSEKGKAYTNYFGRCNVAEHEKLILLAQLKPEKDSDEAVTYSLGKFGQRALDFYSIHVTKESTHPVKPLAQIAGNRYASPVGKALSDACMGTIASFLSKYQDIIIEHQKVVKGNQKRLESLRELAGKENLEYPSVTLPPQPHTKEGVDAYNEVIARVRMWVNLNLWQKLKLSRDDAKPLLRLKGFPSFPLVERQQANEVDWWDMVCNVKKLINEKKEDGKVFWQNLAGYKRQEALRPYLSSEEDRKKGKKFARYQLGDLLLHLEKKHGEDWGKVYDEAWERIDKKVEGLSKHIKLEEERRSEDAQSKAALTDWLRAKASFVIEGLKEADKDEFCRCELKLQKWYGDLRGKPFAIEAENSILDISGFSKQYNCAFIWQKDGVKKLNLYLIINYFKGGKLRFKKIKPEAFEANRFYTVINKKSGEIVPMEVNFNFDDPNLIILPLAFGKRQGREFIWNDLLSLETGSLKLANGRVIEKTLYNRRTRQDEPALFVALTFERREVLDSSNIKPMNLIGVDRGENIPAVIALTDPEGCPLSRFKDSLGNPTHILRIGESYKEKQRTIQAKKEVEQRRAGGYSRKYASKAKNLADDMVRNTARDLLYYAVTQDAMLIFENLSRGFGRQGKRTFMAERQYTRMEDWLTAKLAYEGLPSKTYLSKTLAQYTSKTCSNCGFTITSADYDRVLEKLKKTATGWMTTINGKELKVEGQITYYNRYKRQNVVKDLSVELDRLSEESVNNDISSWTKGRSGEALSLLKKRFSHRPVQEKFVCLNCEFETHADEQAALNIARSWLFLRSQEYKKYQTNKTTGNTDKRAFVETWQSFYRKKLKEVWKPAV

SEQ ID NO: 36633 - protein, 980 aa, synthetic construct
  REGION 1..980: note = engineered CasX variant
QEIKRINKIRRRLVKDSNTKKAGKTGPMKTLLVRVMTPDLRERLENLRKKPENIPQPISNTSRANLNKLLTDYTEMKKAILHVYWEEFQKDPVGLMSRVAQPASKKIDQNKLKPEMDEKGNLTTAGFACSQCGQPLFVYKLEQVSEKGKAYTNYFGRCNVAEHEKLILLAQLKPEKDSDEAVTYSLGKFGQRALDFYSIHVTKESTHPVKPLAQIAGNRYASYPVGKALSDACMGTIASFLSKYQDIIIEHQKVVKGNQKRLESLRELAGKENLEYPSVTLPPQPHTKEGVDAYNEVIARVRMWVNLNLWQKLKLSRDDAKPLLRLKGFPSFPLVERQQANEVDWWDMVCNVKKLINEKKEDGKVFWQNLAGYKRQEALRPYLSSEEDRKKGKKFARYQLGDLLLHLEKKHGEDWGKVYDEAWERIDKKVEGLSKHIKLEEERRSEDAQSKAALTDWLRAKASFVIEGLKEADKDEFCRCELKLQKWYGDLRGKPFAIEAENSILDISGFSKQYNCAFIWQKDGVKKLNLYLIINYFKGGKLRFKKIKPEAFEANRFYTVINKKSGEIVPMEVNFNFDDPNLIILPLAFGKRQGREFIWNDLLSLETGSLKLANGRVIEKTLYNRRTRQDEPALFVALTFERREVLDSSNIKPMNLIGVDRGENIPAVIALTDPEGCPLSRFKDSLGNPTHILRIGESYKEKQRTIQAKKEVEQRRAGGYSRKYASKAKNLADDMVRNTARDLLYYAVTQDAMLIFENLSRGFGRQGKRTFMAERQYTRMEDWLTAKLAYEGLPSKTYLSKTLAQYTSKTCSNCGFTITSADYDRVLEKLKKTATGWMTTINGKELKVEGQITYYNRYKRQNVVKDLSVELDRLSEESVNNDISSWTKGRSGEALSLLKKRFSHRPVQEKFVCLNCGFETHADEQAALNIARSWLFLRSQEYKKYQTNKTSTGNTDKRAFVETWQSFYRKKLKEVWKPAV

SEQ ID NO: 36634 - protein, 980 aa, synthetic construct
  REGION 1..980: note = engineered CasX variant
QEIKRINKIRRRLVKDSNTKKAGKTGPMKTLLVRVMTPDLRERLENLRKKPENIPQPISNTSRANLNKLLTDYTEMKKAILHVYWEEFQKDPVGLMSRVAQPASKKIDQNKLKPEMDEKGNLTTAGFACSQCGQPLFVYKLEQVSEKGKAYTNYFGRCNVAEHEKLILLAQLKPEKDSDEAVTYSLGKFGQRALDFYSIHVTKESTHPVKPLAQIAGNRYASHPVGKALSDACMGTIASFLSKYQDIIIEHQKVVKGNQKRLESLRELAGKENLEYPSVTLPPQPHTKEGVDAYNEVIARVRMWVNLNLWQKLKLSRDDAKPLLRLKGFPSFPLVERQQANEVDWWDMVCNVKKLINEKKEDGKVFWQNLAGYKRQEALRPYLSSEEDRKKGKKFARYQLGDLLLHLEKKHGEDWGKVYDEAWERIDKKVEGLSKHIKLEEERRSEDAQSKAALTDWLRAKASFVIEGLKEADKDEFCRCELKLQKWYGDLRGKPFAIEAENSILDISGFSKQYNCAFIWQKDGVKKLNLYLIINYFKGGKLRFKKIKPEAFEANRFYTVINKKSGEIVPMEVNFNFDDPNLIILPLAFGKRQGREFIWNDLLSLETGSLKLANGRVIEKTLYNRRTRQDEPALFVALTFERREVLDSSNIKPMNLIGVDRGENIPAVIALTDPEGCPLSRFKDSLGNPTHILRIGESYKEKQRTIQAKKEVEQRRAGGYSRKYASKAKNLADDMVRNTARDLLYYAVTQDAMLIFENLSRGFGRQGKRTFMAERQYTRMEDWLTAKLAYEGLPSKTYLSKTLAQYTSKTCSNCGFTITSADYDRVLEKLKKTATGWMTTINGKELKVEGQITYYNRYKRQNVVKDLSVELDRLSEESVNNDISSWTKGRSGEALSLLKKRFSHRPVQEKFVCLNCGFETHADEQAALNIARSWLFLRSQEYKKYQTNKTSTGNTDKRAFVETWQSFYRKKLKEVWKPAV

SEQ ID NO: 36635 - protein, 980 aa, synthetic construct
  REGION 1..980: note = engineered CasX variant
QEIKRINKIRRRLVKDSNTKKAGKTGPMKTLLVRVMTPDLRERLENLRKKPENIPQPISNTSRANLNKLLTDYTEMKKAILHVYWEEFQKDPVGLMSRVAQPASKKIDQNKLKPEMDEKGNLTTAGFACSQCGQPLFVYKLEQVSEKGKAYTNYFGRCNVAEHEKLILLAQLKPEKDSDEAVTYSLGKFGQRALDFYSIHVTKESTHPVKPLAQIAGNRYASSPVGKALSDACMGTIASFLSKYQDIIIEHQKVVKGNQKRLESLRELAGKENLEYPSVTLPPQPHTKEGVDAYNEVIARVRMWVNLNLWQKLKLSRDDAKPLLRLKGFPSFPLVERQQANEVDWWDMVCNVKKLINEKKEDGKVFWQNLAGYKRQEALRPYLSSEEDRKKGKKFARYQLGDLLLHLEKKHGEDWGKVYDEAWERIDKKVEGLSKHIKLEEERRSEDAQSKAALTDWLRAKASFVIEGLKEADKDEFCRCELKLQKWYGDLRGKPFAIEAENSILDISGFSKQYNCAFIWQKDGVKKLNLYLIINYFKGGKLRFKKIKPEAFEANRFYTVINKKSGEIVPMEVNFNFDDPNLIILPLAFGKRQGREFIWNDLLSLETGSLKLANGRVIEKTLYNRRTRQDEPALFVALTFERREVLDSSNIKPMNLIGVDRGENIPAVIALTDPEGCPLSRFKDSLGNPTHILRIGESYKEKQRTIQAKKEVEQRRAGGYSRKYASKAKNLADDMVRNTARDLLYYAVTQDAMLIFENLSRGFGRQGKRTFMAERQYTRMEDWLTAKLAYEGLPSKTYLSKTLAQYTSKTCSNCGFTITSADYDRVLEKLKKTATGWMTTINGKELKVEGQITYYNRYKRQNVVKDLSVELDRLSEESVNNDISSWTKGRSGEALSLLKKRFSHRPVQEKFVCLNCGFETHADEQAALNIARSWLFLRSQEYKKYQTNKTSTGNTDKRAFVETWQSFYRKKLKEVWKPAV

SEQ ID NO: 36636 - protein, 980 aa, synthetic construct
  REGION 1..980: note = engineered CasX variant
QEIKRINKIRRRLVKDSNTKKAGKTGPMKTLLVRVMTPDLRERLENLRKKPENIPQPISNTSRANLNKLLTDYTEMKKAILHVYWEEFQKDPVGLMSRVAQPASKKIDQNKLKPEMDEKGNLTTAGFACSQCGQPLFVYKLEQVSEKGKAYTNYFGRCNVAEHEKLILLAQLKPEKDSDEAVTYSLGKFGQRALDFYSIHVTKESTHPVKPLAQIAGNRYASTPVGKALSDACMGTIASFLSKYQDIIIEHQKVVKGNQKRLESLRELAGKENLEYPSVTLPPQPHTKEGVDAYNEVIARVRMWVNLNLWQKLKLSRDDAKPLLRLKGFPSFPLVERQQANEVDWWDMVCNVKKLINEKKEDGKVFWQNLAGYKRQEALRPYLSSEEDRKKGKKFARYQLGDLLLHLEKKHGEDWGKVYDEAWERIDKKVEGLSKHIKLEEERRSEDAQSKAALTDWLRAKASFVIEGLKEADKDEFCRCELKLQKWYGDLRGKPFAIEAENSILDISGFSKQYNCAFIWQKDGVKKLNLYLIINYFKGGKLRFKKIKPEAFEANRFYTVINKKSGEIVPMEVNFNFDDPNLIILPLAFGKRQGREFIWNDLLSLETGSLKLANGRVIEKTLYNRRTRQDEPALFVALTFERREVLDSSNIKPMNLIGVDRGENIPAVIALTDPEGCPLSRFKDSLGNPTHILRIGESYKEKQRTIQAKKEVEQRRAGGYSRKYASKAKNLADDMVRNTARDLLYYAVTQDAMLIFENLSRGFGRQGKRTFMAERQYTRMEDWLTAKLAYEGLPSKTYLSKTLAQYTSKTCSNCGFTITSADYDRVLEKLKKTATGWMTTINGKELKVEGQITYYNRYKRQNVVKDLSVELDRLSEESVNNDISSWTKGRSGEALSLLKKRFSHRPVQEKFVCLNCGFETHADEQAALNIARSWLFLRSQEYKKYQTNKTSTGNTDKRAFVETWQSFYRKKLKEVWKPAV

SEQ ID NO: 36637 - protein, 980 aa, synthetic construct
  REGION 1..980: note = engineered CasX variant
QEIKRINKIRRRLVKDSNTKKAGKTGPMKTLLVRVMTPDLRERLENLRKKPENIPQPISNTSRANLNKLLTDYTEMKKAILHVYWEEFQKDPVGLMSRVAQPASKKIDQNKLKPEMDEKGNLTTAGFACSQCGQPLFVYKLEQVSEKGKAYTNYFGRCNVAEHEKLILLAQLKPEKDSDEAVTYSLGKFGQRALDFYSIHVTKESTHPVKPLAQIAGNRYASAPVGKALSDACMGTIASFLSKYQDIIIEHQKVVKGNQKRLESLRELAGKENLEYPSVTLPPQPHTKEGVDAYNEVIARVRMWVNLNLWQKLKLSRDDAKPLLRLKGFPSFPLVERQQANEVDWWDMVCNVKKLINEKKEDGKVFWQNLAGYKRQEALRPYLSSEEDRKKGKKFARYQLGDLLLHLEKKHGEDWGKVYDEAWERIDKKVEGLSKHIKLEEERRSEDAQSKAALTDWLRAKASFVIEGLKEADKDEFCRCELKLQKWYGDLRGKPFAIEAENSILDISGFSKQYNCAFIWQKDGVKKLNLYLIINYFKGGKLRFKKIKPEAFEANRFYTVINKKSGEIVPMEVNFNFDDPNLIILPLAFGKRQGREFIWNDLLSLETGSLKLANGRVIEKTLYNRRTRQDEPALFVALTFERREVLDSSNIKPMNLIGVDRGENIPAVIALTDPEGCPLSRFKDSLGNPTHILRIGESYKEKQRTIQAKKEVEQRRAGGYSRKYASKAKNLADDMVRNTARDLLYYAVTQDAMLIFENLSRGFGRQGKRTFMAERQYTRMEDWLTAKLAYEGLPSKTYLSKTLAQYTSKTCSNCGFTITSADYDRVLEKLKKTATGWMTTINGKELKVEGQITYYNRYKRQNVVKDLSVELDRLSEESVNNDISSWTKGRSGEALSLLKKRFSHRPVQEKFVCLNCGFETHADEQAALNIARSWLFLRSQEYKKYQTNKTSTGNTDKRAFVETWQSFYRKKLKEVWKPAV

SEQ ID NO: 36638 - protein, 980 aa, synthetic construct
  REGION 1..980: note = engineered CasX variant
QEIKRINKIRRRLVKDSNTKKAGKTGPMKTLLVRVMTPDLRERLENLRKKPENIPQPISNTSRANLNKLLTDYTEMKKAILHVYWEEFQKDPVGLMSRVAQPASKKIDQNKLKPEMDEKGNLTTAGFACSQCGQPLFVYKLEQVSEKGKAYTNYFGRCNVAEHEKLILLAQLKPEKDSDEAVTYSLGKFGQRALDFYSIHVTKESTHPVKPLAQIAGNRYASVPVGKALSDACMGTIASFLSKYQDIIIEHQKVVKGNQKRLESLRELAGKENLEYPSVTLPPQPHTKEGVDAYNEVIARVRMWVNLNLWQKLKLSRDDAKPLLRLKGFPSFPLVERQQANEVDWWDMVCNVKKLINEKKEDGKVFWQNLAGYKRQEALRPYLSSEEDRKKGKKFARYQLGDLLLHLEKKHGEDWGKVYDEAWERIDKKVEGLSKHIKLEEERRSEDAQSKAALTDWLRAKASFVIEGLKEADKDEFCRCELKLQKWYGDLRGKPFAIEAENSILDISGFSKQYNCAFIWQKDGVKKLNLYLIINYFKGGKLRFKKIKPEAFEANRFYTVINKKSGEIVPMEVNFNFDDPNLIILPLAFGKRQGREFIWNDLLSLETGSLKLANGRVIEKTLYNRRTRQDEPALFVALTFERREVLDSSNIKPMNLIGVDRGENIPAVIALTDPEGCPLSRFKDSLGNPTHILRIGESYKEKQRTIQAKKEVEQRRAGGYSRKYASKAKNLADDMVRNTARDLLYYAVTQDAMLIFENLSRGFGRQGKRTFMAERQYTRMEDWLTAKLAYEGLPSKTYLSKTLAQYTSKTCSNCGFTITSADYDRVLEKLKKTATGWMTTINGKELKVEGQITYYNRYKRQNVVKDLSVELDRLSEESVNNDISSWTKGRSGEALSLLKKRFSHRPVQEKFVCLNCGFETHADEQAALNIARSWLFLRSQEYKKYQTNKTSTGNTDKRAFVETWQSFYRKKLKEVWKPAV

SEQ ID NO: 36639 - protein, 980 aa, synthetic construct
  REGION 1..980: note = engineered CasX variant
QEIKRINKIRRRLVKDSNTKKAGKTGPMKTLLVRVMTPDLRERLENLRKKPENIPQPISNTSRANLNKLLTDYTEMKKAILHVYWEEFQKDPVGLMSRVAQPASKKIDQNKLKPEMDEKGNLTTAGFACSQCGQPLFVYKLEQVSEKGKAYTNYFGRCNVAEHEKLIKLAQLKPEKDSDEAVTYSLGKFGQRALDFYSIHVTKESTHPVKPLAQIAGNRYASGPVGKALSDACMGTIASFLSKYQDIIIEHQKVVKGNQKRLESLRELAGKENLEYPSVTLPPQPHTKEGVDAYNEVIARVRMWVNLNLWQKLKLSRDDAKPLLRLKGFPSFPLVERQQANEVDWWDMVCNVKKLINEKKEDGKVFWQNLAGYKRQEALRPYLSSEEDRKKGKKFARYQLGDLLLHLEKKHGEDWGKVYDEAWERIDKKVEGLSKHIKLEEERRSEDAQSKAALTDWLRAKASFVIEGLKEADKDEFCRCELKLQKWYGDLRGKPFAIEAENSILDISGFSKQYNCAFIWQKDGVKKLNLYLIINYFKGGKLRFKKIKPEAFEANRFYTVINKKSGEIVPMEVNFNFDDPNLIILPLAFGKRQGREFIWNDLLSLETGSLKLANGRVIEKTLYNRRTRQDEPALFVALTFERREVLDSSNIKPMNLIGVDRGENIPAVIALTDPEGCPLSRFKDSLGNPTHILRIGESYKEKQRTIQAKKEVEQRRAGGYSRKYASKAKNLADDMVRNTARDLLYYAVTQDAMLIFENLSRGFGRQGKRTFMAERQYTRMEDWLTAKLAYEGLPSKTYLSKTLAQYTSKTCSNCGFTITSADYDRVLEKLKKTATGWMTTINGKELKVEGQITYYNRYKRQNVVKDLSVELDRLSEESVNNDISSWTKGRSGEALSLLKKRFSHRPVQEKFVCLNCGFETHADEQAALNIARSWLFLRSQEYKKYQTNKTSTGNTDKRAFVETWQSFYRKKLKEVWKPAV

SEQ ID NO: 36640 - protein, 979 aa, synthetic construct
  REGION 1..979: note = engineered CasX variant
QEIKRINKIRRRLVKDSNTKKAGKTGPMKTLLVRVMTPDLRERLENLRKKPENIPQPISNTSRANLNKLLTDYTEMKKAILHVYWEEFQKDPVGLMSRVAQPASKKIDQNKLKPEMDEKGNLTTAGFACSQCGQPLFVYKLEQVSEKGKAYTNYFGRCNVAEHEKLILLAQLKPEKDSDEAVTYSLGKFGQRALDFYSIHVTKESTHPVKPLAQIAGNRYASPVGKALSDACMGTIASFLSKYQDIIIEHQKVVKGNQKRLESLRELAGKENLEYPSVTLPPQPHTKEGVDAYNEVIARVRMWVNLNLWQKLKLSRDDAKPLLRLKGFPSFPLVERQQANEVDWWDMVCNVKKLINEKKEDGKVFWQNLAGYKRQEALRPYLSSEEDRKKGKKFARYQLGDLLLHLEKKHGEDWGKVYDEAWERIDKKVEGLSKHIKLEEERRSEDAQSKAALTDWLRAKASFVIEGLKEADKDEFCRCELKLQKWYGDLRGKPFAIEAENSILDISGFSKQYNCAFIWQKDGVKKLNLYLIINYFKGGKLRFKKIKPEAFEANRFYTVINKKSGEIVPMEVNFNFDDPNLIILPLAFGKRQGREFIWNDLLSLETGSLKLANGRVIEKTLYNRRTRQDEPALFVALTFERREVLDSSNIKPMNLIGVDRGENIPAVIALTDPEGCPLSRFKDSLGNPTHILRIGESYKEKQRTIQAKKEVEQRRAGGYSRKYASKAKNLADDMVRNTARDLLYYAVTQDAMLIFENLSRGFGRQGKRTFMAERQYTRMEDWLTAKLAYEGLPSKTYLSKTLAQYTSKTCSNCGFTITSADYDRVLEKLKKTATGWMTTINGKELKVEGQITYYNRYKRQNVVKDLSVELDRLSEESVNNDISSWTKGRSGEALSLLKKRFSHRPVQEKFVCLNCGFETHADEQAALNIARSWLFLRSQEYKKYQTNKTSTGNTDKRAFVETWQSFYRKKLKEVWKPAV

SEQ ID NO: 36641 - protein, 980 aa, synthetic construct
  REGION 1..980: note = engineered CasX variant
QEIKRINKIRRRLVKDSNTKKAGKTGPMKTLLVRVMTPDLRERLENLRKKPENIPQPISNTSRANLNKLLTDYTEMKKAILHVYWEEFQKDPVGLMSRVAQPASKKIDQNKLKPEMDEKGNLTTAGFACSQCGQPLFVYKLEQVSEKGKAYTNYFGRCNVAEHEKLILLAQLKPEKDSDEAVTYSLGKFGQRALDFYSIHVTKESTHPVKPLAQIAGNRYASYPVGKALSDACMGTIASFLSKYQDIIIEHQKVVKGNQKRLESLRELAGKENLEYPSVTLPPQPHTKEGVDAYNEVIARVRMWVNLNLWQKLKLSRDDAKPLLRLKGFPSFPLVERQQANEVDWWDMVCNVKKLINEKKEDGKVFWQNLAGYKRQEALRPYLSSEEDRKKGKKFARYQLGDLLLHLEKKHGEDWGKVYDEAWERIDKKVEGLSKHIKLEEERRSEDAQSKAALTDWLRAKASFVIEGLKEADKDEFCRCELKLQKWYGDLRGKPFAIEAENSILDISGFSKQYNCAFIWQKDGVKKLNLYLIINYFKGGKLRFKKIKPEAFEANRFYTVINKKSGEIVPMEVNFNFDDPNLIILPLAFGKRQGREFIWNDLLSLETGSLKLANGRVIEKTLYNRRTRQDEPALFVALTFERREVLDSSNIKPMNLIGVDRGENIPAVIALTDPEGCPLSRFKDSLGNPTHILRIGESYKEKQRTIQAKKEVEQRRAGGYSRKYASKAKNLADDMVRNTARDLLYYAVTQDAMLIFENLSRGFGRQGKRTFMAERQYTRMEDWLTAKLAYEGLPSKTYLSKTLAQYTSKTCSNCGFTITSADYDRVLEKLKKTATGWMTTINGKELKVEGQITYYNRYKRQNVVKDLSVELDRLSEESVNNDISSWTKGRSGEALSLLKKRFSHRPVQEKFVCLNCGFETHADEQAALNIARSWLFLRSQEYKKYQTNKTTGKNTDKRAFVETWQSFYRKKLKEVWKPAV

SEQ ID NO: 36642 - protein, 980 aa, synthetic construct
  REGION 1..980: note = engineered CasX variant
QEIKRINKIRRRLVKDSNTKKAGKTGPMKTLLVRVMTPDLRERLENLRKKPENIPQPISNTSRANLNKLLTDYTEMKKAILHVYWEEFQKDPVGLMSRVAQPASKKIDQNKLKPEMDEKGNLTTAGFACSQCGQPLFVYKLEQVSEKGKAYTNYFGRCNVAEHEKLILLAQLKPEKDSDEAVTYSLGKFGQRALDFYSIHVTKESTHPVKPLAQIAGNRYASHPVGKALSDACMGTIASFLSKYQDIIIEHQKVVKGNQKRLESLRELAGKENLEYPSVTLPPQPHTKEGVDAYNEVIARVRMWVNLNLWQKLKLSRDDAKPLLRLKGFPSFPLVERQQANEVDWWDMVCNVKKLINEKKEDGKVFWQNLAGYKRQEALRPYLSSEEDRKKGKKFARYQLGDLLLHLEKKHGEDWGKVYDEAWERIDKKVEGLSKHIKLEEERRSEDAQSKAALTDWLRAKASFVIEGLKEADKDEFCRCELKLQKWYGDLRGKPFAIEAENSILDISGFSKQYNCAFIWQKDGVKKLNLYLIINYFKGGKLRFKKIKPEAFEANRFYTVINKKSGEIVPMEVNFNFDDPNLIILPLAFGKRQGREFIWNDLLSLETGSLKLANGRVIEKTLYNRRTRQDEPALFVALTFERREVLDSSNIKPMNLIGVDRGENIPAVIALTDPEGCPLSRFKDSLGNPTHILRIGESYKEKQRTIQAKKEVEQRRAGGYSRKYASKAKNLADDMVRNTARDLLYYAVTQDAMLIFENLSRGFGRQGKRTFMAERQYTRMEDWLTAKLAYEGLPSKTYLSKTLAQYTSKTCSNCGFTITSADYDRVLEKLKKTATGWMTTINGKELKVEGQITYYNRYKRQNVVKDLSVELDRLSEESVNNDISSWTKGRSGEALSLLKKRFSHRPVQEKFVCLNCGFETHADEQAALNIARSWLFLRSQEYKKYQTNKTTGKNTDKRAFVETWQSFYRKKLKEVWKPAV

SEQ ID NO: 36643 - protein, 980 aa, synthetic construct
  REGION 1..980: note = engineered CasX variant
QEIKRINKIRRRLVKDSNTKKAGKTGPMKTLLVRVMTPDLRERLENLRKKPENIPQPISNTSRANLNKLLTDYTEMKKAILHVYWEEFQKDPVGLMSRVAQPASKKIDQNKLKPEMDEKGNLTTAGFACSQCGQPLFVYKLEQVSEKGKAYTNYFGRCNVAEHEKLILLAQLKPEKDSDEAVTYSLGKFGQRALDFYSIHVTKESTHPVKPLAQIAGNRYASSPVGKALSDACMGTIASFLSKYQDIIIEHQKVVKGNQKRLESLRELAGKENLEYPSVTLPPQPHTKEGVDAYNEVIARVRMWVNLNLWQKLKLSRDDAKPLLRLKGFPSFPLVERQQANEVDWWDMVCNVKKLINEKKEDGKVFWQNLAGYKRQEALRPYLSSEEDRKKGKKFARYQLGDLLLHLEKKHGEDWGKVYDEAWERIDKKVEGLSKHIKLEEERRSEDAQSKAALTDWLRAKASFVIEGLKEADKDEFCRCELKLQKWYGDLRGKPFAIEAENSILDISGFSKQYNCAFIWQKDGVKKLNLYLIINYFKGGKLRFKKIKPEAFEANRFYTVINKKSGEIVPMEVNFNFDDPNLIILPLAFGKRQGREFIWNDLLSLETGSLKLANGRVIEKTLYNRRTRQDEPALFVALTFERREVLDSSNIKPMNLIGVDRGENIPAVIALTDPEGCPLSRFKDSLGNPTHILRIGESYKEKQRTIQAKKEVEQRRAGGYSRKYASKAKNLADDMVRNTARDLLYYAVTQDAMLIFENLSRGFGRQGKRTFMAERQYTRMEDWLTAKLAYEGLPSKTYLSKTLAQYTSKTCSNCGFTITSADYDRVLEKLKKTATGWMTTINGKELKVEGQITYYNRYKRQNVVKDLSVELDRLSEESVNNDISSWTKGRSGEALSLLKKRFSHRPVQEKFVCLNCGFETHADEQAALNIARSWLFLRSQEYKKYQTNKTTGKNTDKRAFVETWQSFYRKKLKEVWKPAV

SEQ ID NO: 36644 - protein, 980 aa, synthetic construct
  REGION 1..980: note = engineered CasX variant
QEIKRINKIRRRLVKDSNTKKAGKTGPMKTLLVRVMTPDLRERLENLRKKPENIPQPISNTSRANLNKLLTDYTEMKKAILHVYWEEFQKDPVGLMSRVAQPASKKIDQNKLKPEMDEKGNLTTAGFACSQCGQPLFVYKLEQVSEKGKAYTNYFGRCNVAEHEKLILLAQLKPEKDSDEAVTYSLGKFGQRALDFYSIHVTKESTHPVKPLAQIAGNRYASTPVGKALSDACMGTIASFLSKYQDIIIEHQKVVKGNQKRLESLRELAGKENLEYPSVTLPPQPHTKEGVDAYNEVIARVRMWVNLNLWQKLKLSRDDAKPLLRLKGFPSFPLVERQQANEVDWWDMVCNVKKLINEKKEDGKVFWQNLAGYKRQEALRPYLSSEEDRKKGKKFARYQLGDLLLHLEKKHGEDWGKVYDEAWERIDKKVEGLSKHIKLEEERRSEDAQSKAALTDWLRAKASFVIEGLKEADKDEFCRCELKLQKWYGDLRGKPFAIEAENSILDISGFSKQYNCAFIWQKDGVKKLNLYLIINYFKGGKLRFKKIKPEAFEANRFYTVINKKSGEIVPMEVNFNFDDPNLIILPLAFGKRQGREFIWNDLLSLETGSLKLANGRVIEKTLYNRRTRQDEPALFVALTFERREVLDSSNIKPMNLIGVDRGENIPAVIALTDPEGCPLSRFKDSLGNPTHILRIGESYKEKQRTIQAKKEVEQRRAGGYSRKYASKAKNLADDMVRNTARDLLYYAVTQDAMLIFENLSRGFGRQGKRTFMAERQYTRMEDWLTAKLAYEGLPSKTYLSKTLAQYTSKTCSNCGFTITSADYDRVLEKLKKTATGWMTTINGKELKVEGQITYYNRYKRQNVVKDLSVELDRLSEESVNNDISSWTKGRSGEALSLLKKRFSHRPVQEKFVCLNCGFETHADEQAALNIARSWLFLRSQEYKKYQTNKTTGKNTDKRAFVETWQSFYRKKLKEVWKPAV

SEQ ID NO: 36645 - protein, 980 aa, synthetic construct
  REGION 1..980: note = engineered CasX variant
QEIKRINKIRRRLVKDSNTKKAGKTGPMKTLLVRVMTPDLRERLENLRKKPENIPQPISNTSRANLNKLLTDYTEMKKAILHVYWEEFQKDPVGLMSRVAQPASKKIDQNKLKPEMDEKGNLTTAGFACSQCGQPLFVYKLEQVSEKGKAYTNYFGRCNVAEHEKLILLAQLKPEKDSDEAVTYSLGKFGQRALDFYSIHVTKESTHPVKPLAQIAGNRYASAPVGKALSDACMGTIASFLSKYQDIIIEHQKVVKGNQKRLESLRELAGKENLEYPSVTLPPQPHTKEGVDAYNEVIARVRMWVNLNLWQKLKLSRDDAKPLLRLKGFPSFPLVERQQANEVDWWDMVCNVKKLINEKKEDGKVFWQNLAGYKRQEALRPYLSSEEDRKKGKKFARYQLGDLLLHLEKKHGEDWGKVYDEAWERIDKKVEGLSKHIKLEEERRSEDAQSKAALTDWLRAKASFVIEGLKEADKDEFCRCELKLQKWYGDLRGKPFAIEAENSILDISGFSKQYNCAFIWQKDGVKKLNLYLIINYFKGGKLRFKKIKPEAFEANRFYTVINKKSGEIVPMEVNFNFDDPNLIILPLAFGKRQGREFIWNDLLSLETGSLKLANGRVIEKTLYNRRTRQDEPALFVALTFERREVLDSSNIKPMNLIGVDRGENIPAVIALTDPEGCPLSRFKDSLGNPTHILRIGESYKEKQRTIQAKKEVEQRRAGGYSRKYASKAKNLADDMVRNTARDLLYYAVTQDAMLIFENLSRGFGRQGKRTFMAERQYTRMEDWLTAKLAYEGLPSKTYLSKTLAQYTSKTCSNCGFTITSADYDRVLEKLKKTATGWMTTINGKELKVEGQITYYNRYKRQNVVKDLSVELDRLSEESVNNDISSWTKGRSGEALSLLKKRFSHRPVQEKFVCLNCGFETHADEQAALNIARSWLFLRSQEYKKYQTNKTTGKNTDKRAFVETWQSFYRKKLKEVWKPAV

SEQ ID NO: 36646 - protein, 980 aa, synthetic construct
  REGION 1..980: note = engineered CasX variant
QEIKRINKIRRRLVKDSNTKKAGKTGPMKTLLVRVMTPDLRERLENLRKKPENIPQPISNTSRANLNKLLTDYTEMKKAILHVYWEEFQKDPVGLMSRVAQPASKKIDQNKLKPEMDEKGNLTTAGFACSQCGQPLFVYKLEQVSEKGKAYTNYFGRCNVAEHEKLILLAQLKPEKDSDEAVTYSLGKFGQRALDFYSIHVTKESTHPVKPLAQIAGNRYASVPVGKALSDACMGTIASFLSKYQDIIIEHQKVVKGNQKRLESLRELAGKENLEYPSVTLPPQPHTKEGVDAYNEVIARVRMWVNLNLWQKLKLSRDDAKPLLRLKGFPSFPLVERQQANEVDWWDMVCNVKKLINEKKEDGKVFWQNLAGYKRQEALRPYLSSEEDRKKGKKFARYQLGDLLLHLEKKHGEDWGKVYDEAWERIDKKVEGLSKHIKLEEERRSEDAQSKAALTDWLRAKASFVIEGLKEADKDEFCRCELKLQKWYGDLRGKPFAIEAENSILDISGFSKQYNCAFIWQKDGVKKLNLYLIINYFKGGKLRFKKIKPEAFEANRFYTVINKKSGEIVPMEVNFNFDDPNLIILPLAFGKRQGREFIWNDLLSLETGSLKLANGRVIEKTLYNRRTRQDEPALFVALTFERREVLDSSNIKPMNLIGVDRGENIPAVIALTDPEGCPLSRFKDSLGNPTHILRIGESYKEKQRTIQAKKEVEQRRAGGYSRKYASKAKNLADDMVRNTARDLLYYAVTQDAMLIFENLSRGFGRQGKRTFMAERQYTRMEDWLTAKLAYEGLPSKTYLSKTLAQYTSKTCSNCGFTITSADYDRVLEKLKKTATGWMTTINGKELKVEGQITYYNRYKRQNVVKDLSVELDRLSEESVNNDISSWTKGRSGEALSLLKKRFSHRPVQEKFVCLNCGFETHADEQAALNIARSWLFLRSQEYKKYQTNKTTGKNTDKRAFVETWQSFYRKKLKEVWKPAV

SEQ ID NO: 36647 - protein, 980 aa, synthetic construct
  REGION 1..980: note = engineered CasX variant
QEIKRINKIRRRLVKDSNTKKAGKTGPMKTLLVRVMTPDLRERLENLRKKPENIPQPISNTSRANLNKLLTDYTEMKKAILHVYWEEFQKDPVGLMSRVAQPASKKIDQNKLKPEMDEKGNLTTAGFACSQCGQPLFVYKLEQVSEKGKAYTNYFGRCNVAEHEKLIKLAQLKPEKDSDEAVTYSLGKFGQRALDFYSIHVTKESTHPVKPLAQIAGNRYASGPVGKALSDACMGTIASFLSKYQDIIIEHQKVVKGNQKRLESLRELAGKENLEYPSVTLPPQPHTKEGVDAYNEVIARVRMWVNLNLWQKLKLSRDDAKPLLRLKGFPSFPLVERQQANEVDWWDMVCNVKKLINEKKEDGKVFWQNLAGYKRQEALRPYLSSEEDRKKGKKFARYQLGDLLLHLEKKHGEDWGKVYDEAWERIDKKVEGLSKHIKLEEERRSEDAQSKAALTDWLRAKASFVIEGLKEADKDEFCRCELKLQKWYGDLRGKPFAIEAENSILDISGFSKQYNCAFIWQKDGVKKLNLYLIINYFKGGKLRFKKIKPEAFEANRFYTVINKKSGEIVPMEVNFNFDDPNLIILPLAFGKRQGREFIWNDLLSLETGSLKLANGRVIEKTLYNRRTRQDEPALFVALTFERREVLDSSNIKPMNLIGVDRGENIPAVIALTDPEGCPLSRFKDSLGNPTHILRIGESYKEKQRTIQAKKEVEQRRAGGYSRKYASKAKNLADDMVRNTARDLLYYAVTQDAMLIFENLSRGFGRQGKRTFMAERQYTRMEDWLTAKLAYEGLPSKTYLSKTLAQYTSKTCSNCGFTITSADYDRVLEKLKKTATGWMTTINGKELKVEGQITYYNRYKRQNVVKDLSVELDRLSEESVNNDISSWTKGRSGEALSLLKKRFSHRPVQEKFVCLNCGFETHADEQAALNIARSWLFLRSQEYKKYQTNKTTGKNTDKRAFVETWQSFYRKKLKEVWKPAV

SEQ ID NO: 36648 - protein, 979 aa, synthetic construct
  REGION 1..979: note = engineered CasX variant
QEIKRINKIRRRLVKDSNTKKAGKTGPMKTLLVRVMTPDLRERLENLRKKPENIPQPISNTSRANLNKLLTDYTEMKKAILHVYWEEFQKDPVGLMSRVAQPASKKIDQNKLKPEMDEKGNLTTAGFACSQCGQPLFVYKLEQVSEKGKAYTNYFGRCNVAEHEKLILLAQLKPEKDSDEAVTYSLGKFGQRALDFYSIHVTKESTHPVKPLAQIAGNRYASPVGKALSDACMGTIASFLSKYQDIIIEHQKVVKGNQKRLESLRELAGKENLEYPSVTLPPQPHTKEGVDAYNEVIARVRMWVNLNLWQKLKLSRDDAKPLLRLKGFPSFPLVERQQANEVDWWDMVCNVKKLINEKKEDGKVFWQNLAGYKRQEALRPYLSSEEDRKKGKKFARYQLGDLLLHLEKKHGEDWGKVYDEAWERIDKKVEGLSKHIKLEEERRSEDAQSKAALTDWLRAKASFVIEGLKEADKDEFCRCELKLQKWYGDLRGKPFAIEAENSILDISGFSKQYNCAFIWQKDGVKKLNLYLIINYFKGGKLRFKKIKPEAFEANRFYTVINKKSGEIVPMEVNFNFDDPNLIILPLAFGKRQGREFIWNDLLSLETGSLKLANGRVIEKTLYNRRTRQDEPALFVALTFERREVLDSSNIKPMNLIGVDRGENIPAVIALTDPEGCPLSRFKDSLGNPTHILRIGESYKEKQRTIQAKKEVEQRRAGGYSRKYASKAKNLADDMVRNTARDLLYYAVTQDAMLIFENLSRGFGRQGKRTFMAERQYTRMEDWLTAKLAYEGLPSKTYLSKTLAQYTSKTCSNCGFTITSADYDRVLEKLKKTATGWMTTINGKELKVEGQITYYNRYKRQNVVKDLSVELDRLSEESVNNDISSWTKGRSGEALSLLKKRFSHRPVQEKFVCLNCGFETHADEQAALNIARSWLFLRSQEYKKYQTNKTTGKNTDKRAFVETWQSFYRKKLKEVWKPAV

SEQ ID NO: 36649 - protein, 979 aa, synthetic construct
  REGION 1..979: note = engineered CasX variant
QEIKRINKIRRRLVKDSNTKKAGKTGPMKTLLVRVMTPDLRERLENLRKKPENIPQPISNTSRANLNKLLTDYTEMKKAILHVYWEEFQKDPVGLMSRVAQPASKKIDQNKLKPEMDEKGNLTTAGFACSQCGQPLFVYKLEQVSEKGKAYTNYFGRCNVAEHEKLILLAQLKPEKDSDEAVTYSLGKFGQRALDFYSIHVTKESTHPVKPLAQIAGNRYASYPVGKALSDACMGTIASFLSKYQDIIIEHQKVVKGNQKRLESLRELAGKENLEYPSVTLPPQPHTKEGVDAYNEVIARVRMWVNLNLWQKLKLSRDDAKPLLRLKKFPSFPLVERQQANEVDWWDMVCNVKKLINEKKEDGKVFWQNLAGYKRQEALRPYLSSEEDRKKGKKFARYQLGDLLLHLEKKHGEDWGKVYDEAWERIDKKVEGLSKHIKLEEERRSEDAQSKAALTDWLRAKASFVIEGLKEADKDEFCRCELKLQKWYGDLRGKPFAIEAENSILDISGFSKQYNCAFIWQKDGVKKLNLYLIINYFKGGKLRFKKIKPEAFEANRFYTVINKKSGEIVPMEVNFNFDDPNLIILPLAFGKRQGREFIWNDLLSLETGSLKLANGRVIEKTLYNRRTRQDEPALFVALTFERREVLDSSNIKPMNLIGVDRGENIPAVIALTDPEGCPLSRFKDSLGNPTHILRIGESYKEKQRTIQAKKEVEQRRAGGYSRKYASKAKNLADDMVRNTARDLLYYAVTQDAMLIFENLSRGFGRQGKRTFMAERQYTRMEDWLTAKLAYEGLPSKTYLSKTLAQYTSKTCSNCGFTITSADYDRVLEKLKKTATGWMTTINGKELKVEGQITYYNRYKRQNVVKDLSVELDRLSEESVNNDISSWTKGRSGEALSLLKKRFSHRPVQEKFVCLNCGFETHADEQAALNIARSWLFLRSQEYKKYQTNKTTGNTDKRAFVETWQSFYRKKLKEVWKPAV

SEQ ID NO: 36650 - protein, 979 aa, synthetic construct
  REGION 1..979: note = engineered CasX variant
QEIKRINKIRRRLVKDSNTKKAGKTGPMKTLLVRVMTPDLRERLENLRKKPENIPQPISNTSRANLNKLLTDYTEMKKAILHVYWEEFQKDPVGLMSRVAQPASKKIDQNKLKPEMDEKGNLTTAGFACSQCGQPLFVYKLEQVSEKGKAYTNYFGRCNVAEHEKLILLAQLKPEKDSDEAVTYSLGKFGQRALDFYSIHVTKESTHPVKPLAQIAGNRYASHPVGKALSDACMGTIASFLSKYQDIIIEHQKVVKGNQKRLESLRELAGKENLEYPSVTLPPQPHTKEGVDAYNEVIARVRMWVNLNLWQKLKLSRDDAKPLLRLKKFPSFPLVERQQANEVDWWDMVCNVKKLINEKKEDGKVFWQNLAGYKRQEALRPYLSSEEDRKKGKKFARYQLGDLLLHLEKKHGEDWGKVYDEAWERIDKKVEGLSKHIKLEEERRSEDAQSKAALTDWLRAKASFVIEGLKEADKDEFCRCELKLQKWYGDLRGKPFAIEAENSILDISGFSKQYNCAFIWQKDGVKKLNLYLIINYFKGGKLRFKKIKPEAFEANRFYTVINKKSGEIVPMEVNFNFDDPNLIILPLAFGKRQGREFIWNDLLSLETGSLKLANGRVIEKTLYNRRTRQDEPALFVALTFERREVLDSSNIKPMNLIGVDRGENIPAVIALTDPEGCPLSRFKDSLGNPTHILRIGESYKEKQRTIQAKKEVEQRRAGGYSRKYASKAKNLADDMVRNTARDLLYYAVTQDAMLIFENLSRGFGRQGKRTFMAERQYTRMEDWLTAKLAYEGLPSKTYLSKTLAQYTSKTCSNCGFTITSADYDRVLEKLKKTATGWMTTINGKELKVEGQITYYNRYKRQNVVKDLSVELDRLSEESVNNDISSWTKGRSGEALSLLKKRFSHRPVQEKFVCLNCGFETHADEQAALNIARSWLFLRSQEYKKYQTNKTTGNTDKRAFVETWQSFYRKKLKEVWKPAV

SEQ ID NO: 36651 - protein, 979 aa, synthetic construct
  REGION 1..979: note = engineered CasX variant
QEIKRINKIRRRLVKDSNTKKAGKTGPMKTLLVRVMTPDLRERLENLRKKPENIPQPISNTSRANLNKLLTDYTEMKKAILHVYWEEFQKDPVGLMSRVAQPASKKIDQNKLKPEMDEKGNLTTAGFACSQCGQPLFVYKLEQVSEKGKAYTNYFGRCNVAEHEKLILLAQLKPEKDSDEAVTYSLGKFGQRALDFYSIHVTKESTHPVKPLAQIAGNRYASSPVGKALSDACMGTIASFLSKYQDIIIEHQKVVKGNQKRLESLRELAGKENLEYPSVTLPPQPHTKEGVDAYNEVIARVRMWVNLNLWQKLKLSRDDAKPLLRLKKFPSFPLVERQQANEVDWWDMVCNVKKLINEKKEDGKVFWQNLAGYKRQEALRPYLSSEEDRKKGKKFARYQLGDLLLHLEKKHGEDWGKVYDEAWERIDKKVEGLSKHIKLEEERRSEDAQSKAALTDWLRAKASFVIEGLKEADKDEFCRCELKLQKWYGDLRGKPFAIEAENSILDISGFSKQYNCAFIWQKDGVKKLNLYLIINYFKGGKLRFKKIKPEAFEANRFYTVINKKSGEIVPMEVNFNFDDPNLIILPLAFGKRQGREFIWNDLLSLETGSLKLANGRVIEKTLYNRRTRQDEPALFVALTFERREVLDSSNIKPMNLIGVDRGENIPAVIALTDPEGCPLSRFKDSLGNPTHILRIGESYKEKQRTIQAKKEVEQRRAGGYSRKYASKAKNLADDMVRNTARDLLYYAVTQDAMLIFENLSRGFGRQGKRTFMAERQYTRMEDWLTAKLAYEGLPSKTYLSKTLAQYTSKTCSNCGFTITSADYDRVLEKLKKTATGWMTTINGKELKVEGQITYYNRYKRQNVVKDLSVELDRLSEESVNNDISSWTKGRSGEALSLLKKRFSHRPVQEKFVCLNCGFETHADEQAALNIARSWLFLRSQEYKKYQTNKTTGNTDKRAFVETWQSFYRKKLKEVWKPAV

SEQ ID NO: 36652 - protein, 979 aa, synthetic construct
  REGION 1..979: note = engineered CasX variant
QEIKRINKIRRRLVKDSNTKKAGKTGPMKTLLVRVMTPDLRERLENLRKKPENIPQPISNTSRANLNKLLTDYTEMKKAILHVYWEEFQKDPVGLMSRVAQPASKKIDQNKLKPEMDEKGNLTTAGFACSQCGQPLFVYKLEQVSEKGKAYTNYFGRCNVAEHEKLILLAQLKPEKDSDEAVTYSLGKFGQRALDFYSIHVTKESTHPVKPLAQIAGNRYASTPVGKALSDACMGTIASFLSKYQDIIIEHQKVVKGNQKRLESLRELAGKENLEYPSVTLPPQPHTKEGVDAYNEVIARVRMWVNLNLWQKLKLSRDDAKPLLRLKKFPSFPLVERQQANEVDWWDMVCNVKKLINEKKEDGKVFWQNLAGYKRQEALRPYLSSEEDRKKGKKFARYQLGDLLLHLEKKHGEDWGKVYDEAWERIDKKVEGLSKHIKLEEERRSEDAQSKAALTDWLRAKASFVIEGLKEADKDEFCRCELKLQKWYGDLRGKPFAIEAENSILDISGFSKQYNCAFIWQKDGVKKLNLYLIINYFKGGKLRFKKIKPEAFEANRFYTVINKKSGEIVPMEVNFNFDDPNLIILPLAFGKRQGREFIWNDLLSLETGSLKLANGRVIEKTLYNRRTRQDEPALFVALTFERREVLDSSNIKPMNLIGVDRGENIPAVIALTDPEGCPLSRFKDSLGNPTHILRIGESYKEKQRTIQAKKEVEQRRAGGYSRKYASKAKNLADDMVRNTARDLLYYAVTQDAMLIFENLSRGFGRQGKRTFMAERQYTRMEDWLTAKLAYEGLPSKTYLSKTLAQYTSKTCSNCGFTITSADYDRVLEKLKKTATGWMTTINGKELKVEGQITYYNRYKRQNVVKDLSVELDRLSEESVNNDISSWTKGRSGEALSLLKKRFSHRPVQEKFVCLNCGFETHADEQAALNIARSWLFLRSQEYKKYQTNKTTGNTDKRAFVETWQSFYRKKLKEVWKPAV

SEQ ID NO: 36653 - protein, 979 aa, synthetic construct
  REGION 1..979: note = engineered CasX variant
QEIKRINKIRRRLVKDSNTKKAGKTGPMKTLLVRVMTPDLRERLENLRKKPENIPQPISNTSRANLNKLLTDYTEMKKAILHVYWEEFQKDPVGLMSRVAQPASKKIDQNKLKPEMDEKGNLTTAGFACSQCGQPLFVYKLEQVSEKGKAYTNYFGRCNVAEHEKLILLAQLKPEKDSDEAVTYSLGKFGQRALDFYSIHVTKESTHPVKPLAQIAGNRYASAPVGKALSDACMGTIASFLSKYQDIIIEHQKVVKGNQKRLESLRELAGKENLEYPSVTLPPQPHTKEGVDAYNEVIARVRMWVNLNLWQKLKLSRDDAKPLLRLKKFPSFPLVERQQANEVDWWDMVCNVKKLINEKKEDGKVFWQNLAGYKRQEALRPYLSSEEDRKKGKKFARYQLGDLLLHLEKKHGEDWGKVYDEAWERIDKKVEGLSKHIKLEEERRSEDAQSKAALTDWLRAKASFVIEGLKEADKDEFCRCELKLQKWYGDLRGKPFAIEAENSILDISGFSKQYNCAFIWQKDGVKKLNLYLIINYFKGGKLRFKKIKPEAFEANRFYTVINKKSGEIVPMEVNFNFDDPNLIILPLAFGKRQGREFIWNDLLSLETGSLKLANGRVIEKTLYNRRTRQDEPALFVALTFERREVLDSSNIKPMNLIGVDRGENIPAVIALTDPEGCPLSRFKDSLGNPTHILRIGESYKEKQRTIQAKKEVEQRRAGGYSRKYASKAKNLADDMVRNTARDLLYYAVTQDAMLIFENLSRGFGRQGKRTFMAERQYTRMEDWLTAKLAYEGLPSKTYLSKTLAQYTSKTCSNCGFTITSADYDRVLEKLKKTATGWMTTINGKELKVEGQITYYNRYKRQNVVKDLSVELDRLSEESVNNDISSWTKGRSGEALSLLKKRFSHRPVQEKFVCLNCGFETHADEQAALNIARSWLFLRSQEYKKYQTNKTTGNTDKRAFVETWQSFYRKKLKEVWKPAV

SEQ ID NO: 36654 - protein, 979 aa, synthetic construct
  REGION 1..979: note = engineered CasX variant
QEIKRINKIRRRLVKDSNTKKAGKTGPMKTLLVRVMTPDLRERLENLRKKPENIPQPISNTSRANLNKLLTDYTEMKKAILHVYWEEFQKDPVGLMSRVAQPASKKIDQNKLKPEMDEKGNLTTAGFACSQCGQPLFVYKLEQVSEKGKAYTNYFGRCNVAEHEKLILLAQLKPEKDSDEAVTYSLGKFGQRALDFYSIHVTKESTHPVKPLAQIAGNRYASVPVGKALSDACMGTIASFLSKYQDIIIEHQKVVKGNQKRLESLRELAGKENLEYPSVTLPPQPHTKEGVDAYNEVIARVRMWVNLNLWQKLKLSRDDAKPLLRLKKFPSFPLVERQQANEVDWWDMVCNVKKLINEKKEDGKVFWQNLAGYKRQEALRPYLSSEEDRKKGKKFARYQLGDLLLHLEKKHGEDWGKVYDEAWERIDKKVEGLSKHIKLEEERRSEDAQSKAALTDWLRAKASFVIEGLKEADKDEFCRCELKLQKWYGDLRGKPFAIEAENSILDISGFSKQYNCAFIWQKDGVKKLNLYLIINYFKGGKLRFKKIKPEAFEANRFYTVINKKSGEIVPMEVNFNFDDPNLIILPLAFGKRQGREFIWNDLLSLETGSLKLANGRVIEKTLYNRRTRQDEPALFVALTFERREVLDSSNIKPMNLIGVDRGENIPAVIALTDPEGCPLSRFKDSLGNPTHILRIGESYKEKQRTIQAKKEVEQRRAGGYSRKYASKAKNLADDMVRNTARDLLYYAVTQDAMLIFENLSRGFGRQGKRTFMAERQYTRMEDWLTAKLAYEGLPSKTYLSKTLAQYTSKTCSNCGFTITSADYDRVLEKLKKTATGWMTTINGKELKVEGQITYYNRYKRQNVVKDLSVELDRLSEESVNNDISSWTKGRSGEALSLLKKRFSHRPVQEKFVCLNCGFETHADEQAALNIARSWLFLRSQEYKKYQTNKTTGNTDKRAFVETWQSFYRKKLKEVWKPAV

SEQ ID NO: 36655 - protein, 979 aa, synthetic construct
  REGION 1..979: note = engineered CasX variant
QEIKRINKIRRRLVKDSNTKKAGKTGPMKTLLVRVMTPDLRERLENLRKKPENIPQPISNTSRANLNKLLTDYTEMKKAILHVYWEEFQKDPVGLMSRVAQPASKKIDQNKLKPEMDEKGNLTTAGFACSQCGQPLFVYKLEQVSEKGKAYTNYFGRCNVAEHEKLIKLAQLKPEKDSDEAVTYSLGKFGQRALDFYSIHVTKESTHPVKPLAQIAGNRYASGPVGKALSDACMGTIASFLSKYQDIIIEHQKVVKGNQKRLESLRELAGKENLEYPSVTLPPQPHTKEGVDAYNEVIARVRMWVNLNLWQKLKLSRDDAKPLLRLKKFPSFPLVERQQANEVDWWDMVCNVKKLINEKKEDGKVFWQNLAGYKRQEALRPYLSSEEDRKKGKKFARYQLGDLLLHLEKKHGEDWGKVYDEAWERIDKKVEGLSKHIKLEEERRSEDAQSKAALTDWLRAKASFVIEGLKEADKDEFCRCELKLQKWYGDLRGKPFAIEAENSILDISGFSKQYNCAFIWQKDGVKKLNLYLIINYFKGGKLRFKKIKPEAFEANRFYTVINKKSGEIVPMEVNFNFDDPNLIILPLAFGKRQGREFIWNDLLSLETGSLKLANGRVIEKTLYNRRTRQDEPALFVALTFERREVLDSSNIKPMNLIGVDRGENIPAVIALTDPEGCPLSRFKDSLGNPTHILRIGESYKEKQRTIQAKKEVEQRRAGGYSRKYASKAKNLADDMVRNTARDLLYYAVTQDAMLIFENLSRGFGRQGKRTFMAERQYTRMEDWLTAKLAYEGLPSKTYLSKTLAQYTSKTCSNCGFTITSADYDRVLEKLKKTATGWMTTINGKELKVEGQITYYNRYKRQNVVKDLSVELDRLSEESVNNDISSWTKGRSGEALSLLKKRFSHRPVQEKFVCLNCGFETHADEQAALNIARSWLFLRSQEYKKYQTNKTTGNTDKRAFVETWQSFYRKKLKEVWKPAV

SEQ ID NO: 36656 - protein, 978 aa, synthetic construct
  REGION 1..978: note = engineered CasX variant
QEIKRINKIRRRLVKDSNTKKAGKTGPMKTLLVRVMTPDLRERLENLRKKPENIPQPISNTSRANLNKLLTDYTEMKKAILHVYWEEFQKDPVGLMSRVAQPASKKIDQNKLKPEMDEKGNLTTAGFACSQCGQPLFVYKLEQVSEKGKAYTNYFGRCNVAEHEKLILLAQLKPEKDSDEAVTYSLGKFGQRALDFYSIHVTKESTHPVKPLAQIAGNRYASPVGKALSDACMGTIASFLSKYQDIIIEHQKVVKGNQKRLESLRELAGKENLEYPSVTLPPQPHTKEGVDAYNEVIARVRMWVNLNLWQKLKLSRDDAKPLLRLKKFPSFPLVERQQANEVDWWDMVCNVKKLINEKKEDGKVFWQNLAGYKRQEALRPYLSSEEDRKKGKKFARYQLGDLLLHLEKKHGEDWGKVYDEAWERIDKKVEGLSKHIKLEEERRSEDAQSKAALTDWLRAKASFVIEGLKEADKDEFCRCELKLQKWYGDLRGKPFAIEAENSILDISGFSKQYNCAFIWQKDGVKKLNLYLIINYFKGGKLRFKKIKPEAFEANRFYTVINKKSGEIVPMEVNFNFDDPNLIILPLAFGKRQGREFIWNDLLSLETGSLKLANGRVIEKTLYNRRTRQDEPALFVALTFERREVLDSSNIKPMNLIGVDRGENIPAVIALTDPEGCPLSRFKDSLGNPTHILRIGESYKEKQRTIQAKKEVEQRRAGGYSRKYASKAKNLADDMVRNTARDLLYYAVTQDAMLIFENLSRGFGRQGKRTFMAERQYTRMEDWLTAKLAYEGLPSKTYLSKTLAQYTSKTCSNCGFTITSADYDRVLEKLKKTATGWMTTINGKELKVEGQITYYNRYKRQNVVKDLSVELDRLSEESVNNDISSWTKGRSGEALSLLKKRFSHRPVQEKFVCLNCGFETHADEQAALNIARSWLFLRSQEYKKYQTNKTTGNTDKRAFVETWQSFYRKKLKEVWKPAV

SEQ ID NO: 36657 - protein, 979 aa, synthetic construct
  REGION 1..979: note = engineered CasX variant
QEIKRINKIRRRLVKDSNTKKAGKTGPMKTLLVRVMTPDLRERLENLRKKPENIPQPISNTSRANLNKLLTDYTEMKKAILHVYWEEFQKDPVGLMSRVAQPASKKIDQNKLKPEMDEKGNLTTAGFACSQCGQPLFVYKLEQVSEKGKAYTNYFGRCNVAEHEKLILLAQLKPEKDSDEAVTYSLGKFGQRALDFYSIHVTKESTHPVKPLAQIAGNRYASYPVGKALSDACMGTIASFLSKYQDIIIEHQKVVKGNQKRLESLRELAGKENLEYPSVTLPPQPHTKEGVDAYNEVIARVRMWVNLNLWQKLKLSRDDAKPLLRLKGFPSFPLVERQQANEVDWWDMVCNVKKLINEKKEDGKVFWQNLAGYKRQEALRPYLSSEEDRKKGKKFARYQLGDLLLHLEKKHGEDWGKVYDEAWERIDKKVEGLSKHIKLEEERRSEDAQSKAALTDWLRAKASFVIEGLKEADKDEFCRCELKLQKWYGDLRGKPFAIEAENSILDISGFSKQYNCAFIWQKDGVKKLNLYLIINYFKGGKLRFKKIKPEAFEANRFYTVINKKSGEIVPMEVNFNFDDPNLIILPLAFGKRQGREFIWNDLLSLETGSLKLANGRVIEKTLYNRRTRQDEPALFVALTFERREVLDSSNIKPMNLIGVDRGENIPAVIALTDPEGCPLSRFKDSLGNPTHILRIGERYKEKQRTIQAKKEVEQRRAGGYSRKYASKAKNLADDMVRNTARDLLYYAVTQDAMLIFENLSRGFGRQGKRTFMAERQYTRMEDWLTAKLAYEGLPSKTYLSKTLAQYTSKTCSNCGFTITSADYDRVLEKLKKTATGWMTTINGKELKVEGQITYYNRYKRQNVVKDLSVELDRLSEESVNNDISSWTKGRSGEALSLLKKRFSHRPVQEKFVCLNCGFETHADEQAALNIARSWLFLRSQEYKKYQTNKTTGNTDKRAFVETWQSFYRKKLKEVWKPAV

SEQ ID NO: 36658 - protein, 979 aa, synthetic construct
  REGION 1..979: note = engineered CasX variant
QEIKRINKIRRRLVKDSNTKKAGKTGPMKTLLVRVMTPDLRERLENLRKKPENIPQPISNTSRANLNKLLTDYTEMKKAILHVYWEEFQKDPVGLMSRVAQPASKKIDQNKLKPEMDEKGNLTTAGFACSQCGQPLFVYKLEQVSEKGKAYTNYFGRCNVAEHEKLILLAQLKPEKDSDEAVTYSLGKFGQRALDFYSIHVTKESTHPVKPLAQIAGNRYASHPVGKALSDACMGTIASFLSKYQDIIIEHQKVVKGNQKRLESLRELAGKENLEYPSVTLPPQPHTKEGVDAYNEVIARVRMWVNLNLWQKLKLSRDDAKPLLRLKGFPSFPLVERQQANEVDWWDMVCNVKKLINEKKEDGKVFWQNLAGYKRQEALRPYLSSEEDRKKGKKFARYQLGDLLLHLEKKHGEDWGKVYDEAWERIDKKVEGLSKHIKLEEERRSEDAQSKAALTDWLRAKASFVIEGLKEADKDEFCRCELKLQKWYGDLRGKPFAIEAENSILDISGFSKQYNCAFIWQKDGVKKLNLYLIINYFKGGKLRFKKIKPEAFEANRFYTVINKKSGEIVPMEVNFNFDDPNLIILPLAFGKRQGREFIWNDLLSLETGSLKLANGRVIEKTLYNRRTRQDEPALFVALTFERREVLDSSNIKPMNLIGVDRGENIPAVIALTDPEGCPLSRFKDSLGNPTHILRIGERYKEKQRTIQAKKEVEQRRAGGYSRKYASKAKNLADDMVRNTARDLLYYAVTQDAMLIFENLSRGFGRQGKRTFMAERQYTRMEDWLTAKLAYEGLPSKTYLSKTLAQYTSKTCSNCGFTITSADYDRVLEKLKKTATGWMTTINGKELKVEGQITYYNRYKRQNVVKDLSVELDRLSEESVNNDISSWTKGRSGEALSLLKKRFSHRPVQEKFVCLNCGFETHADEQAALNIARSWLFLRSQEYKKYQTNKTTGNTDKRAFVETWQSFYRKKLKEVWKPAV

SEQ ID NO: 36659 - protein, 979 aa, synthetic construct
  REGION 1..979: note = engineered CasX variant
QEIKRINKIRRRLVKDSNTKKAGKTGPMKTLLVRVMTPDLRERLENLRKKPENIPQPISNTSRANLNKLLTDYTEMKKAILHVYWEEFQKDPVGLMSRVAQPASKKIDQNKLKPEMDEKGNLTTAGFACSQCGQPLFVYKLEQVSEKGKAYTNYFGRCNVAEHEKLILLAQLKPEKDSDEAVTYSLGKFGQRALDFYSIHVTKESTHPVKPLAQIAGNRYASSPVGKALSDACMGTIASFLSKYQDIIIEHQKVVKGNQKRLESLRELAGKENLEYPSVTLPPQPHTKEGVDAYNEVIARVRMWVNLNLWQKLKLSRDDAKPLLRLKGFPSFPLVERQQANEVDWWDMVCNVKKLINEKKEDGKVFWQNLAGYKRQEALRPYLSSEEDRKKGKKFARYQLGDLLLHLEKKHGEDWGKVYDEAWERIDKKVEGLSKHIKLEEERRSEDAQSKAALTDWLRAKASFVIEGLKEADKDEFCRCELKLQKWYGDLRGKPFAIEAENSILDISGFSKQYNCAFIWQKDGVKKLNLYLIINYFKGGKLRFKKIKPEAFEANRFYTVINKKSGEIVPMEVNFNFDDPNLIILPLAFGKRQGREFIWNDLLSLETGSLKLANGRVIEKTLYNRRTRQDEPALFVALTFERREVLDSSNIKPMNLIGVDRGENIPAVIALTDPEGCPLSRFKDSLGNPTHILRIGERYKEKQRTIQAKKEVEQRRAGGYSRKYASKAKNLADDMVRNTARDLLYYAVTQDAMLIFENLSRGFGRQGKRTFMAERQYTRMEDWLTAKLAYEGLPSKTYLSKTLAQYTSKTCSNCGFTITSADYDRVLEKLKKTATGWMTTINGKELKVEGQITYYNRYKRQNVVKDLSVELDRLSEESVNNDISSWTKGRSGEALSLLKKRFSHRPVQEKFVCLNCGFETHADEQAALNIARSWLFLRSQEYKKYQTNKTTGNTDKRAFVETWQSFYRKKLKEVWKPAV

SEQ ID NO: 36660 - protein, 979 aa, synthetic construct
  REGION 1..979: note = engineered CasX variant
QEIKRINKIRRRLVKDSNTKKAGKTGPMKTLLVRVMTPDLRERLENLRKKPENIPQPISNTSRANLNKLLTDYTEMKKAILHVYWEEFQKDPVGLMSRVAQPASKKIDQNKLKPEMDEKGNLTTAGFACSQCGQPLFVYKLEQVSEKGKAYTNYFGRCNVAEHEKLILLAQLKPEKDSDEAVTYSLGKFGQRALDFYSIHVTKESTHPVKPLAQIAGNRYASTPVGKALSDACMGTIASFLSKYQDIIIEHQKVVKGNQKRLESLRELAGKENLEYPSVTLPPQPHTKEGVDAYNEVIARVRMWVNLNLWQKLKLSRDDAKPLLRLKGFPSFPLVERQQANEVDWWDMVCNVKKLINEKKEDGKVFWQNLAGYKRQEALRPYLSSEEDRKKGKKFARYQLGDLLLHLEKKHGEDWGKVYDEAWERIDKKVEGLSKHIKLEEERRSEDAQSKAALTDWLRAKASFVIEGLKEADKDEFCRCELKLQKWYGDLRGKPFAIEAENSILDISGFSKQYNCAFIWQKDGVKKLNLYLIINYFKGGKLRFKKIKPEAFEANRFYTVINKKSGEIVPMEVNFNFDDPNLIILPLAFGKRQGREFIWNDLLSLETGSLKLANGRVIEKTLYNRRTRQDEPALFVALTFERREVLDSSNIKPMNLIGVDRGENIPAVIALTDPEGCPLSRFKDSLGNPTHILRIGERYKEKQRTIQAKKEVEQRRAGGYSRKYASKAKNLADDMVRNTARDLLYYAVTQDAMLIFENLSRGFGRQGKRTFMAERQYTRMEDWLTAKLAYEGLPSKTYLSKTLAQYTSKTCSNCGFTITSADYDRVLEKLKKTATGWMTTINGKELKVEGQITYYNRYKRQNVVKDLSVELDRLSEESVNNDISSWTKGRSGEALSLLKKRFSHRPVQEKFVCLNCGFETHADEQAALNIARSWLFLRSQEYKKYQTNKTTGNTDKRAFVETWQSFYRKKLKEVWKPAV

SEQ ID NO: 36661 - protein, 979 aa, synthetic construct
  REGION 1..979: note = engineered CasX variant
QEIKRINKIRRRLVKDSNTKKAGKTGPMKTLLVRVMTPDLRERLENLRKKPENIPQPISNTSRANLNKLLTDYTEMKKAILHVYWEEFQKDPVGLMSRVAQPASKKIDQNKLKPEMDEKGNLTTAGFACSQCGQPLFVYKLEQVSEKGKAYTNYFGRCNVAEHEKLILLAQLKPEKDSDEAVTYSLGKFGQRALDFYSIHVTKESTHPVKPLAQIAGNRYASAPVGKALSDACMGTIASFLSKYQDIIIEHQKVVKGNQKRLESLRELAGKENLEYPSVTLPPQPHTKEGVDAYNEVIARVRMWVNLNLWQKLKLSRDDAKPLLRLKGFPSFPLVERQQANEVDWWDMVCNVKKLINEKKEDGKVFWQNLAGYKRQEALRPYLSSEEDRKKGKKFARYQLGDLLLHLEKKHGEDWGKVYDEAWERIDKKVEGLSKHIKLEEERRSEDAQSKAALTDWLRAKASFVIEGLKEADKDEFCRCELKLQKWYGDLRGKPFAIEAENSILDISGFSKQYNCAFIWQKDGVKKLNLYLIINYFKGGKLRFKKIKPEAFEANRFYTVINKKSGEIVPMEVNFNFDDPNLIILPLAFGKRQGREFIWNDLLSLETGSLKLANGRVIEKTLYNRRTRQDEPALFVALTFERREVLDSSNIKPMNLIGVDRGENIPAVIALTDPEGCPLSRFKDSLGNPTHILRIGERYKEKQRTIQAKKEVEQRRAGGYSRKYASKAKNLADDMVRNTARDLLYYAVTQDAMLIFENLSRGFGRQGKRTFMAERQYTRMEDWLTAKLAYEGLPSKTYLSKTLAQYTSKTCSNCGFTITSADYDRVLEKLKKTATGWMTTINGKELKVEGQITYYNRYKRQNVVKDLSVELDRLSEESVNNDISSWTKGRSGEALSLLKKRFSHRPVQEKFVCLNCGFETHADEQAALNIARSWLFLRSQEYKKYQTNKTTGNTDKRAFVETWQSFYRKKLKEVWKPAV

SEQ ID NO: 36662 - protein, 979 aa, synthetic construct
  REGION 1..979: note = engineered CasX variant
QEIKRINKIRRRLVKDSNTKKAGKTGPMKTLLVRVMTPDLRERLENLRKKPENIPQPISNTSRANLNKLLTDYTEMKKAILHVYWEEFQKDPVGLMSRVAQPASKKIDQNKLKPEMDEKGNLTTAGFACSQCGQPLFVYKLEQVSEKGKAYTNYFGRCNVAEHEKLILLAQLKPEKDSDEAVTYSLGKFGQRALDFYSIHVTKESTHPVKPLAQIAGNRYASVPVGKALSDACMGTIASFLSKYQDIIIEHQKVVKGNQKRLESLRELAGKENLEYPSVTLPPQPHTKEGVDAYNEVIARVRMWVNLNLWQKLKLSRDDAKPLLRLKGFPSFPLVERQQANEVDWWDMVCNVKKLINEKKEDGKVFWQNLAGYKRQEALRPYLSSEEDRKKGKKFARYQLGDLLLHLEKKHGEDWGKVYDEAWERIDKKVEGLSKHIKLEEERRSEDAQSKAALTDWLRAKASFVIEGLKEADKDEFCRCELKLQKWYGDLRGKPFAIEAENSILDISGFSKQYNCAFIWQKDGVKKLNLYLIINYFKGGKLRFKKIKPEAFEANRFYTVINKKSGEIVPMEVNFNFDDPNLIILPLAFGKRQGREFIWNDLLSLETGSLKLANGRVIEKTLYNRRTRQDEPALFVALTFERREVLDSSNIKPMNLIGVDRGENIPAVIALTDPEGCPLSRFKDSLGNPTHILRIGERYKEKQRTIQAKKEVEQRRAGGYSRKYASKAKNLADDMVRNTARDLLYYAVTQDAMLIFENLSRGFGRQGKRTFMAERQYTRMEDWLTAKLAYEGLPSKTYLSKTLAQYTSKTCSNCGFTITSADYDRVLEKLKKTATGWMTTINGKELKVEGQITYYNRYKRQNVVKDLSVELDRLSEESVNNDISSWTKGRSGEALSLLKKRFSHRPVQEKFVCLNCGFETHADEQAALNIARSWLFLRSQEYKKYQTNKTTGNTDKRAFVETWQSFYRKKLKEVWKPAV

SEQ ID NO: 36663 - protein, 979 aa, synthetic construct
  REGION 1..979: note = engineered CasX variant
QEIKRINKIRRRLVKDSNTKKAGKTGPMKTLLVRVMTPDLRERLENLRKKPENIPQPISNTSRANLNKLLTDYTEMKKAILHVYWEEFQKDPVGLMSRVAQPASKKIDQNKLKPEMDEKGNLTTAGFACSQCGQPLFVYKLEQVSEKGKAYTNYFGRCNVAEHEKLIKLAQLKPEKDSDEAVTYSLGKFGQRALDFYSIHVTKESTHPVKPLAQIAGNRYASGPVGKALSDACMGTIASFLSKYQDIIIEHQKVVKGNQKRLESLRELAGKENLEYPSVTLPPQPHTKEGVDAYNEVIARVRMWVNLNLWQKLKLSRDDAKPLLRLKGFPSFPLVERQQANEVDWWDMVCNVKKLINEKKEDGKVFWQNLAGYKRQEALRPYLSSEEDRKKGKKFARYQLGDLLLHLEKKHGEDWGKVYDEAWERIDKKVEGLSKHIKLEEERRSEDAQSKAALTDWLRAKASFVIEGLKEADKDEFCRCELKLQKWYGDLRGKPFAIEAENSILDISGFSKQYNCAFIWQKDGVKKLNLYLIINYFKGGKLRFKKIKPEAFEANRFYTVINKKSGEIVPMEVNFNFDDPNLIILPLAFGKRQGREFIWNDLLSLETGSLKLANGRVIEKTLYNRRTRQDEPALFVALTFERREVLDSSNIKPMNLIGVDRGENIPAVIALTDPEGCPLSRFKDSLGNPTHILRIGERYKEKQRTIQAKKEVEQRRAGGYSRKYASKAKNLADDMVRNTARDLLYYAVTQDAMLIFENLSRGFGRQGKRTFMAERQYTRMEDWLTAKLAYEGLPSKTYLSKTLAQYTSKTCSNCGFTITSADYDRVLEKLKKTATGWMTTINGKELKVEGQITYYNRYKRQNVVKDLSVELDRLSEESVNNDISSWTKGRSGEALSLLKKRFSHRPVQEKFVCLNCGFETHADEQAALNIARSWLFLRSQEYKKYQTNKTTGNTDKRAFVETWQSFYRKKLKEVWKPAV

SEQ ID NO: 36664 - protein, 978 aa, synthetic construct
  REGION 1..978: note = engineered CasX variant
QEIKRINKIRRRLVKDSNTKKAGKTGPMKTLLVRVMTPDLRERLENLRKKPENIPQPISNTSRANLNKLLTDYTEMKKAILHVYWEEFQKDPVGLMSRVAQPASKKIDQNKLKPEMDEKGNLTTAGFACSQCGQPLFVYKLEQVSEKGKAYTNYFGRCNVAEHEKLILLAQLKPEKDSDEAVTYSLGKFGQRALDFYSIHVTKESTHPVKPLAQIAGNRYASPVGKALSDACMGTIASFLSKYQDIIIEHQKVVKGNQKRLESLRELAGKENLEYPSVTLPPQPHTKEGVDAYNEVIARVRMWVNLNLWQKLKLSRDDAKPLLRLKGFPSFPLVERQQANEVDWWDMVCNVKKLINEKKEDGKVFWQNLAGYKRQEALRPYLSSEEDRKKGKKFARYQLGDLLLHLEKKHGEDWGKVYDEAWERIDKKVEGLSKHIKLEEERRSEDAQSKAALTDWLRAKASFVIEGLKEADKDEFCRCELKLQKWYGDLRGKPFAIEAENSILDISGFSKQYNCAFIWQKDGVKKLNLYLIINYFKGGKLRFKKIKPEAFEANRFYTVINKKSGEIVPMEVNFNFDDPNLIILPLAFGKRQGREFIWNDLLSLETGSLKLANGRVIEKTLYNRRTRQDEPALFVALTFERREVLDSSNIKPMNLIGVDRGENIPAVIALTDPEGCPLSRFKDSLGNPTHILRIGERYKEKQRTIQAKKEVEQRRAGGYSRKYASKAKNLADDMVRNTARDLLYYAVTQDAMLIFENLSRGFGRQGKRTFMAERQYTRMEDWLTAKLAYEGLPSKTYLSKTLAQYTSKTCSNCGFTITSADYDRVLEKLKKTATGWMTTINGKELKVEGQITYYNRYKRQNVVKDLSVELDRLSEESVNNDISSWTKGRSGEALSLLKKRFSHRPVQEKFVCLNCGFETHADEQAALNIARSWLFLRSQEYKKYQTNKTTGNTDKRAFVETWQSFYRKKLKEVWKPAV

SEQ ID NO: 36665 - protein, 979 aa, synthetic construct
  REGION 1..979: note = engineered CasX variant
QEIKRINKIRRRLVKDSNTKKAGKTGPMKTLLVRVMTPDLRERLENLRKKPENIPQPISNTSRANLNKLLTDYTEMKKAILHVYWEEFQKDPVGLMSRVAQPASKKIDQNKLKPEMDEKGNLTTAGFACSQCGQPLFVYKLEQVSEKGKAYTNYFGRCNVAEHEKLILLAQLKPEKDSDEAVTYSLGKFGQRALDFYSIHVTKESTHPVKPLAQIAGNRYASYPVGKALSDACMGTIASFLSKYQDIIIEHQKVVKGNQKRLESLRELAGKENLEYPSVTLPPQPHTKEGVDAYNEVIARVRMWVNLNLWQKLKLSRDDAKPLLRLKGFPSFPLVERQQANEVDWWDMVCNVKKLINEKKEDGKVFWQNLAGYKRQEALRPYLSSEEDRKKGKKFARYQLGDLLLHLEKKHGEDWGKVYDEAWERIDKKVEGLSKHIKLEEERRSEDAQSKAALTDWLRAKASFVIEGLKEADKDEFCRCELKLQKWYGDLRGKPFAIEAENSILDISGFSKQYNCAFIWQKDGVKKLNLYLIINYFKGGKLRFKKIKPEAFEANRFYTVINKKSGEIVPMEVNFNFDDPNLIILPLAFGKRQGREFIWNDLLSLETGSLQLANGRVIEKTLYNRRTRQDEPALFVALTFERREVLDSSNIKPMNLIGVDRGENIPAVIALTDPEGCPLSRFKDSLGNPTHILRIGESYKEKQRTIQAKKEVEQRRAGGYSRKYASKAKNLADDMVRNTARDLLYYAVTQDAMLIFENLSRGFGRQGKRTFMAERQYTRMEDWLTAKLAYEGLPSKTYLSKTLAQYTSKTCSNCGFTITSADYDRVLEKLKKTATGWMTTINGKELKVEGQITYYNRYKRQNVVKDLSVELDRLSEESVNNDISSWTKGRSGEALSLLKKRFSHRPVQEKFVCLNCGFETHADEQAALNIARSWLFLRSQEYKKYQTNKTTGNTDKRAFVETWQSFYRKKLKEVWKPAV

SEQ ID NO: 36666 - protein, 979 aa, synthetic construct
  REGION 1..979: note = engineered CasX variant
QEIKRINKIRRRLVKDSNTKKAGKTGPMKTLLVRVMTPDLRERLENLRKKPENIPQPISNTSRANLNKLLTDYTEMKKAILHVYWEEFQKDPVGLMSRVAQPASKKIDQNKLKPEMDEKGNLTTAGFACSQCGQPLFVYKLEQVSEKGKAYTNYFGRCNVAEHEKLILLAQLKPEKDSDEAVTYSLGKFGQRALDFYSIHVTKESTHPVKPLAQIAGNRYASHPVGKALSDACMGTIASFLSKYQDIIIEHQKVVKGNQKRLESLRELAGKENLEYPSVTLPPQPHTKEGVDAYNEVIARVRMWVNLNLWQKLKLSRDDAKPLLRLKGFPSFPLVERQQANEVDWWDMVCNVKKLINEKKEDGKVFWQNLAGYKRQEALRPYLSSEEDRKKGKKFARYQLGDLLLHLEKKHGEDWGKVYDEAWERIDKKVEGLSKHIKLEEERRSEDAQSKAALTDWLRAKASFVIEGLKEADKDEFCRCELKLQKWYGDLRGKPFAIEAENSILDISGFSKQYNCAFIWQKDGVKKLNLYLIINYFKGGKLRFKKIKPEAFEANRFYTVINKKSGEIVPMEVNFNFDDPNLIILPLAFGKRQGREFIWNDLLSLETGSLQLANGRVIEKTLYNRRTRQDEPALFVALTFERREVLDSSNIKPMNLIGVDRGENIPAVIALTDPEGCPLSRFKDSLGNPTHILRIGESYKEKQRTIQAKKEVEQRRAGGYSRKYASKAKNLADDMVRNTARDLLYYAVTQDAMLIFENLSRGFGRQGKRTFMAERQYTRMEDWLTAKLAYEGLPSKTYLSKTLAQYTSKTCSNCGFTITSADYDRVLEKLKKTATGWMTTINGKELKVEGQITYYNRYKRQNVVKDLSVELDRLSEESVNNDISSWTKGRSGEALSLLKKRFSHRPVQEKFVCLNCGFETHADEQAALNIARSWLFLRSQEYKKYQTNKTTGNTDKRAFVETWQSFYRKKLKEVWKPAV

SEQ ID NO: 36667 - protein, 979 aa, synthetic construct
  REGION 1..979: note = engineered CasX variant
QEIKRINKIRRRLVKDSNTKKAGKTGPMKTLLVRVMTPDLRERLENLRKKPENIPQPISNTSRANLNKLLTDYTEMKKAILHVYWEEFQKDPVGLMSRVAQPASKKIDQNKLKPEMDEKGNLTTAGFACSQCGQPLFVYKLEQVSEKGKAYTNYFGRCNVAEHEKLILLAQLKPEKDSDEAVTYSLGKFGQRALDFYSIHVTKESTHPVKPLAQIAGNRYASSPVGKALSDACMGTIASFLSKYQDIIIEHQKVVKGNQKRLESLRELAGKENLEYPSVTLPPQPHTKEGVDAYNEVIARVRMWVNLNLWQKLKLSRDDAKPLLRLKGFPSFPLVERQQANEVDWWDMVCNVKKLINEKKEDGKVFWQNLAGYKRQEALRPYLSSEEDRKKGKKFARYQLGDLLLHLEKKHGEDWGKVYDEAWERIDKKVEGLSKHIKLEEERRSEDAQSKAALTDWLRAKASFVIEGLKEADKDEFCRCELKLQKWYGDLRGKPFAIEAENSILDISGFSKQYNCAFIWQKDGVKKLNLYLIINYFKGGKLRFKKIKPEAFEANRFYTVINKKSGEIVPMEVNFNFDDPNLIILPLAFGKRQGREFIWNDLLSLETGSLQLANGRVIEKTLYNRRTRQDEPALFVALTFERREVLDSSNIKPMNLIGVDRGENIPAVIALTDPEGCPLSRFKDSLGNPTHILRIGESYKEKQRTIQAKKEVEQRRAGGYSRKYASKAKNLADDMVRNTARDLLYYAVTQDAMLIFENLSRGFGRQGKRTFMAERQYTRMEDWLTAKLAYEGLPSKTYLSKTLAQYTSKTCSNCGFTITSADYDRVLEKLKKTATGWMTTINGKELKVEGQITYYNRYKRQNVVKDLSVELDRLSEESVNNDISSWTKGRSGEALSLLKKRFSHRPVQEKFVCLNCGFETHADEQAALNIARSWLFLRSQEYKKYQTNKTTGNTDKRAFVETWQSFYRKKLKEVWKPAV

SEQ ID NO: 36668 - protein, 979 aa, synthetic construct
  REGION 1..979: note = engineered CasX variant
QEIKRINKIRRRLVKDSNTKKAGKTGPMKTLLVRVMTPDLRERLENLRKKPENIPQPISNTSRANLNKLLTDYTEMKKAILHVYWEEFQKDPVGLMSRVAQPASKKIDQNKLKPEMDEKGNLTTAGFACSQCGQPLFVYKLEQVSEKGKAYTNYFGRCNVAEHEKLILLAQLKPEKDSDEAVTYSLGKFGQRALDFYSIHVTKESTHPVKPLAQIAGNRYASTPVGKALSDACMGTIASFLSKYQDIIIEHQKVVKGNQKRLESLRELAGKENLEYPSVTLPPQPHTKEGVDAYNEVIARVRMWVNLNLWQKLKLSRDDAKPLLRLKGFPSFPLVERQQANEVDWWDMVCNVKKLINEKKEDGKVFWQNLAGYKRQEALRPYLSSEEDRKKGKKFARYQLGDLLLHLEKKHGEDWGKVYDEAWERIDKKVEGLSKHIKLEEERRSEDAQSKAALTDWLRAKASFVIEGLKEADKDEFCRCELKLQKWYGDLRGKPFAIEAENSILDISGFSKQYNCAFIWQKDGVKKLNLYLIINYFKGGKLRFKKIKPEAFEANRFYTVINKKSGEIVPMEVNFNFDDPNLIILPLAFGKRQGREFIWNDLLSLETGSLQLANGRVIEKTLYNRRTRQDEPALFVALTFERREVLDSSNIKPMNLIGVDRGENIPAVIALTDPEGCPLSRFKDSLGNPTHILRIGESYKEKQRTIQAKKEVEQRRAGGYSRKYASKAKNLADDMVRNTARDLLYYAVTQDAMLIFENLSRGFGRQGKRTFMAERQYTRMEDWLTAKLAYEGLPSKTYLSKTLAQYTSKTCSNCGFTITSADYDRVLEKLKKTATGWMTTINGKELKVEGQITYYNRYKRQNVVKDLSVELDRLSEESVNNDISSWTKGRSGEALSLLKKRFSHRPVQEKFVCLNCGFETHADEQAALNIARSWLFLRSQEYKKYQTNKTTGNTDKRAFVETWQSFYRKKLKEVWKPAV

SEQ ID NO: 36669 - protein, 979 aa, synthetic construct
  REGION 1..979: note = engineered CasX variant
QEIKRINKIRRRLVKDSNTKKAGKTGPMKTLLVRVMTPDLRERLENLRKKPENIPQPISNTSRANLNKLLTDYTEMKKAILHVYWEEFQKDPVGLMSRVAQPASKKIDQNKLKPEMDEKGNLTTAGFACSQCGQPLFVYKLEQVSEKGKAYTNYFGRCNVAEHEKLILLAQLKPEKDSDEAVTYSLGKFGQRALDFYSIHVTKESTHPVKPLAQIAGNRYASAPVGKALSDACMGTIASFLSKYQDIIIEHQKVVKGNQKRLESLRELAGKENLEYPSVTLPPQPHTKEGVDAYNEVIARVRMWVNLNLWQKLKLSRDDAKPLLRLKGFPSFPLVERQQANEVDWWDMVCNVKKLINEKKEDGKVFWQNLAGYKRQEALRPYLSSEEDRKKGKKFARYQLGDLLLHLEKKHGEDWGKVYDEAWERIDKKVEGLSKHIKLEEERRSEDAQSKAALTDWLRAKASFVIEGLKEADKDEFCRCELKLQKWYGDLRGKPFAIEAENSILDISGFSKQYNCAFIWQKDGVKKLNLYLIINYFKGGKLRFKKIKPEAFEANRFYTVINKKSGEIVPMEVNFNFDDPNLIILPLAFGKRQGREFIWNDLLSLETGSLQLANGRVIEKTLYNRRTRQDEPALFVALTFERREVLDSSNIKPMNLIGVDRGENIPAVIALTDPEGCPLSRFKDSLGNPTHILRIGESYKEKQRTIQAKKEVEQRRAGGYSRKYASKAKNLADDMVRNTARDLLYYAVTQDAMLIFENLSRGFGRQGKRTFMAERQYTRMEDWLTAKLAYEGLPSKTYLSKTLAQYTSKTCSNCGFTITSADYDRVLEKLKKTATGWMTTINGKELKVEGQITYYNRYKRQNVVKDLSVELDRLSEESVNNDISSWTKGRSGEALSLLKKRFSHRPVQEKFVCLNCGFETHADEQAALNIARSWLFLRSQEYKKYQTNKTTGNTDKRAFVETWQSFYRKKLKEVWKPAV

SEQ ID NO: 36670 - protein, 979 aa, synthetic construct
  REGION 1..979: note = engineered CasX variant
QEIKRINKIRRRLVKDSNTKKAGKTGPMKTLLVRVMTPDLRERLENLRKKPENIPQPISNTSRANLNKLLTDYTEMKKAILHVYWEEFQKDPVGLMSRVAQPASKKIDQNKLKPEMDEKGNLTTAGFACSQCGQPLFVYKLEQVSEKGKAYTNYFGRCNVAEHEKLILLAQLKPEKDSDEAVTYSLGKFGQRALDFYSIHVTKESTHPVKPLAQIAGNRYASVPVGKALSDACMGTIASFLSKYQDIIIEHQKVVKGNQKRLESLRELAGKENLEYPSVTLPPQPHTKEGVDAYNEVIARVRMWVNLNLWQKLKLSRDDAKPLLRLKGFPSFPLVERQQANEVDWWDMVCNVKKLINEKKEDGKVFWQNLAGYKRQEALRPYLSSEEDRKKGKKFARYQLGDLLLHLEKKHGEDWGKVYDEAWERIDKKVEGLSKHIKLEEERRSEDAQSKAALTDWLRAKASFVIEGLKEADKDEFCRCELKLQKWYGDLRGKPFAIEAENSILDISGFSKQYNCAFIWQKDGVKKLNLYLIINYFKGGKLRFKKIKPEAFEANRFYTVINKKSGEIVPMEVNFNFDDPNLIILPLAFGKRQGREFIWNDLLSLETGSLQLANGRVIEKTLYNRRTRQDEPALFVALTFERREVLDSSNIKPMNLIGVDRGENIPAVIALTDPEGCPLSRFKDSLGNPTHILRIGESYKEKQRTIQAKKEVEQRRAGGYSRKYASKAKNLADDMVRNTARDLLYYAVTQDAMLIFENLSRGFGRQGKRTFMAERQYTRMEDWLTAKLAYEGLPSKTYLSKTLAQYTSKTCSNCGFTITSADYDRVLEKLKKTATGWMTTINGKELKVEGQITYYNRYKRQNVVKDLSVELDRLSEESVNNDISSWTKGRSGEALSLLKKRFSHRPVQEKFVCLNCGFETHADEQAALNIARSWLFLRSQEYKKYQTNKTTGNTDKRAFVETWQSFYRKKLKEVWKPAV

SEQ ID NO: 36671 - protein, 979 aa, synthetic construct
  REGION 1..979: note = engineered CasX variant
QEIKRINKIRRRLVKDSNTKKAGKTGPMKTLLVRVMTPDLRERLENLRKKPENIPQPISNTSRANLNKLLTDYTEMKKAILHVYWEEFQKDPVGLMSRVAQPASKKIDQNKLKPEMDEKGNLTTAGFACSQCGQPLFVYKLEQVSEKGKAYTNYFGRCNVAEHEKLIKLAQLKPEKDSDEAVTYSLGKFGQRALDFYSIHVTKESTHPVKPLAQIAGNRYASGPVGKALSDACMGTIASFLSKYQDIIIEHQKVVKGNQKRLESLRELAGKENLEYPSVTLPPQPHTKEGVDAYNEVIARVRMWVNLNLWQKLKLSRDDAKPLLRLKGFPSFPLVERQQANEVDWWDMVCNVKKLINEKKEDGKVFWQNLAGYKRQEALRPYLSSEEDRKKGKKFARYQLGDLLLHLEKKHGEDWGKVYDEAWERIDKKVEGLSKHIKLEEERRSEDAQSKAALTDWLRAKASFVIEGLKEADKDEFCRCELKLQKWYGDLRGKPFAIEAENSILDISGFSKQYNCAFIWQKDGVKKLNLYLIINYFKGGKLRFKKIKPEAFEANRFYTVINKKSGEIVPMEVNFNFDDPNLIILPLAFGKRQGREFIWNDLLSLETGSLQLANGRVIEKTLYNRRTRQDEPALFVALTFERREVLDSSNIKPMNLIGVDRGENIPAVIALTDPEGCPLSRFKDSLGNPTHILRIGESYKEKQRTIQAKKEVEQRRAGGYSRKYASKAKNLADDMVRNTARDLLYYAVTQDAMLIFENLSRGFGRQGKRTFMAERQYTRMEDWLTAKLAYEGLPSKTYLSKTLAQYTSKTCSNCGFTITSADYDRVLEKLKKTATGWMTTINGKELKVEGQITYYNRYKRQNVVKDLSVELDRLSEESVNNDISSWTKGRSGEALSLLKKRFSHRPVQEKFVCLNCGFETHADEQAALNIARSWLFLRSQEYKKYQTNKTTGNTDKRAFVETWQSFYRKKLKEVWKPAV

SEQ ID NO: 36672 - protein, 978 aa, synthetic construct
  REGION 1..978: note = engineered CasX variant
QEIKRINKIRRRLVKDSNTKKAGKTGPMKTLLVRVMTPDLRERLENLRKKPENIPQPISNTSRANLNKLLTDYTEMKKAILHVYWEEFQKDPVGLMSRVAQPASKKIDQNKLKPEMDEKGNLTTAGFACSQCGQPLFVYKLEQVSEKGKAYTNYFGRCNVAEHEKLILLAQLKPEKDSDEAVTYSLGKFGQRALDFYSIHVTKESTHPVKPLAQIAGNRYASPVGKALSDACMGTIASFLSKYQDIIIEHQKVVKGNQKRLESLRELAGKENLEYPSVTLPPQPHTKEGVDAYNEVIARVRMWVNLNLWQKLKLSRDDAKPLLRLKGFPSFPLVERQQANEVDWWDMVCNVKKLINEKKEDGKVFWQNLAGYKRQEALRPYLSSEEDRKKGKKFARYQLGDLLLHLEKKHGEDWGKVYDEAWERIDKKVEGLSKHIKLEEERRSEDAQSKAALTDWLRAKASFVIEGLKEADKDEFCRCELKLQKWYGDLRGKPFAIEAENSILDISGFSKQYNCAFIWQKDGVKKLNLYLIINYFKGGKLRFKKIKPEAFEANRFYTVINKKSGEIVPMEVNFNFDDPNLIILPLAFGKRQGREFIWNDLLSLETGSLQLANGRVIEKTLYNRRTRQDEPALFVALTFERREVLDSSNIKPMNLIGVDRGENIPAVIALTDPEGCPLSRFKDSLGNPTHILRIGESYKEKQRTIQAKKEVEQRRAGGYSRKYASKAKNLADDMVRNTARDLLYYAVTQDAMLIFENLSRGFGRQGKRTFMAERQYTRMEDWLTAKLAYEGLPSKTYLSKTLAQYTSKTCSNCGFTITSADYDRVLEKLKKTATGWMTTINGKELKVEGQITYYNRYKRQNVVKDLSVELDRLSEESVNNDISSWTKGRSGEALSLLKKRFSHRPVQEKFVCLNCGFETHADEQAALNIARSWLFLRSQEYKKYQTNKTTGNTDKRAFVETWQSFYRKKLKEVWKPAV

SEQ ID NO: 36673 - protein, 979 aa, synthetic construct
  REGION 1..979: note = engineered CasX variant
QEIKRINKIRRRLVKDSNTKKAGKTGPMKTLLVRVMTPDLRERLENLRKKPENIPQPISNTSRANLNKLLTDYTEMKKAILHVYWEEFQKDPVGLMSRVAQPASKKIDQNKLKPEMDEKGNLTTAGFACSQCGQPLFVYKLEQVSEKGKAYTNYFGRCNVAEHEKLILLAQLKPEKDSDEAVTYSLGKFGQRALDFYSIHVTKESTHPVKPLAQIAGNRYASYPVGKALSDACMGTIASFLSKYQDIIIEHQKVVKGNQKRLESLRELAGKENLEYPSVTLPPQPHTKEGVDAYNEVIARVRMWVNLNLWQKLKLSRDDAKPLLRLKGFPSFPLVERQANAEVDWWDMVCNVKKLINEKKEDGKVFWQNLAGYKRQEALRPYLSSEEDRKKGKKFARTQLGDLLLHLEKKHGEDWGKVYDEAWERIDKKVEGLSKHIKLEEERRSEDAQSKAALTDWLRAKASFVIEGLKEADKDEFCRCELKLQKWYGDLRGKPFAIEAENSILDISGFSKQYNCAFIWQKDGVKKLNLYLIINYFKGGKLRFKKIKPEAFEANRFYTVINKKSGEIVPMEVNFNFDDPNLIILPLAFGKRQGREFIWNDLLSLETGSLKLANGRVIEKTLYNRRTRQDEPALFVALTFERREVLDSSNIKPMNLIGVDRGENIPAVIALTDPEGCPLSRFKDSLGNPTHILRIGESYKEKQRTIQAKKEVEQRRAGGYSRKYASKAKNLADDMVRNTARDLLYYAVTQDAMLIFENLSRGFGRQGKRTFMAERQYTRMEDWLTAKLAYEGLPSKTYLSKTLAQYTSKTCSNCGFTITSADYDRVLEKLKKTATGWMTTINGKELKVEGQITYYNRYKRQNVVKDLSVELDRLSEESVNNDISSWTKGRSGEALSLLKKRFSHRPVQEKFVCLNCGFETHADEQAALNIARSWLFLRSQEYKKYQTNKTTGNTDKRAFVETWQSFYRKKLKEVWKPAV

SEQ ID NO: 36674 - protein, 979 aa, synthetic construct
  REGION 1..979: note = engineered CasX variant
QEIKRINKIRRRLVKDSNTKKAGKTGPMKTLLVRVMTPDLRERLENLRKKPENIPQPISNTSRANLNKLLTDYTEMKKAILHVYWEEFQKDPVGLMSRVAQPASKKIDQNKLKPEMDEKGNLTTAGFACSQCGQPLFVYKLEQVSEKGKAYTNYFGRCNVAEHEKLILLAQLKPEKDSDEAVTYSLGKFGQRALDFYSIHVTKESTHPVKPLAQIAGNRYASHPVGKALSDACMGTIASFLSKYQDIIIEHQKVVKGNQKRLESLRELAGKENLEYPSVTLPPQPHTKEGVDAYNEVIARVRMWVNLNLWQKLKLSRDDAKPLLRLKGFPSFPLVERQANAEVDWWDMVCNVKKLINEKKEDGKVFWQNLAGYKRQEALRPYLSSEEDRKKGKKFARTQLGDLLLHLEKKHGEDWGKVYDEAWERIDKKVEGLSKHIKLEEERRSEDAQSKAALTDWLRAKASFVIEGLKEADKDEFCRCELKLQKWYGDLRGKPFAIEAENSILDISGFSKQYNCAFIWQKDGVKKLNLYLIINYFKGGKLRFKKIKPEAFEANRFYTVINKKSGEIVPMEVNFNFDDPNLIILPLAFGKRQGREFIWNDLLSLETGSLKLANGRVIEKTLYNRRTRQDEPALFVALTFERREVLDSSNIKPMNLIGVDRGENIPAVIALTDPEGCPLSRFKDSLGNPTHILRIGESYKEKQRTIQAKKEVEQRRAGGYSRKYASKAKNLADDMVRNTARDLLYYAVTQDAMLIFENLSRGFGRQGKRTFMAERQYTRMEDWLTAKLAYEGLPSKTYLSKTLAQYTSKTCSNCGFTITSADYDRVLEKLKKTATGWMTTINGKELKVEGQITYYNRYKRQNVVKDLSVELDRLSEESVNNDISSWTKGRSGEALSLLKKRFSHRPVQEKFVCLNCGFETHADEQAALNIARSWLFLRSQEYKKYQTNKTTGNTDKRAFVETWQSFYRKKLKEVWKPAV

SEQ ID NO: 36675 - protein, 979 aa, synthetic construct
  REGION 1..979: note = engineered CasX variant
QEIKRINKIRRRLVKDSNTKKAGKTGPMKTLLVRVMTPDLRERLENLRKKPENIPQPISNTSRANLNKLLTDYTEMKKAILHVYWEEFQKDPVGLMSRVAQPASKKIDQNKLKPEMDEKGNLTTAGFACSQCGQPLFVYKLEQVSEKGKAYTNYFGRCNVAEHEKLILLAQLKPEKDSDEAVTYSLGKFGQRALDFYSIHVTKESTHPVKPLAQIAGNRYASSPVGKALSDACMGTIASFLSKYQDIIIEHQKVVKGNQKRLESLRELAGKENLEYPSVTLPPQPHTKEGVDAYNEVIARVRMWVNLNLWQKLKLSRDDAKPLLRLKGFPSFPLVERQANAEVDWWDMVCNVKKLINEKKEDGKVFWQNLAGYKRQEALRPYLSSEEDRKKGKKFARTQLGDLLLHLEKKHGEDWGKVYDEAWERIDKKVEGLSKHIKLEEERRSEDAQSKAALTDWLRAKASFVIEGLKEADKDEFCRCELKLQKWYGDLRGKPFAIEAENSILDISGFSKQYNCAFIWQKDGVKKLNLYLIINYFKGGKLRFKKIKPEAFEANRFYTVINKKSGEIVPMEVNFNFDDPNLIILPLAFGKRQGREFIWNDLLSLETGSLKLANGRVIEKTLYNRRTRQDEPALFVALTFERREVLDSSNIKPMNLIGVDRGENIPAVIALTDPEGCPLSRFKDSLGNPTHILRIGESYKEKQRTIQAKKEVEQRRAGGYSRKYASKAKNLADDMVRNTARDLLYYAVTQDAMLIFENLSRGFGRQGKRTFMAERQYTRMEDWLTAKLAYEGLPSKTYLSKTLAQYTSKTCSNCGFTITSADYDRVLEKLKKTATGWMTTINGKELKVEGQITYYNRYKRQNVVKDLSVELDRLSEESVNNDISSWTKGRSGEALSLLKKRFSHRPVQEKFVCLNCGFETHADEQAALNIARSWLFLRSQEYKKYQTNKTTGNTDKRAFVETWQSFYRKKLKEVWKPAV

SEQ ID NO: 36676 - protein, 979 aa, synthetic construct
  REGION 1..979: note = engineered CasX variant
QEIKRINKIRRRLVKDSNTKKAGKTGPMKTLLVRVMTPDLRERLENLRKKPENIPQPISNTSRANLNKLLTDYTEMKKAILHVYWEEFQKDPVGLMSRVAQPASKKIDQNKLKPEMDEKGNLTTAGFACSQCGQPLFVYKLEQVSEKGKAYTNYFGRCNVAEHEKLILLAQLKPEKDSDEAVTYSLGKFGQRALDFYSIHVTKESTHPVKPLAQIAGNRYASTPVGKALSDACMGTIASFLSKYQDIIIEHQKVVKGNQKRLESLRELAGKENLEYPSVTLPPQPHTKEGVDAYNEVIARVRMWVNLNLWQKLKLSRDDAKPLLRLKGFPSFPLVERQANAEVDWWDMVCNVKKLINEKKEDGKVFWQNLAGYKRQEALRPYLSSEEDRKKGKKFARTQLGDLLLHLEKKHGEDWGKVYDEAWERIDKKVEGLSKHIKLEEERRSEDAQSKAALTDWLRAKASFVIEGLKEADKDEFCRCELKLQKWYGDLRGKPFAIEAENSILDISGFSKQYNCAFIWQKDGVKKLNLYLIINYFKGGKLRFKKIKPEAFEANRFYTVINKKSGEIVPMEVNFNFDDPNLIILPLAFGKRQGREFIWNDLLSLETGSLKLANGRVIEKTLYNRRTRQDEPALFVALTFERREVLDSSNIKPMNLIGVDRGENIPAVIALTDPEGCPLSRFKDSLGNPTHILRIGESYKEKQRTIQAKKEVEQRRAGGYSRKYASKAKNLADDMVRNTARDLLYYAVTQDAMLIFENLSRGFGRQGKRTFMAERQYTRMEDWLTAKLAYEGLPSKTYLSKTLAQYTSKTCSNCGFTITSADYDRVLEKLKKTATGWMTTINGKELKVEGQITYYNRYKRQNVVKDLSVELDRLSEESVNNDISSWTKGRSGEALSLLKKRFSHRPVQEKFVCLNCGFETHADEQAALNIARSWLFLRSQEYKKYQTNKTTGNTDKRAFVETWQSFYRKKLKEVWKPAV

SEQ ID NO: 36677 - protein, 979 aa, synthetic construct
  REGION 1..979: note = engineered CasX variant
QEIKRINKIRRRLVKDSNTKKAGKTGPMKTLLVRVMTPDLRERLENLRKKPENIPQPISNTSRANLNKLLTDYTEMKKAILHVYWEEFQKDPVGLMSRVAQPASKKIDQNKLKPEMDEKGNLTTAGFACSQCGQPLFVYKLEQVSEKGKAYTNYFGRCNVAEHEKLILLAQLKPEKDSDEAVTYSLGKFGQRALDFYSIHVTKESTHPVKPLAQIAGNRYASAPVGKALSDACMGTIASFLSKYQDIIIEHQKVVKGNQKRLESLRELAGKENLEYPSVTLPPQPHTKEGVDAYNEVIARVRMWVNLNLWQKLKLSRDDAKPLLRLKGFPSFPLVERQANAEVDWWDMVCNVKKLINEKKEDGKVFWQNLAGYKRQEALRPYLSSEEDRKKGKKFARTQLGDLLLHLEKKHGEDWGKVYDEAWERIDKKVEGLSKHIKLEEERRSEDAQSKAALTDWLRAKASFVIEGLKEADKDEFCRCELKLQKWYGDLRGKPFAIEAENSILDISGFSKQYNCAFIWQKDGVKKLNLYLIINYFKGGKLRFKKIKPEAFEANRFYTVINKKSGEIVPMEVNFNFDDPNLIILPLAFGKRQGREFIWNDLLSLETGSLKLANGRVIEKTLYNRRTRQDEPALFVALTFERREVLDSSNIKPMNLIGVDRGENIPAVIALTDPEGCPLSRFKDSLGNPTHILRIGESYKEKQRTIQAKKEVEQRRAGGYSRKYASKAKNLADDMVRNTARDLLYYAVTQDAMLIFENLSRGFGRQGKRTFMAERQYTRMEDWLTAKLAYEGLPSKTYLSKTLAQYTSKTCSNCGFTITSADYDRVLEKLKKTATGWMTTINGKELKVEGQITYYNRYKRQNVVKDLSVELDRLSEESVNNDISSWTKGRSGEALSLLKKRFSHRPVQEKFVCLNCGFETHADEQAALNIARSWLFLRSQEYKKYQTNKTTGNTDKRAFVETWQSFYRKKLKEVWKPAV

SEQ ID NO: 36678 - protein, 979 aa, synthetic construct
  REGION 1..979: note = engineered CasX variant
QEIKRINKIRRRLVKDSNTKKAGKTGPMKTLLVRVMTPDLRERLENLRKKPENIPQPISNTSRANLNKLLTDYTEMKKAILHVYWEEFQKDPVGLMSRVAQPASKKIDQNKLKPEMDEKGNLTTAGFACSQCGQPLFVYKLEQVSEKGKAYTNYFGRCNVAEHEKLILLAQLKPEKDSDEAVTYSLGKFGQRALDFYSIHVTKESTHPVKPLAQIAGNRYASVPVGKALSDACMGTIASFLSKYQDIIIEHQKVVKGNQKRLESLRELAGKENLEYPSVTLPPQPHTKEGVDAYNEVIARVRMWVNLNLWQKLKLSRDDAKPLLRLKGFPSFPLVERQANAEVDWWDMVCNVKKLINEKKEDGKVFWQNLAGYKRQEALRPYLSSEEDRKKGKKFARTQLGDLLLHLEKKHGEDWGKVYDEAWERIDKKVEGLSKHIKLEEERRSEDAQSKAALTDWLRAKASFVIEGLKEADKDEFCRCELKLQKWYGDLRGKPFAIEAENSILDISGFSKQYNCAFIWQKDGVKKLNLYLIINYFKGGKLRFKKIKPEAFEANRFYTVINKKSGEIVPMEVNFNFDDPNLIILPLAFGKRQGREFIWNDLLSLETGSLKLANGRVIEKTLYNRRTRQDEPALFVALTFERREVLDSSNIKPMNLIGVDRGENIPAVIALTDPEGCPLSRFKDSLGNPTHILRIGESYKEKQRTIQAKKEVEQRRAGGYSRKYASKAKNLADDMVRNTARDLLYYAVTQDAMLIFENLSRGFGRQGKRTFMAERQYTRMEDWLTAKLAYEGLPSKTYLSKTLAQYTSKTCSNCGFTITSADYDRVLEKLKKTATGWMTTINGKELKVEGQITYYNRYKRQNVVKDLSVELDRLSEESVNNDISSWTKGRSGEALSLLKKRFSHRPVQEKFVCLNCGFETHADEQAALNIARSWLFLRSQEYKKYQTNKTTGNTDKRAFVETWQSFYRKKLKEVWKPAV

SEQ ID NO: 36679 - protein, 979 aa, synthetic construct
  REGION 1..979: note = engineered CasX variant
QEIKRINKIRRRLVKDSNTKKAGKTGPMKTLLVRVMTPDLRERLENLRKKPENIPQPISNTSRANLNKLLTDYTEMKKAILHVYWEEFQKDPVGLMSRVAQPASKKIDQNKLKPEMDEKGNLTTAGFACSQCGQPLFVYKLEQVSEKGKAYTNYFGRCNVAEHEKLIKLAQLKPEKDSDEAVTYSLGKFGQRALDFYSIHVTKESTHPVKPLAQIAGNRYASGPVGKALSDACMGTIASFLSKYQDIIIEHQKVVKGNQKRLESLRELAGKENLEYPSVTLPPQPHTKEGVDAYNEVIARVRMWVNLNLWQKLKLSRDDAKPLLRLKGFPSFPLVERQANAEVDWWDMVCNVKKLINEKKEDGKVFWQNLAGYKRQEALRPYLSSEEDRKKGKKFARTQLGDLLLHLEKKHGEDWGKVYDEAWERIDKKVEGLSKHIKLEEERRSEDAQSKAALTDWLRAKASFVIEGLKEADKDEFCRCELKLQKWYGDLRGKPFAIEAENSILDISGFSKQYNCAFIWQKDGVKKLNLYLIINYFKGGKLRFKKIKPEAFEANRFYTVINKKSGEIVPMEVNFNFDDPNLIILPLAFGKRQGREFIWNDLLSLETGSLKLANGRVIEKTLYNRRTRQDEPALFVALTFERREVLDSSNIKPMNLIGVDRGENIPAVIALTDPEGCPLSRFKDSLGNPTHILRIGESYKEKQRTIQAKKEVEQRRAGGYSRKYASKAKNLADDMVRNTARDLLYYAVTQDAMLIFENLSRGFGRQGKRTFMAERQYTRMEDWLTAKLAYEGLPSKTYLSKTLAQYTSKTCSNCGFTITSADYDRVLEKLKKTATGWMTTINGKELKVEGQITYYNRYKRQNVVKDLSVELDRLSEESVNNDISSWTKGRSGEALSLLKKRFSHRPVQEKFVCLNCGFETHADEQAALNIARSWLFLRSQEYKKYQTNKTTGNTDKRAFVETWQSFYRKKLKEVWKPAV

SEQ ID NO: 36680 - protein, 978 aa, synthetic construct
  REGION 1..978: note = engineered CasX variant
QEIKRINKIRRRLVKDSNTKKAGKTGPMKTLLVRVMTPDLRERLENLRKKPENIPQPISNTSRANLNKLLTDYTEMKKAILHVYWEEFQKDPVGLMSRVAQPASKKIDQNKLKPEMDEKGNLTTAGFACSQCGQPLFVYKLEQVSEKGKAYTNYFGRCNVAEHEKLILLAQLKPEKDSDEAVTYSLGKFGQRALDFYSIHVTKESTHPVKPLAQIAGNRYASPVGKALSDACMGTIASFLSKYQDIIIEHQKVVKGNQKRLESLRELAGKENLEYPSVTLPPQPHTKEGVDAYNEVIARVRMWVNLNLWQKLKLSRDDAKPLLRLKGFPSFPLVERQANAEVDWWDMVCNVKKLINEKKEDGKVFWQNLAGYKRQEALRPYLSSEEDRKKGKKFARTQLGDLLLHLEKKHGEDWGKVYDEAWERIDKKVEGLSKHIKLEEERRSEDAQSKAALTDWLRAKASFVIEGLKEADKDEFCRCELKLQKWYGDLRGKPFAIEAENSILDISGFSKQYNCAFIWQKDGVKKLNLYLIINYFKGGKLRFKKIKPEAFEANRFYTVINKKSGEIVPMEVNFNFDDPNLIILPLAFGKRQGREFIWNDLLSLETGSLKLANGRVIEKTLYNRRTRQDEPALFVALTFERREVLDSSNIKPMNLIGVDRGENIPAVIALTDPEGCPLSRFKDSLGNPTHILRIGESYKEKQRTIQAKKEVEQRRAGGYSRKYASKAKNLADDMVRNTARDLLYYAVTQDAMLIFENLSRGFGRQGKRTFMAERQYTRMEDWLTAKLAYEGLPSKTYLSKTLAQYTSKTCSNCGFTITSADYDRVLEKLKKTATGWMTTINGKELKVEGQITYYNRYKRQNVVKDLSVELDRLSEESVNNDISSWTKGRSGEALSLLKKRFSHRPVQEKFVCLNCGFETHADEQAALNIARSWLFLRSQEYKKYQTNKTTGNTDKRAFVETWQSFYRKKLKEVWKPAV

SEQ ID NO: 36681 - protein, 980 aa, synthetic construct
  REGION 1..980: note = engineered CasX variant
QEIKRINKIRRRLVKDSNTKKAGKTGPMKTLLVRVMTPDLRERLENLRKKPENIPQPISNTSRANLNKLLTDYTEMKKAILHVYWEEFQKDPVGLMSRVAQPASKKIDQNKLKPEMDEKGNLTTAGFACSQCGQPLFVYKLEQVSEKGKAYTNYFGRCNVAEHEKLILLAQLKPEKDSDEAVTYSLGKFGQRALDFYSIHVTKESTHPVKPLAQIAGNRYASYPVGKALSDACMGTIASFLSKYQDIIIEHQKVVKGNQKRLESLRELAGKENLEYPSVTLPPQPHTKEGVDAYNEVIARVRMWVNLNLWQKLKLSRDDAKPLLRLKGFPSFPLVERQANAEVDWWDMVCNVKKLINEKKEDGKVFWQNLAGYKRQEALRPYLSSEEDRKKGKKFARYQLGDLLLHLEKKHEGEDWGKVYDEAWERIDKKVEGLSKHIKLEEERRSEDAQSKAALTDWLRAKASFVIEGLKEADKDEFCRCELKLQKWYGDLRGKPFAIEAENSILDISGFSKQYNCAFIWQKDGVKKLNLYLIINYFKGGKLRFKKIKPEAFEANRFYTVINKKSGEIVPMEVNFNFDDPNLIILPLAFGKRQGREFIWNDLLSLETGSLKLANGRVIEKTLYNRRTRQDEPALFVALTFERREVLDSSNIKPMNLIGVDRGENIPAVIALTDPEGCPLSRFKDSLGNPTHILRIGESYKEKQRTIQAKKEVEQRRAGGYSRKYASKAKNLADDMVRNTARDLLYYAVTQDAMLIFENLSRGFGRQGKRTFMAERQYTRMEDWLTAKLAYEGLPSKTYLSKTLAQYTSKTCSNCGFTITSADYDRVLEKLKKTATGWMTTINGKELKVEGQITYYNRYKRQNVVKDLSVELDRLSEESVNNDISSWTKGRSGEALSLLKKRFSHRPVQEKFVCLNCGFETHADEQAALNIARSWLFLRSQEYKKYQTNKTTGNTDKRAFVETWQSFYRKKLKEVWKPAV

SEQ ID NO: 36682 - protein, 980 aa, synthetic construct
  REGION 1..980: note = engineered CasX variant
QEIKRINKIRRRLVKDSNTKKAGKTGPMKTLLVRVMTPDLRERLENLRKKPENIPQPISNTSRANLNKLLTDYTEMKKAILHVYWEEFQKDPVGLMSRVAQPASKKIDQNKLKPEMDEKGNLTTAGFACSQCGQPLFVYKLEQVSEKGKAYTNYFGRCNVAEHEKLILLAQLKPEKDSDEAVTYSLGKFGQRALDFYSIHVTKESTHPVKPLAQIAGNRYASHPVGKALSDACMGTIASFLSKYQDIIIEHQKVVKGNQKRLESLRELAGKENLEYPSVTLPPQPHTKEGVDAYNEVIARVRMWVNLNLWQKLKLSRDDAKPLLRLKGFPSFPLVERQANAEVDWWDMVCNVKKLINEKKEDGKVFWQNLAGYKRQEALRPYLSSEEDRKKGKKFARYQLGDLLLHLEKKHEGEDWGKVYDEAWERIDKKVEGLSKHIKLEEERRSEDAQSKAALTDWLRAKASFVIEGLKEADKDEFCRCELKLQKWYGDLRGKPFAIEAENSILDISGFSKQYNCAFIWQKDGVKKLNLYLIINYFKGGKLRFKKIKPEAFEANRFYTVINKKSGEIVPMEVNFNFDDPNLIILPLAFGKRQGREFIWNDLLSLETGSLKLANGRVIEKTLYNRRTRQDEPALFVALTFERREVLDSSNIKPMNLIGVDRGENIPAVIALTDPEGCPLSRFKDSLGNPTHILRIGESYKEKQRTIQAKKEVEQRRAGGYSRKYASKAKNLADDMVRNTARDLLYYAVTQDAMLIFENLSRGFGRQGKRTFMAERQYTRMEDWLTAKLAYEGLPSKTYLSKTLAQYTSKTCSNCGFTITSADYDRVLEKLKKTATGWMTTINGKELKVEGQITYYNRYKRQNVVKDLSVELDRLSEESVNNDISSWTKGRSGEALSLLKKRFSHRPVQEKFVCLNCGFETHADEQAALNIARSWLFLRSQEYKKYQTNKTTGNTDKRAFVETWQSFYRKKLKEVWKPAV

SEQ ID NO: 36683 - protein, 980 aa, synthetic construct
  REGION 1..980: note = engineered CasX variant
QEIKRINKIRRRLVKDSNTKKAGKTGPMKTLLVRVMTPDLRERLENLRKKPENIPQPISNTSRANLNKLLTDYTEMKKAILHVYWEEFQKDPVGLMSRVAQPASKKIDQNKLKPEMDEKGNLTTAGFACSQCGQPLFVYKLEQVSEKGKAYTNYFGRCNVAEHEKLILLAQLKPEKDSDEAVTYSLGKFGQRALDFYSIHVTKESTHPVKPLAQIAGNRYASSPVGKALSDACMGTIASFLSKYQDIIIEHQKVVKGNQKRLESLRELAGKENLEYPSVTLPPQPHTKEGVDAYNEVIARVRMWVNLNLWQKLKLSRDDAKPLLRLKGFPSFPLVERQANAEVDWWDMVCNVKKLINEKKEDGKVFWQNLAGYKRQEALRPYLSSEEDRKKGKKFARYQLGDLLLHLEKKHEGEDWGKVYDEAWERIDKKVEGLSKHIKLEEERRSEDAQSKAALTDWLRAKASFVIEGLKEADKDEFCRCELKLQKWYGDLRGKPFAIEAENSILDISGFSKQYNCAFIWQKDGVKKLNLYLIINYFKGGKLRFKKIKPEAFEANRFYTVINKKSGEIVPMEVNFNFDDPNLIILPLAFGKRQGREFIWNDLLSLETGSLKLANGRVIEKTLYNRRTRQDEPALFVALTFERREVLDSSNIKPMNLIGVDRGENIPAVIALTDPEGCPLSRFKDSLGNPTHILRIGESYKEKQRTIQAKKEVEQRRAGGYSRKYASKAKNLADDMVRNTARDLLYYAVTQDAMLIFENLSRGFGRQGKRTFMAERQYTRMEDWLTAKLAYEGLPSKTYLSKTLAQYTSKTCSNCGFTITSADYDRVLEKLKKTATGWMTTINGKELKVEGQITYYNRYKRQNVVKDLSVELDRLSEESVNNDISSWTKGRSGEALSLLKKRFSHRPVQEKFVCLNCGFETHADEQAALNIARSWLFLRSQEYKKYQTNKTTGNTDKRAFVETWQSFYRKKLKEVWKPAV

SEQ ID NO: 36684 - protein, 980 aa, synthetic construct
  REGION 1..980: note = engineered CasX variant
QEIKRINKIRRRLVKDSNTKKAGKTGPMKTLLVRVMTPDLRERLENLRKKPENIPQPISNTSRANLNKLLTDYTEMKKAILHVYWEEFQKDPVGLMSRVAQPASKKIDQNKLKPEMDEKGNLTTAGFACSQCGQPLFVYKLEQVSEKGKAYTNYFGRCNVAEHEKLILLAQLKPEKDSDEAVTYSLGKFGQRALDFYSIHVTKESTHPVKPLAQIAGNRYASTPVGKALSDACMGTIASFLSKYQDIIIEHQKVVKGNQKRLESLRELAGKENLEYPSVTLPPQPHTKEGVDAYNEVIARVRMWVNLNLWQKLKLSRDDAKPLLRLKGFPSFPLVERQANAEVDWWDMVCNVKKLINEKKEDGKVFWQNLAGYKRQEALRPYLSSEEDRKKGKKFARYQLGDLLLHLEKKHEGEDWGKVYDEAWERIDKKVEGLSKHIKLEEERRSEDAQSKAALTDWLRAKASFVIEGLKEADKDEFCRCELKLQKWYGDLRGKPFAIEAENSILDISGFSKQYNCAFIWQKDGVKKLNLYLIINYFKGGKLRFKKIKPEAFEANRFYTVINKKSGEIVPMEVNFNFDDPNLIILPLAFGKRQGREFIWNDLLSLETGSLKLANGRVIEKTLYNRRTRQDEPALFVALTFERREVLDSSNIKPMNLIGVDRGENIPAVIALTDPEGCPLSRFKDSLGNPTHILRIGESYKEKQRTIQAKKEVEQRRAGGYSRKYASKAKNLADDMVRNTARDLLYYAVTQDAMLIFENLSRGFGRQGKRTFMAERQYTRMEDWLTAKLAYEGLPSKTYLSKTLAQYTSKTCSNCGFTITSADYDRVLEKLKKTATGWMTTINGKELKVEGQITYYNRYKRQNVVKDLSVELDRLSEESVNNDISSWTKGRSGEALSLLKKRFSHRPVQEKFVCLNCGFETHADEQAALNIARSWLFLRSQEYKKYQTNKTTGNTDKRAFVETWQSFYRKKLKEVWKPAV

SEQ ID NO: 36685 - protein, 980 aa, synthetic construct
  REGION 1..980: note = engineered CasX variant
QEIKRINKIRRRLVKDSNTKKAGKTGPMKTLLVRVMTPDLRERLENLRKKPENIPQPISNTSRANLNKLLTDYTEMKKAILHVYWEEFQKDPVGLMSRVAQPASKKIDQNKLKPEMDEKGNLTTAGFACSQCGQPLFVYKLEQVSEKGKAYTNYFGRCNVAEHEKLILLAQLKPEKDSDEAVTYSLGKFGQRALDFYSIHVTKESTHPVKPLAQIAGNRYASAPVGKALSDACMGTIASFLSKYQDIIIEHQKVVKGNQKRLESLRELAGKENLEYPSVTLPPQPHTKEGVDAYNEVIARVRMWVNLNLWQKLKLSRDDAKPLLRLKGFPSFPLVERQANAEVDWWDMVCNVKKLINEKKEDGKVFWQNLAGYKRQEALRPYLSSEEDRKKGKKFARYQLGDLLLHLEKKHEGEDWGKVYDEAWERIDKKVEGLSKHIKLEEERRSEDAQSKAALTDWLRAKASFVIEGLKEADKDEFCRCELKLQKWYGDLRGKPFAIEAENSILDISGFSKQYNCAFIWQKDGVKKLNLYLIINYFKGGKLRFKKIKPEAFEANRFYTVINKKSGEIVPMEVNFNFDDPNLIILPLAFGKRQGREFIWNDLLSLETGSLKLANGRVIEKTLYNRRTRQDEPALFVALTFERREVLDSSNIKPMNLIGVDRGENIPAVIALTDPEGCPLSRFKDSLGNPTHILRIGESYKEKQRTIQAKKEVEQRRAGGYSRKYASKAKNLADDMVRNTARDLLYYAVTQDAMLIFENLSRGFGRQGKRTFMAERQYTRMEDWLTAKLAYEGLPSKTYLSKTLAQYTSKTCSNCGFTITSADYDRVLEKLKKTATGWMTTINGKELKVEGQITYYNRYKRQNVVKDLSVELDRLSEESVNNDISSWTKGRSGEALSLLKKRFSHRPVQEKFVCLNCGFETHADEQAALNIARSWLFLRSQEYKKYQTNKTTGNTDKRAFVETWQSFYRKKLKEVWKPAV

SEQ ID NO: 36686 - protein, 980 aa, synthetic construct
  REGION 1..980: note = engineered CasX variant
QEIKRINKIRRRLVKDSNTKKAGKTGPMKTLLVRVMTPDLRERLENLRKKPENIPQPISNTSRANLNKLLTDYTEMKKAILHVYWEEFQKDPVGLMSRVAQPASKKIDQNKLKPEMDEKGNLTTAGFACSQCGQPLFVYKLEQVSEKGKAYTNYFGRCNVAEHEKLILLAQLKPEKDSDEAVTYSLGKFGQRALDFYSIHVTKESTHPVKPLAQIAGNRYASVPVGKALSDACMGTIASFLSKYQDIIIEHQKVVKGNQKRLESLRELAGKENLEYPSVTLPPQPHTKEGVDAYNEVIARVRMWVNLNLWQKLKLSRDDAKPLLRLKGFPSFPLVERQANAEVDWWDMVCNVKKLINEKKEDGKVFWQNLAGYKRQEALRPYLSSEEDRKKGKKFARYQLGDLLLHLEKKHEGEDWGKVYDEAWERIDKKVEGLSKHIKLEEERRSEDAQSKAALTDWLRAKASFVIEGLKEADKDEFCRCELKLQKWYGDLRGKPFAIEAENSILDISGFSKQYNCAFIWQKDGVKKLNLYLIINYFKGGKLRFKKIKPEAFEANRFYTVINKKSGEIVPMEVNFNFDDPNLIILPLAFGKRQGREFIWNDLLSLETGSLKLANGRVIEKTLYNRRTRQDEPALFVALTFERREVLDSSNIKPMNLIGVDRGENIPAVIALTDPEGCPLSRFKDSLGNPTHILRIGESYKEKQRTIQAKKEVEQRRAGGYSRKYASKAKNLADDMVRNTARDLLYYAVTQDAMLIFENLSRGFGRQGKRTFMAERQYTRMEDWLTAKLAYEGLPSKTYLSKTLAQYTSKTCSNCGFTITSADYDRVLEKLKKTATGWMTTINGKELKVEGQITYYNRYKRQNVVKDLSVELDRLSEESVNNDISSWTKGRSGEALSLLKKRFSHRPVQEKFVCLNCGFETHADEQAALNIARSWLFLRSQEYKKYQTNKTTGNTDKRAFVETWQSFYRKKLKEVWKPAV

SEQ ID NO: 36687 - protein, 980 aa, synthetic construct
  REGION 1..980: note = engineered CasX variant
QEIKRINKIRRRLVKDSNTKKAGKTGPMKTLLVRVMTPDLRERLENLRKKPENIPQPISNTSRANLNKLLTDYTEMKKAILHVYWEEFQKDPVGLMSRVAQPASKKIDQNKLKPEMDEKGNLTTAGFACSQCGQPLFVYKLEQVSEKGKAYTNYFGRCNVAEHEKLIKLAQLKPEKDSDEAVTYSLGKFGQRALDFYSIHVTKESTHPVKPLAQIAGNRYASGPVGKALSDACMGTIASFLSKYQDIIIEHQKVVKGNQKRLESLRELAGKENLEYPSVTLPPQPHTKEGVDAYNEVIARVRMWVNLNLWQKLKLSRDDAKPLLRLKGFPSFPLVERQANAEVDWWDMVCNVKKLINEKKEDGKVFWQNLAGYKRQEALRPYLSSEEDRKKGKKFARYQLGDLLLHLEKKHEGEDWGKVYDEAWERIDKKVEGLSKHIKLEEERRSEDAQSKAALTDWLRAKASFVIEGLKEADKDEFCRCELKLQKWYGDLRGKPFAIEAENSILDISGFSKQYNCAFIWQKDGVKKLNLYLIINYFKGGKLRFKKIKPEAFEANRFYTVINKKSGEIVPMEVNFNFDDPNLIILPLAFGKRQGREFIWNDLLSLETGSLKLANGRVIEKTLYNRRTRQDEPALFVALTFERREVLDSSNIKPMNLIGVDRGENIPAVIALTDPEGCPLSRFKDSLGNPTHILRIGESYKEKQRTIQAKKEVEQRRAGGYSRKYASKAKNLADDMVRNTARDLLYYAVTQDAMLIFENLSRGFGRQGKRTFMAERQYTRMEDWLTAKLAYEGLPSKTYLSKTLAQYTSKTCSNCGFTITSADYDRVLEKLKKTATGWMTTINGKELKVEGQITYYNRYKRQNVVKDLSVELDRLSEESVNNDISSWTKGRSGEALSLLKKRFSHRPVQEKFVCLNCGFETHADEQAALNIARSWLFLRSQEYKKYQTNKTTGNTDKRAFVETWQSFYRKKLKEVWKPAV

SEQ ID NO: 36688 - protein, 979 aa, synthetic construct
  REGION 1..979: note = engineered CasX variant
QEIKRINKIRRRLVKDSNTKKAGKTGPMKTLLVRVMTPDLRERLENLRKKPENIPQPISNTSRANLNKLLTDYTEMKKAILHVYWEEFQKDPVGLMSRVAQPASKKIDQNKLKPEMDEKGNLTTAGFACSQCGQPLFVYKLEQVSEKGKAYTNYFGRCNVAEHEKLILLAQLKPEKDSDEAVTYSLGKFGQRALDFYSIHVTKESTHPVKPLAQIAGNRYASPVGKALSDACMGTIASFLSKYQDIIIEHQKVVKGNQKRLESLRELAGKENLEYPSVTLPPQPHTKEGVDAYNEVIARVRMWVNLNLWQKLKLSRDDAKPLLRLKGFPSFPLVERQANAEVDWWDMVCNVKKLINEKKEDGKVFWQNLAGYKRQEALRPYLSSEEDRKKGKKFARYQLGDLLLHLEKKHEGEDWGKVYDEAWERIDKKVEGLSKHIKLEEERRSEDAQSKAALTDWLRAKASFVIEGLKEADKDEFCRCELKLQKWYGDLRGKPFAIEAENSILDISGFSKQYNCAFIWQKDGVKKLNLYLIINYFKGGKLRFKKIKPEAFEANRFYTVINKKSGEIVPMEVNFNFDDPNLIILPLAFGKRQGREFIWNDLLSLETGSLKLANGRVIEKTLYNRRTRQDEPALFVALTFERREVLDSSNIKPMNLIGVDRGENIPAVIALTDPEGCPLSRFKDSLGNPTHILRIGESYKEKQRTIQAKKEVEQRRAGGYSRKYASKAKNLADDMVRNTARDLLYYAVTQDAMLIFENLSRGFGRQGKRTFMAERQYTRMEDWLTAKLAYEGLPSKTYLSKTLAQYTSKTCSNCGFTITSADYDRVLEKLKKTATGWMTTINGKELKVEGQITYYNRYKRQNVVKDLSVELDRLSEESVNNDISSWTKGRSGEALSLLKKRFSHRPVQEKFVCLNCGFETHADEQAALNIARSWLFLRSQEYKKYQTNKTTGNTDKRAFVETWQSFYRKKLKEVWKPAV

SEQ ID NO: 36689 - protein, 979 aa, synthetic construct
  REGION 1..979: note = engineered CasX variant
QEIKRINKIRRRLVKDSNTKKAGKTGPMKTLLVRVMTPDLRERLENLRKKPENIPQPISNTSRANLNKLLTDYTEMKKAILHVYWEEFQKDPVGLMSRVAQPASKKIDQNKLKPEMDEKGNLTTAGFACSQCGQPLFVYKLEQVSEKGKAYTNYFGRCNVAEHEKLILLAQLKPEKDSDEAVTYSLGKFGQRALDFYSIHVTKESTHPVKPLAQIAGNRYASYPVGKALSDACMGTIASFLSKYQDIIIEHQKVVKGNQKRLESLRELAGKENLEYPSVTLPPQPHTKEGVDAYNEVIARVRMWVNLNLWQKLKLSRDDAKPLLRLKGFPSFPLVERQANAEVDWWDMVCNVKKLINEKKEDGKVFWQNLAGYKRQEALRPYLSSEEDRKKGKKFARYQLGDLLLHLEKKHGEDWGKVYDEAWERIDKKVEGLSKHIKLEEERRSEDAQSKAALTDWLRAKASFVIEGLKEADKDEFCRCDLKLQKWYGDLRGKPFAIEAENSILDISGFSKQYNCAFIWQKDGVKKLNLYLIINYFKGGKLRFKKIKPEAFEANRFYTVINKKSGEIVPMEVNFNFDDPNLIILPLAFGKRQGREFIWNDLLSLETGSLKLANGRVIEKTLYNRRTRQDEPALFVALTFERREVLDSSNIKPMNLIGVDRGENIPAVIALTDPEGCPLSRFKDSLGNPTHILRIGESYKEKQRTIQAKKEVEQRRAGGYSRKYASKAKNLADDMVRNTARDLLYYAVTQDAMLIFENLSRGFGRQGKRTFMAERQYTRMEDWLTAKLAYEGLPSKTYLSKTLAQYTSKTCSNCGFTITSADYDRVLEKLKKTATGWMTTINGKELKVEGQITYYNRYKRQNVVKDLSVELDRLSEESVNNDISSWTKGRSGEALSLLKKRFSHRPVQEKFVCLNCGFETHADEQAALNIARSWLFLRSQEYKKYQTNKTTGNTDKRAFVETWQSFYRKKLKEVWKPAV

SEQ ID NO: 36690 - protein, 979 aa, synthetic construct
  REGION 1..979: note = engineered CasX variant
QEIKRINKIRRRLVKDSNTKKAGKTGPMKTLLVRVMTPDLRERLENLRKKPENIPQPISNTSRANLNKLLTDYTEMKKAILHVYWEEFQKDPVGLMSRVAQPASKKIDQNKLKPEMDEKGNLTTAGFACSQCGQPLFVYKLEQVSEKGKAYTNYFGRCNVAEHEKLILLAQLKPEKDSDEAVTYSLGKFGQRALDFYSIHVTKESTHPVKPLAQIAGNRYASHPVGKALSDACMGTIASFLSKYQDIIIEHQKVVKGNQKRLESLRELAGKENLEYPSVTLPPQPHTKEGVDAYNEVIARVRMWVNLNLWQKLKLSRDDAKPLLRLKGFPSFPLVERQANAEVDWWDMVCNVKKLINEKKEDGKVFWQNLAGYKRQEALRPYLSSEEDRKKGKKFARYQLGDLLLHLEKKHGEDWGKVYDEAWERIDKKVEGLSKHIKLEEERRSEDAQSKAALTDWLRAKASFVIEGLKEADKDEFCRCDLKLQKWYGDLRGKPFAIEAENSILDISGFSKQYNCAFIWQKDGVKKLNLYLIINYFKGGKLRFKKIKPEAFEANRFYTVINKKSGEIVPMEVNFNFDDPNLIILPLAFGKRQGREFIWNDLLSLETGSLKLANGRVIEKTLYNRRTRQDEPALFVALTFERREVLDSSNIKPMNLIGVDRGENIPAVIALTDPEGCPLSRFKDSLGNPTHILRIGESYKEKQRTIQAKKEVEQRRAGGYSRKYASKAKNLADDMVRNTARDLLYYAVTQDAMLIFENLSRGFGRQGKRTFMAERQYTRMEDWLTAKLAYEGLPSKTYLSKTLAQYTSKTCSNCGFTITSADYDRVLEKLKKTATGWMTTINGKELKVEGQITYYNRYKRQNVVKDLSVELDRLSEESVNNDISSWTKGRSGEALSLLKKRFSHRPVQEKFVCLNCGFETHADEQAALNIARSWLFLRSQEYKKYQTNKTTGNTDKRAFVETWQSFYRKKLKEVWKPAV

SEQ ID NO: 36691 - protein, 979 aa, synthetic construct
  REGION 1..979: note = engineered CasX variant
QEIKRINKIRRRLVKDSNTKKAGKTGPMKTLLVRVMTPDLRERLENLRKKPENIPQPISNTSRANLNKLLTDYTEMKKAILHVYWEEFQKDPVGLMSRVAQPASKKIDQNKLKPEMDEKGNLTTAGFACSQCGQPLFVYKLEQVSEKGKAYTNYFGRCNVAEHEKLILLAQLKPEKDSDEAVTYSLGKFGQRALDFYSIHVTKESTHPVKPLAQIAGNRYASSPVGKALSDACMGTIASFLSKYQDIIIEHQKVVKGNQKRLESLRELAGKENLEYPSVTLPPQPHTKEGVDAYNEVIARVRMWVNLNLWQKLKLSRDDAKPLLRLKGFPSFPLVERQANAEVDWWDMVCNVKKLINEKKEDGKVFWQNLAGYKRQEALRPYLSSEEDRKKGKKFARYQLGDLLLHLEKKHGEDWGKVYDEAWERIDKKVEGLSKHIKLEEERRSEDAQSKAALTDWLRAKASFVIEGLKEADKDEFCRCDLKLQKWYGDLRGKPFAIEAENSILDISGFSKQYNCAFIWQKDGVKKLNLYLIINYFKGGKLRFKKIKPEAFEANRFYTVINKKSGEIVPMEVNFNFDDPNLIILPLAFGKRQGREFIWNDLLSLETGSLKLANGRVIEKTLYNRRTRQDEPALFVALTFERREVLDSSNIKPMNLIGVDRGENIPAVIALTDPEGCPLSRFKDSLGNPTHILRIGESYKEKQRTIQAKKEVEQRRAGGYSRKYASKAKNLADDMVRNTARDLLYYAVTQDAMLIFENLSRGFGRQGKRTFMAERQYTRMEDWLTAKLAYEGLPSKTYLSKTLAQYTSKTCSNCGFTITSADYDRVLEKLKKTATGWMTTINGKELKVEGQITYYNRYKRQNVVKDLSVELDRLSEESVNNDISSWTKGRSGEALSLLKKRFSHRPVQEKFVCLNCGFETHADEQAALNIARSWLFLRSQEYKKYQTNKTTGNTDKRAFVETWQSFYRKKLKEVWKPAV

SEQ ID NO: 36692 - protein, 979 aa, synthetic construct
  REGION 1..979: note = engineered CasX variant
QEIKRINKIRRRLVKDSNTKKAGKTGPMKTLLVRVMTPDLRERLENLRKKPENIPQPISNTSRANLNKLLTDYTEMKKAILHVYWEEFQKDPVGLMSRVAQPASKKIDQNKLKPEMDEKGNLTTAGFACSQCGQPLFVYKLEQVSEKGKAYTNYFGRCNVAEHEKLILLAQLKPEKDSDEAVTYSLGKFGQRALDFYSIHVTKESTHPVKPLAQIAGNRYASTPVGKALSDACMGTIASFLSKYQDIIIEHQKVVKGNQKRLESLRELAGKENLEYPSVTLPPQPHTKEGVDAYNEVIARVRMWVNLNLWQKLKLSRDDAKPLLRLKGFPSFPLVERQANAEVDWWDMVCNVKKLINEKKEDGKVFWQNLAGYKRQEALRPYLSSEEDRKKGKKFARYQLGDLLLHLEKKHGEDWGKVYDEAWERIDKKVEGLSKHIKLEEERRSEDAQSKAALTDWLRAKASFVIEGLKEADKDEFCRCDLKLQKWYGDLRGKPFAIEAENSILDISGFSKQYNCAFIWQKDGVKKLNLYLIINYFKGGKLRFKKIKPEAFEANRFYTVINKKSGEIVPMEVNFNFDDPNLIILPLAFGKRQGREFIWNDLLSLETGSLKLANGRVIEKTLYNRRTRQDEPALFVALTFERREVLDSSNIKPMNLIGVDRGENIPAVIALTDPEGCPLSRFKDSLGNPTHILRIGESYKEKQRTIQAKKEVEQRRAGGYSRKYASKAKNLADDMVRNTARDLLYYAVTQDAMLIFENLSRGFGRQGKRTFMAERQYTRMEDWLTAKLAYEGLPSKTYLSKTLAQYTSKTCSNCGFTITSADYDRVLEKLKKTATGWMTTINGKELKVEGQITYYNRYKRQNVVKDLSVELDRLSEESVNNDISSWTKGRSGEALSLLKKRFSHRPVQEKFVCLNCGFETHADEQAALNIARSWLFLRSQEYKKYQTNKTTGNTDKRAFVETWQSFYRKKLKEVWKPAV

SEQ ID NO: 36693 - protein, 979 aa, synthetic construct
  REGION 1..979: note = engineered CasX variant
QEIKRINKIRRRLVKDSNTKKAGKTGPMKTLLVRVMTPDLRERLENLRKKPENIPQPISNTSRANLNKLLTDYTEMKKAILHVYWEEFQKDPVGLMSRVAQPASKKIDQNKLKPEMDEKGNLTTAGFACSQCGQPLFVYKLEQVSEKGKAYTNYFGRCNVAEHEKLILLAQLKPEKDSDEAVTYSLGKFGQRALDFYSIHVTKESTHPVKPLAQIAGNRYASAPVGKALSDACMGTIASFLSKYQDIIIEHQKVVKGNQKRLESLRELAGKENLEYPSVTLPPQPHTKEGVDAYNEVIARVRMWVNLNLWQKLKLSRDDAKPLLRLKGFPSFPLVERQANAEVDWWDMVCNVKKLINEKKEDGKVFWQNLAGYKRQEALRPYLSSEEDRKKGKKFARYQLGDLLLHLEKKHGEDWGKVYDEAWERIDKKVEGLSKHIKLEEERRSEDAQSKAALTDWLRAKASFVIEGLKEADKDEFCRCDLKLQKWYGDLRGKPFAIEAENSILDISGFSKQYNCAFIWQKDGVKKLNLYLIINYFKGGKLRFKKIKPEAFEANRFYTVINKKSGEIVPMEVNFNFDDPNLIILPLAFGKRQGREFIWNDLLSLETGSLKLANGRVIEKTLYNRRTRQDEPALFVALTFERREVLDSSNIKPMNLIGVDRGENIPAVIALTDPEGCPLSRFKDSLGNPTHILRIGESYKEKQRTIQAKKEVEQRRAGGYSRKYASKAKNLADDMVRNTARDLLYYAVTQDAMLIFENLSRGFGRQGKRTFMAERQYTRMEDWLTAKLAYEGLPSKTYLSKTLAQYTSKTCSNCGFTITSADYDRVLEKLKKTATGWMTTINGKELKVEGQITYYNRYKRQNVVKDLSVELDRLSEESVNNDISSWTKGRSGEALSLLKKRFSHRPVQEKFVCLNCGFETHADEQAALNIARSWLFLRSQEYKKYQTNKTTGNTDKRAFVETWQSFYRKKLKEVWKPAV

SEQ ID NO: 36694 - protein, 979 aa, synthetic construct
  REGION 1..979: note = engineered CasX variant
QEIKRINKIRRRLVKDSNTKKAGKTGPMKTLLVRVMTPDLRERLENLRKKPENIPQPISNTSRANLNKLLTDYTEMKKAILHVYWEEFQKDPVGLMSRVAQPASKKIDQNKLKPEMDEKGNLTTAGFACSQCGQPLFVYKLEQVSEKGKAYTNYFGRCNVAEHEKLILLAQLKPEKDSDEAVTYSLGKFGQRALDFYSIHVTKESTHPVKPLAQIAGNRYASVPVGKALSDACMGTIASFLSKYQDIIIEHQKVVKGNQKRLESLRELAGKENLEYPSVTLPPQPHTKEGVDAYNEVIARVRMWVNLNLWQKLKLSRDDAKPLLRLKGFPSFPLVERQANAEVDWWDMVCNVKKLINEKKEDGKVFWQNLAGYKRQEALRPYLSSEEDRKKGKKFARYQLGDLLLHLEKKHGEDWGKVYDEAWERIDKKVEGLSKHIKLEEERRSEDAQSKAALTDWLRAKASFVIEGLKEADKDEFCRCDLKLQKWYGDLRGKPFAIEAENSILDISGFSKQYNCAFIWQKDGVKKLNLYLIINYFKGGKLRFKKIKPEAFEANRFYTVINKKSGEIVPMEVNFNFDDPNLIILPLAFGKRQGREFIWNDLLSLETGSLKLANGRVIEKTLYNRRTRQDEPALFVALTFERREVLDSSNIKPMNLIGVDRGENIPAVIALTDPEGCPLSRFKDSLGNPTHILRIGESYKEKQRTIQAKKEVEQRRAGGYSRKYASKAKNLADDMVRNTARDLLYYAVTQDAMLIFENLSRGFGRQGKRTFMAERQYTRMEDWLTAKLAYEGLPSKTYLSKTLAQYTSKTCSNCGFTITSADYDRVLEKLKKTATGWMTTINGKELKVEGQITYYNRYKRQNVVKDLSVELDRLSEESVNNDISSWTKGRSGEALSLLKKRFSHRPVQEKFVCLNCGFETHADEQAALNIARSWLFLRSQEYKKYQTNKTTGNTDKRAFVETWQSFYRKKLKEVWKPAV

SEQ ID NO: 36695 - protein, 979 aa, synthetic construct
  REGION 1..979: note = engineered CasX variant
QEIKRINKIRRRLVKDSNTKKAGKTGPMKTLLVRVMTPDLRERLENLRKKPENIPQPISNTSRANLNKLLTDYTEMKKAILHVYWEEFQKDPVGLMSRVAQPASKKIDQNKLKPEMDEKGNLTTAGFACSQCGQPLFVYKLEQVSEKGKAYTNYFGRCNVAEHEKLIKLAQLKPEKDSDEAVTYSLGKFGQRALDFYSIHVTKESTHPVKPLAQIAGNRYASGPVGKALSDACMGTIASFLSKYQDIIIEHQKVVKGNQKRLESLRELAGKENLEYPSVTLPPQPHTKEGVDAYNEVIARVRMWVNLNLWQKLKLSRDDAKPLLRLKGFPSFPLVERQANAEVDWWDMVCNVKKLINEKKEDGKVFWQNLAGYKRQEALRPYLSSEEDRKKGKKFARYQLGDLLLHLEKKHGEDWGKVYDEAWERIDKKVEGLSKHIKLEEERRSEDAQSKAALTDWLRAKASFVIEGLKEADKDEFCRCDLKLQKWYGDLRGKPFAIEAENSILDISGFSKQYNCAFIWQKDGVKKLNLYLIINYFKGGKLRFKKIKPEAFEANRFYTVINKKSGEIVPMEVNFNFDDPNLIILPLAFGKRQGREFIWNDLLSLETGSLKLANGRVIEKTLYNRRTRQDEPALFVALTFERREVLDSSNIKPMNLIGVDRGENIPAVIALTDPEGCPLSRFKDSLGNPTHILRIGESYKEKQRTIQAKKEVEQRRAGGYSRKYASKAKNLADDMVRNTARDLLYYAVTQDAMLIFENLSRGFGRQGKRTFMAERQYTRMEDWLTAKLAYEGLPSKTYLSKTLAQYTSKTCSNCGFTITSADYDRVLEKLKKTATGWMTTINGKELKVEGQITYYNRYKRQNVVKDLSVELDRLSEESVNNDISSWTKGRSGEALSLLKKRFSHRPVQEKFVCLNCGFETHADEQAALNIARSWLFLRSQEYKKYQTNKTTGNTDKRAFVETWQSFYRKKLKEVWKPAV

SEQ ID NO: 36696 - protein, 978 aa, synthetic construct
  REGION 1..978: note = engineered CasX variant
QEIKRINKIRRRLVKDSNTKKAGKTGPMKTLLVRVMTPDLRERLENLRKKPENIPQPISNTSRANLNKLLTDYTEMKKAILHVYWEEFQKDPVGLMSRVAQPASKKIDQNKLKPEMDEKGNLTTAGFACSQCGQPLFVYKLEQVSEKGKAYTNYFGRCNVAEHEKLILLAQLKPEKDSDEAVTYSLGKFGQRALDFYSIHVTKESTHPVKPLAQIAGNRYASPVGKALSDACMGTIASFLSKYQDIIIEHQKVVKGNQKRLESLRELAGKENLEYPSVTLPPQPHTKEGVDAYNEVIARVRMWVNLNLWQKLKLSRDDAKPLLRLKGFPSFPLVERQANAEVDWWDMVCNVKKLINEKKEDGKVFWQNLAGYKRQEALRPYLSSEEDRKKGKKFARYQLGDLLLHLEKKHGEDWGKVYDEAWERIDKKVEGLSKHIKLEEERRSEDAQSKAALTDWLRAKASFVIEGLKEADKDEFCRCDLKLQKWYGDLRGKPFAIEAENSILDISGFSKQYNCAFIWQKDGVKKLNLYLIINYFKGGKLRFKKIKPEAFEANRFYTVINKKSGEIVPMEVNFNFDDPNLIILPLAFGKRQGREFIWNDLLSLETGSLKLANGRVIEKTLYNRRTRQDEPALFVALTFERREVLDSSNIKPMNLIGVDRGENIPAVIALTDPEGCPLSRFKDSLGNPTHILRIGESYKEKQRTIQAKKEVEQRRAGGYSRKYASKAKNLADDMVRNTARDLLYYAVTQDAMLIFENLSRGFGRQGKRTFMAERQYTRMEDWLTAKLAYEGLPSKTYLSKTLAQYTSKTCSNCGFTITSADYDRVLEKLKKTATGWMTTINGKELKVEGQITYYNRYKRQNVVKDLSVELDRLSEESVNNDISSWTKGRSGEALSLLKKRFSHRPVQEKFVCLNCGFETHADEQAALNIARSWLFLRSQEYKKYQTNKTTGNTDKRAFVETWQSFYRKKLKEVWKPAV

SEQ ID NO: 36697 - protein, 979 aa, synthetic construct
  REGION 1..979: note = engineered CasX variant
QEIKRINKIRRRLVKDSNTKKAGKTGPMKTLLVRVMTPDLRERLENLRKKPENIPQPISNTSRANLNKLLTDYTEMKKAILHVYWEEFQKDPVGLMSRVAQPASKKIDQNKLKPEMDEKGNLTTAGFACSQCGQPLFVYKLEQVSEKGKAYTNYFGRCNVAEHEKLILLAQLKPEKDSDEAVTYSLGKFGQRALDFYSIHVTKESTHPVKPLAQIAGNRYASYPVGKALSDACMGTIASFLSKYQDIIIEHQKVVKGNQKRLESLRELAGKENLEYPSVTLPPQPHTKEGVDAYNEVIARVRMWVNLNLWQKLKLSRDDAKPLLRLKGFPSFPLVERQANAEVDWWDMVCNVKKLINEKKEDGKVFWQNLAGYKRQEALRPYLSSEEDRKKGKKFARYQLGDLLLHLEKKHGEDWGKVYDEAWERIDKKVEGLSKHIKLEEERRSEDAQSKAALTDWLRAKASFVIEGLKEADKDEFCRCELKLQKWYGDLRGKPFAIEAENSILDISGFSKQYNCAFIWQKDGVKKLNLYLIINYFKGGKLRFKKIKPEAFEANRFYTVINKKSGEIVPMEVNFNFDDPNLIILPLAFGKRFGREFIWNDLLSLETGSLKLANGRVIEKTLYNRRTRQDEPALFVALTFERREVLDSSNIKPMNLIGVDRGENIPAVIALTDPEGCPLSRFKDSLGNPTHILRIGESYKEKQRTIQAKKEVEQRRAGGYSRKYASKAKNLADDMVRNTARDLLYYAVTQDAMLIFENLSRGFGRQGKRTFMAERQYTRMEDWLTAKLAYEGLPSKTYLSKTLAQYTSKTCSNCGFTITSADYDRVLEKLKKTATGWMTTINGKELKVEGQITYYNRYKRQNVVKDLSVELDRLSEESVNNDISSWTKGRSGEALSLLKKRFSHRPVQEKFVCLNCGFETHADEQAALNIARSWLFLRSQEYKKYQTNKTTGNTDKRAFVETWQSFYRKKLKEVWKPAV

SEQ ID NO: 36698 - protein, 979 aa, synthetic construct
  REGION 1..979: note = engineered CasX variant
QEIKRINKIRRRLVKDSNTKKAGKTGPMKTLLVRVMTPDLRERLENLRKKPENIPQPISNTSRANLNKLLTDYTEMKKAILHVYWEEFQKDPVGLMSRVAQPASKKIDQNKLKPEMDEKGNLTTAGFACSQCGQPLFVYKLEQVSEKGKAYTNYFGRCNVAEHEKLILLAQLKPEKDSDEAVTYSLGKFGQRALDFYSIHVTKESTHPVKPLAQIAGNRYASHPVGKALSDACMGTIASFLSKYQDIIIEHQKVVKGNQKRLESLRELAGKENLEYPSVTLPPQPHTKEGVDAYNEVIARVRMWVNLNLWQKLKLSRDDAKPLLRLKGFPSFPLVERQANAEVDWWDMVCNVKKLINEKKEDGKVFWQNLAGYKRQEALRPYLSSEEDRKKGKKFARYQLGDLLLHLEKKHGEDWGKVYDEAWERIDKKVEGLSKHIKLEEERRSEDAQSKAALTDWLRAKASFVIEGLKEADKDEFCRCELKLQKWYGDLRGKPFAIEAENSILDISGFSKQYNCAFIWQKDGVKKLNLYLIINYFKGGKLRFKKIKPEAFEANRFYTVINKKSGEIVPMEVNFNFDDPNLIILPLAFGKRFGREFIWNDLLSLETGSLKLANGRVIEKTLYNRRTRQDEPALFVALTFERREVLDSSNIKPMNLIGVDRGENIPAVIALTDPEGCPLSRFKDSLGNPTHILRIGESYKEKQRTIQAKKEVEQRRAGGYSRKYASKAKNLADDMVRNTARDLLYYAVTQDAMLIFENLSRGFGRQGKRTFMAERQYTRMEDWLTAKLAYEGLPSKTYLSKTLAQYTSKTCSNCGFTITSADYDRVLEKLKKTATGWMTTINGKELKVEGQITYYNRYKRQNVVKDLSVELDRLSEESVNNDISSWTKGRSGEALSLLKKRFSHRPVQEKFVCLNCGFETHADEQAALNIARSWLFLRSQEYKKYQTNKTTGNTDKRAFVETWQSFYRKKLKEVWKPAV

SEQ ID NO: 36699 - protein, 979 aa, synthetic construct
  REGION 1..979: note = engineered CasX variant
QEIKRINKIRRRLVKDSNTKKAGKTGPMKTLLVRVMTPDLRERLENLRKKPENIPQPISNTSRANLNKLLTDYTEMKKAILHVYWEEFQKDPVGLMSRVAQPASKKIDQNKLKPEMDEKGNLTTAGFACSQCGQPLFVYKLEQVSEKGKAYTNYFGRCNVAEHEKLILLAQLKPEKDSDEAVTYSLGKFGQRALDFYSIHVTKESTHPVKPLAQIAGNRYASSPVGKALSDACMGTIASFLSKYQDIIIEHQKVVKGNQKRLESLRELAGKENLEYPSVTLPPQPHTKEGVDAYNEVIARVRMWVNLNLWQKLKLSRDDAKPLLRLKGFPSFPLVERQANAEVDWWDMVCNVKKLINEKKEDGKVFWQNLAGYKRQEALRPYLSSEEDRKKGKKFARYQLGDLLLHLEKKHGEDWGKVYDEAWERIDKKVEGLSKHIKLEEERRSEDAQSKAALTDWLRAKASFVIEGLKEADKDEFCRCELKLQKWYGDLRGKPFAIEAENSILDISGFSKQYNCAFIWQKDGVKKLNLYLIINYFKGGKLRFKKIKPEAFEANRFYTVINKKSGEIVPMEVNFNFDDPNLIILPLAFGKRFGREFIWNDLLSLETGSLKLANGRVIEKTLYNRRTRQDEPALFVALTFERREVLDSSNIKPMNLIGVDRGENIPAVIALTDPEGCPLSRFKDSLGNPTHILRIGESYKEKQRTIQAKKEVEQRRAGGYSRKYASKAKNLADDMVRNTARDLLYYAVTQDAMLIFENLSRGFGRQGKRTFMAERQYTRMEDWLTAKLAYEGLPSKTYLSKTLAQYTSKTCSNCGFTITSADYDRVLEKLKKTATGWMTTINGKELKVEGQITYYNRYKRQNVVKDLSVELDRLSEESVNNDISSWTKGRSGEALSLLKKRFSHRPVQEKFVCLNCGFETHADEQAALNIARSWLFLRSQEYKKYQTNKTTGNTDKRAFVETWQSFYRKKLKEVWKPAV

SEQ ID NO: 36700 - protein, 979 aa, synthetic construct
  REGION 1..979: note = engineered CasX variant
QEIKRINKIRRRLVKDSNTKKAGKTGPMKTLLVRVMTPDLRERLENLRKKPENIPQPISNTSRANLNKLLTDYTEMKKAILHVYWEEFQKDPVGLMSRVAQPASKKIDQNKLKPEMDEKGNLTTAGFACSQCGQPLFVYKLEQVSEKGKAYTNYFGRCNVAEHEKLILLAQLKPEKDSDEAVTYSLGKFGQRALDFYSIHVTKESTHPVKPLAQIAGNRYASTPVGKALSDACMGTIASFLSKYQDIIIEHQKVVKGNQKRLESLRELAGKENLEYPSVTLPPQPHTKEGVDAYNEVIARVRMWVNLNLWQKLKLSRDDAKPLLRLKGFPSFPLVERQANAEVDWWDMVCNVKKLINEKKEDGKVFWQNLAGYKRQEALRPYLSSEEDRKKGKKFARYQLGDLLLHLEKKHGEDWGKVYDEAWERIDKKVEGLSKHIKLEEERRSEDAQSKAALTDWLRAKASFVIEGLKEADKDEFCRCELKLQKWYGDLRGKPFAIEAENSILDISGFSKQYNCAFIWQKDGVKKLNLYLIINYFKGGKLRFKKIKPEAFEANRFYTVINKKSGEIVPMEVNFNFDDPNLIILPLAFGKRFGREFIWNDLLSLETGSLKLANGRVIEKTLYNRRTRQDEPALFVALTFERREVLDSSNIKPMNLIGVDRGENIPAVIALTDPEGCPLSRFKDSLGNPTHILRIGESYKEKQRTIQAKKEVEQRRAGGYSRKYASKAKNLADDMVRNTARDLLYYAVTQDAMLIFENLSRGFGRQGKRTFMAERQYTRMEDWLTAKLAYEGLPSKTYLSKTLAQYTSKTCSNCGFTITSADYDRVLEKLKKTATGWMTTINGKELKVEGQITYYNRYKRQNVVKDLSVELDRLSEESVNNDISSWTKGRSGEALSLLKKRFSHRPVQEKFVCLNCGFETHADEQAALNIARSWLFLRSQEYKKYQTNKTTGNTDKRAFVETWQSFYRKKLKEVWKPAV

SEQ ID NO: 36701 - protein, 979 aa, synthetic construct
  REGION 1..979: note = engineered CasX variant
QEIKRINKIRRRLVKDSNTKKAGKTGPMKTLLVRVMTPDLRERLENLRKKPENIPQPISNTSRANLNKLLTDYTEMKKAILHVYWEEFQKDPVGLMSRVAQPASKKIDQNKLKPEMDEKGNLTTAGFACSQCGQPLFVYKLEQVSEKGKAYTNYFGRCNVAEHEKLILLAQLKPEKDSDEAVTYSLGKFGQRALDFYSIHVTKESTHPVKPLAQIAGNRYASAPVGKALSDACMGTIASFLSKYQDIIIEHQKVVKGNQKRLESLRELAGKENLEYPSVTLPPQPHTKEGVDAYNEVIARVRMWVNLNLWQKLKLSRDDAKPLLRLKGFPSFPLVERQANAEVDWWDMVCNVKKLINEKKEDGKVFWQNLAGYKRQEALRPYLSSEEDRKKGKKFARYQLGDLLLHLEKKHGEDWGKVYDEAWERIDKKVEGLSKHIKLEEERRSEDAQSKAALTDWLRAKASFVIEGLKEADKDEFCRCELKLQKWYGDLRGKPFAIEAENSILDISGFSKQYNCAFIWQKDGVKKLNLYLIINYFKGGKLRFKKIKPEAFEANRFYTVINKKSGEIVPMEVNFNFDDPNLIILPLAFGKRFGREFIWNDLLSLETGSLKLANGRVIEKTLYNRRTRQDEPALFVALTFERREVLDSSNIKPMNLIGVDRGENIPAVIALTDPEGCPLSRFKDSLGNPTHILRIGESYKEKQRTIQAKKEVEQRRAGGYSRKYASKAKNLADDMVRNTARDLLYYAVTQDAMLIFENLSRGFGRQGKRTFMAERQYTRMEDWLTAKLAYEGLPSKTYLSKTLAQYTSKTCSNCGFTITSADYDRVLEKLKKTATGWMTTINGKELKVEGQITYYNRYKRQNVVKDLSVELDRLSEESVNNDISSWTKGRSGEALSLLKKRFSHRPVQEKFVCLNCGFETHADEQAALNIARSWLFLRSQEYKKYQTNKTTGNTDKRAFVETWQSFYRKKLKEVWKPAV

SEQ ID NO: 36702 - protein, 979 aa, synthetic construct
  REGION 1..979: note = engineered CasX variant
QEIKRINKIRRRLVKDSNTKKAGKTGPMKTLLVRVMTPDLRERLENLRKKPENIPQPISNTSRANLNKLLTDYTEMKKAILHVYWEEFQKDPVGLMSRVAQPASKKIDQNKLKPEMDEKGNLTTAGFACSQCGQPLFVYKLEQVSEKGKAYTNYFGRCNVAEHEKLILLAQLKPEKDSDEAVTYSLGKFGQRALDFYSIHVTKESTHPVKPLAQIAGNRYASVPVGKALSDACMGTIASFLSKYQDIIIEHQKVVKGNQKRLESLRELAGKENLEYPSVTLPPQPHTKEGVDAYNEVIARVRMWVNLNLWQKLKLSRDDAKPLLRLKGFPSFPLVERQANAEVDWWDMVCNVKKLINEKKEDGKVFWQNLAGYKRQEALRPYLSSEEDRKKGKKFARYQLGDLLLHLEKKHGEDWGKVYDEAWERIDKKVEGLSKHIKLEEERRSEDAQSKAALTDWLRAKASFVIEGLKEADKDEFCRCELKLQKWYGDLRGKPFAIEAENSILDISGFSKQYNCAFIWQKDGVKKLNLYLIINYFKGGKLRFKKIKPEAFEANRFYTVINKKSGEIVPMEVNFNFDDPNLIILPLAFGKRFGREFIWNDLLSLETGSLKLANGRVIEKTLYNRRTRQDEPALFVALTFERREVLDSSNIKPMNLIGVDRGENIPAVIALTDPEGCPLSRFKDSLGNPTHILRIGESYKEKQRTIQAKKEVEQRRAGGYSRKYASKAKNLADDMVRNTARDLLYYAVTQDAMLIFENLSRGFGRQGKRTFMAERQYTRMEDWLTAKLAYEGLPSKTYLSKTLAQYTSKTCSNCGFTITSADYDRVLEKLKKTATGWMTTINGKELKVEGQITYYNRYKRQNVVKDLSVELDRLSEESVNNDISSWTKGRSGEALSLLKKRFSHRPVQEKFVCLNCGFETHADEQAALNIARSWLFLRSQEYKKYQTNKTTGNTDKRAFVETWQSFYRKKLKEVWKPAV

SEQ ID NO: 36703 - protein, 979 aa, synthetic construct
  REGION 1..979: note = engineered CasX variant
QEIKRINKIRRRLVKDSNTKKAGKTGPMKTLLVRVMTPDLRERLENLRKKPENIPQPISNTSRANLNKLLTDYTEMKKAILHVYWEEFQKDPVGLMSRVAQPASKKIDQNKLKPEMDEKGNLTTAGFACSQCGQPLFVYKLEQVSEKGKAYTNYFGRCNVAEHEKLIKLAQLKPEKDSDEAVTYSLGKFGQRALDFYSIHVTKESTHPVKPLAQIAGNRYASGPVGKALSDACMGTIASFLSKYQDIIIEHQKVVKGNQKRLESLRELAGKENLEYPSVTLPPQPHTKEGVDAYNEVIARVRMWVNLNLWQKLKLSRDDAKPLLRLKGFPSFPLVERQANAEVDWWDMVCNVKKLINEKKEDGKVFWQNLAGYKRQEALRPYLSSEEDRKKGKKFARYQLGDLLLHLEKKHGEDWGKVYDEAWERIDKKVEGLSKHIKLEEERRSEDAQSKAALTDWLRAKASFVIEGLKEADKDEFCRCELKLQKWYGDLRGKPFAIEAENSILDISGFSKQYNCAFIWQKDGVKKLNLYLIINYFKGGKLRFKKIKPEAFEANRFYTVINKKSGEIVPMEVNFNFDDPNLIILPLAFGKRFGREFIWNDLLSLETGSLKLANGRVIEKTLYNRRTRQDEPALFVALTFERREVLDSSNIKPMNLIGVDRGENIPAVIALTDPEGCPLSRFKDSLGNPTHILRIGESYKEKQRTIQAKKEVEQRRAGGYSRKYASKAKNLADDMVRNTARDLLYYAVTQDAMLIFENLSRGFGRQGKRTFMAERQYTRMEDWLTAKLAYEGLPSKTYLSKTLAQYTSKTCSNCGFTITSADYDRVLEKLKKTATGWMTTINGKELKVEGQITYYNRYKRQNVVKDLSVELDRLSEESVNNDISSWTKGRSGEALSLLKKRFSHRPVQEKFVCLNCGFETHADEQAALNIARSWLFLRSQEYKKYQTNKTTGNTDKRAFVETWQSFYRKKLKEVWKPAV

SEQ ID NO: 36704 - protein, 978 aa, synthetic construct
  REGION 1..978: note = engineered CasX variant
QEIKRINKIRRRLVKDSNTKKAGKTGPMKTLLVRVMTPDLRERLENLRKKPENIPQPISNTSRANLNKLLTDYTEMKKAILHVYWEEFQKDPVGLMSRVAQPASKKIDQNKLKPEMDEKGNLTTAGFACSQCGQPLFVYKLEQVSEKGKAYTNYFGRCNVAEHEKLILLAQLKPEKDSDEAVTYSLGKFGQRALDFYSIHVTKESTHPVKPLAQIAGNRYASPVGKALSDACMGTIASFLSKYQDIIIEHQKVVKGNQKRLESLRELAGKENLEYPSVTLPPQPHTKEGVDAYNEVIARVRMWVNLNLWQKLKLSRDDAKPLLRLKGFPSFPLVERQANAEVDWWDMVCNVKKLINEKKEDGKVFWQNLAGYKRQEALRPYLSSEEDRKKGKKFARYQLGDLLLHLEKKHGEDWGKVYDEAWERIDKKVEGLSKHIKLEEERRSEDAQSKAALTDWLRAKASFVIEGLKEADKDEFCRCELKLQKWYGDLRGKPFAIEAENSILDISGFSKQYNCAFIWQKDGVKKLNLYLIINYFKGGKLRFKKIKPEAFEANRFYTVINKKSGEIVPMEVNFNFDDPNLIILPLAFGKRFGREFIWNDLLSLETGSLKLANGRVIEKTLYNRRTRQDEPALFVALTFERREVLDSSNIKPMNLIGVDRGENIPAVIALTDPEGCPLSRFKDSLGNPTHILRIGESYKEKQRTIQAKKEVEQRRAGGYSRKYASKAKNLADDMVRNTARDLLYYAVTQDAMLIFENLSRGFGRQGKRTFMAERQYTRMEDWLTAKLAYEGLPSKTYLSKTLAQYTSKTCSNCGFTITSADYDRVLEKLKKTATGWMTTINGKELKVEGQITYYNRYKRQNVVKDLSVELDRLSEESVNNDISSWTKGRSGEALSLLKKRFSHRPVQEKFVCLNCGFETHADEQAALNIARSWLFLRSQEYKKYQTNKTTGNTDKRAFVETWQSFYRKKLKEVWKPAV

SEQ ID NO: 36705 - protein, 979 aa, synthetic construct
  REGION 1..979: note = engineered CasX variant
QEIKRINKIRRRLVKDSNTKKAGKTGPMKTLLVRVMTPDLRERLENLRKKPENIPQPISNTSRANLNKLLTDYTEMKKAILHVYWEEFQKDPVGLMSRVAQPASKKIDQNKLKPEMDEKGNLTTAGFACSQCGQPLFVYKLEQVSEKGKAYTNYFGRCNVAEHEKLILLAQLKPEKDSDEAVTYSLGKFGQRALDFYSIHVTKESTHPVKPLAQIAGNRYASYPVGKALSDACMGTIASFLSKYQDIIIEHQKVVKGNQKRLESLRELAGKENLEYPSVTLPPQPHTKEGVDAYNEVIARVRMWVNLNLWQKLKLSRDDAKPLLRLKGFPSFPLVERQANAEVDWWDMVCNVKKLINEKKEDGKVFWQNLAGYKRQEALRPYLSSEEDRKKGKKFARYQLGDLLLHLEKKHGEDWGKVYDEAWERIDKKVEGLSKHIKLEEERRSEDAQSKAALTDWLRAKASFVIEGLKEADKDEFCRCELKLQKWYGDLRGKPFAIEAENSILDISGFSKQYNCAFIWQKDGVKKLNLYLIINYFKGGKLRFKKIKPEAFEANRFYTVINKKSGEIVPMEVNFNFDDPNLIILPLAFGKRVGREFIWNDLLSLETGSLKLANGRVIEKTLYNRRTRQDEPALFVALTFERREVLDSSNIKPMNLIGVDRGENIPAVIALTDPEGCPLSRFKDSLGNPTHILRIGESYKEKQRTIQAKKEVEQRRAGGYSRKYASKAKNLADDMVRNTARDLLYYAVTQDAMLIFENLSRGFGRQGKRTFMAERQYTRMEDWLTAKLAYEGLPSKTYLSKTLAQYTSKTCSNCGFTITSADYDRVLEKLKKTATGWMTTINGKELKVEGQITYYNRYKRQNVVKDLSVELDRLSEESVNNDISSWTKGRSGEALSLLKKRFSHRPVQEKFVCLNCGFETHADEQAALNIARSWLFLRSQEYKKYQTNKTTGNTDKRAFVETWQSFYRKKLKEVWKPAV

SEQ ID NO: 36706 - protein, 979 aa, synthetic construct
  REGION 1..979: note = engineered CasX variant
QEIKRINKIRRRLVKDSNTKKAGKTGPMKTLLVRVMTPDLRERLENLRKKPENIPQPISNTSRANLNKLLTDYTEMKKAILHVYWEEFQKDPVGLMSRVAQPASKKIDQNKLKPEMDEKGNLTTAGFACSQCGQPLFVYKLEQVSEKGKAYTNYFGRCNVAEHEKLILLAQLKPEKDSDEAVTYSLGKFGQRALDFYSIHVTKESTHPVKPLAQIAGNRYASHPVGKALSDACMGTIASFLSKYQDIIIEHQKVVKGNQKRLESLRELAGKENLEYPSVTLPPQPHTKEGVDAYNEVIARVRMWVNLNLWQKLKLSRDDAKPLLRLKGFPSFPLVERQANAEVDWWDMVCNVKKLINEKKEDGKVFWQNLAGYKRQEALRPYLSSEEDRKKGKKFARYQLGDLLLHLEKKHGEDWGKVYDEAWERIDKKVEGLSKHIKLEEERRSEDAQSKAALTDWLRAKASFVIEGLKEADKDEFCRCELKLQKWYGDLRGKPFAIEAENSILDISGFSKQYNCAFIWQKDGVKKLNLYLIINYFKGGKLRFKKIKPEAFEANRFYTVINKKSGEIVPMEVNFNFDDPNLIILPLAFGKRVGREFIWNDLLSLETGSLKLANGRVIEKTLYNRRTRQDEPALFVALTFERREVLDSSNIKPMNLIGVDRGENIPAVIALTDPEGCPLSRFKDSLGNPTHILRIGESYKEKQRTIQAKKEVEQRRAGGYSRKYASKAKNLADDMVRNTARDLLYYAVTQDAMLIFENLSRGFGRQGKRTFMAERQYTRMEDWLTAKLAYEGLPSKTYLSKTLAQYTSKTCSNCGFTITSADYDRVLEKLKKTATGWMTTINGKELKVEGQITYYNRYKRQNVVKDLSVELDRLSEESVNNDISSWTKGRSGEALSLLKKRFSHRPVQEKFVCLNCGFETHADEQAALNIARSWLFLRSQEYKKYQTNKTTGNTDKRAFVETWQSFYRKKLKEVWKPAV

SEQ ID NO: 36707 - protein, 979 aa, synthetic construct
  REGION 1..979: note = engineered CasX variant
QEIKRINKIRRRLVKDSNTKKAGKTGPMKTLLVRVMTPDLRERLENLRKKPENIPQPISNTSRANLNKLLTDYTEMKKAILHVYWEEFQKDPVGLMSRVAQPASKKIDQNKLKPEMDEKGNLTTAGFACSQCGQPLFVYKLEQVSEKGKAYTNYFGRCNVAEHEKLILLAQLKPEKDSDEAVTYSLGKFGQRALDFYSIHVTKESTHPVKPLAQIAGNRYASSPVGKALSDACMGTIASFLSKYQDIIIEHQKVVKGNQKRLESLRELAGKENLEYPSVTLPPQPHTKEGVDAYNEVIARVRMWVNLNLWQKLKLSRDDAKPLLRLKGFPSFPLVERQANAEVDWWDMVCNVKKLINEKKEDGKVFWQNLAGYKRQEALRPYLSSEEDRKKGKKFARYQLGDLLLHLEKKHGEDWGKVYDEAWERIDKKVEGLSKHIKLEEERRSEDAQSKAALTDWLRAKASFVIEGLKEADKDEFCRCELKLQKWYGDLRGKPFAIEAENSILDISGFSKQYNCAFIWQKDGVKKLNLYLIINYFKGGKLRFKKIKPEAFEANRFYTVINKKSGEIVPMEVNFNFDDPNLIILPLAFGKRVGREFIWNDLLSLETGSLKLANGRVIEKTLYNRRTRQDEPALFVALTFERREVLDSSNIKPMNLIGVDRGENIPAVIALTDPEGCPLSRFKDSLGNPTHILRIGESYKEKQRTIQAKKEVEQRRAGGYSRKYASKAKNLADDMVRNTARDLLYYAVTQDAMLIFENLSRGFGRQGKRTFMAERQYTRMEDWLTAKLAYEGLPSKTYLSKTLAQYTSKTCSNCGFTITSADYDRVLEKLKKTATGWMTTINGKELKVEGQITYYNRYKRQNVVKDLSVELDRLSEESVNNDISSWTKGRSGEALSLLKKRFSHRPVQEKFVCLNCGFETHADEQAALNIARSWLFLRSQEYKKYQTNKTTGNTDKRAFVETWQSFYRKKLKEVWKPAV

SEQ ID NO: 36708 - protein, 979 aa, synthetic construct
  REGION 1..979: note = engineered CasX variant
QEIKRINKIRRRLVKDSNTKKAGKTGPMKTLLVRVMTPDLRERLENLRKKPENIPQPISNTSRANLNKLLTDYTEMKKAILHVYWEEFQKDPVGLMSRVAQPASKKIDQNKLKPEMDEKGNLTTAGFACSQCGQPLFVYKLEQVSEKGKAYTNYFGRCNVAEHEKLILLAQLKPEKDSDEAVTYSLGKFGQRALDFYSIHVTKESTHPVKPLAQIAGNRYASTPVGKALSDACMGTIASFLSKYQDIIIEHQKVVKGNQKRLESLRELAGKENLEYPSVTLPPQPHTKEGVDAYNEVIARVRMWVNLNLWQKLKLSRDDAKPLLRLKGFPSFPLVERQANAEVDWWDMVCNVKKLINEKKEDGKVFWQNLAGYKRQEALRPYLSSEEDRKKGKKFARYQLGDLLLHLEKKHGEDWGKVYDEAWERIDKKVEGLSKHIKLEEERRSEDAQSKAALTDWLRAKASFVIEGLKEADKDEFCRCELKLQKWYGDLRGKPFAIEAENSILDISGFSKQYNCAFIWQKDGVKKLNLYLIINYFKGGKLRFKKIKPEAFEANRFYTVINKKSGEIVPMEVNFNFDDPNLIILPLAFGKRVGREFIWNDLLSLETGSLKLANGRVIEKTLYNRRTRQDEPALFVALTFERREVLDSSNIKPMNLIGVDRGENIPAVIALTDPEGCPLSRFKDSLGNPTHILRIGESYKEKQRTIQAKKEVEQRRAGGYSRKYASKAKNLADDMVRNTARDLLYYAVTQDAMLIFENLSRGFGRQGKRTFMAERQYTRMEDWLTAKLAYEGLPSKTYLSKTLAQYTSKTCSNCGFTITSADYDRVLEKLKKTATGWMTTINGKELKVEGQITYYNRYKRQNVVKDLSVELDRLSEESVNNDISSWTKGRSGEALSLLKKRFSHRPVQEKFVCLNCGFETHADEQAALNIARSWLFLRSQEYKKYQTNKTTGNTDKRAFVETWQSFYRKKLKEVWKPAV

SEQ ID NO: 36709 - protein, 979 aa, synthetic construct
  REGION 1..979: note = engineered CasX variant
QEIKRINKIRRRLVKDSNTKKAGKTGPMKTLLVRVMTPDLRERLENLRKKPENIPQPISNTSRANLNKLLTDYTEMKKAILHVYWEEFQKDPVGLMSRVAQPASKKIDQNKLKPEMDEKGNLTTAGFACSQCGQPLFVYKLEQVSEKGKAYTNYFGRCNVAEHEKLILLAQLKPEKDSDEAVTYSLGKFGQRALDFYSIHVTKESTHPVKPLAQIAGNRYASAPVGKALSDACMGTIASFLSKYQDIIIEHQKVVKGNQKRLESLRELAGKENLEYPSVTLPPQPHTKEGVDAYNEVIARVRMWVNLNLWQKLKLSRDDAKPLLRLKGFPSFPLVERQANAEVDWWDMVCNVKKLINEKKEDGKVFWQNLAGYKRQEALRPYLSSEEDRKKGKKFARYQLGDLLLHLEKKHGEDWGKVYDEAWERIDKKVEGLSKHIKLEEERRSEDAQSKAALTDWLRAKASFVIEGLKEADKDEFCRCELKLQKWYGDLRGKPFAIEAENSILDISGFSKQYNCAFIWQKDGVKKLNLYLIINYFKGGKLRFKKIKPEAFEANRFYTVINKKSGEIVPMEVNFNFDDPNLIILPLAFGKRVGREFIWNDLLSLETGSLKLANGRVIEKTLYNRRTRQDEPALFVALTFERREVLDSSNIKPMNLIGVDRGENIPAVIALTDPEGCPLSRFKDSLGNPTHILRIGESYKEKQRTIQAKKEVEQRRAGGYSRKYASKAKNLADDMVRNTARDLLYYAVTQDAMLIFENLSRGFGRQGKRTFMAERQYTRMEDWLTAKLAYEGLPSKTYLSKTLAQYTSKTCSNCGFTITSADYDRVLEKLKKTATGWMTTINGKELKVEGQITYYNRYKRQNVVKDLSVELDRLSEESVNNDISSWTKGRSGEALSLLKKRFSHRPVQEKFVCLNCGFETHADEQAALNIARSWLFLRSQEYKKYQTNKTTGNTDKRAFVETWQSFYRKKLKEVWKPAV

SEQ ID NO: 36710 - protein, 979 aa, synthetic construct
  REGION 1..979: note = engineered CasX variant
QEIKRINKIRRRLVKDSNTKKAGKTGPMKTLLVRVMTPDLRERLENLRKKPENIPQPISNTSRANLNKLLTDYTEMKKAILHVYWEEFQKDPVGLMSRVAQPASKKIDQNKLKPEMDEKGNLTTAGFACSQCGQPLFVYKLEQVSEKGKAYTNYFGRCNVAEHEKLILLAQLKPEKDSDEAVTYSLGKFGQRALDFYSIHVTKESTHPVKPLAQIAGNRYASVPVGKALSDACMGTIASFLSKYQDIIIEHQKVVKGNQKRLESLRELAGKENLEYPSVTLPPQPHTKEGVDAYNEVIARVRMWVNLNLWQKLKLSRDDAKPLLRLKGFPSFPLVERQANAEVDWWDMVCNVKKLINEKKEDGKVFWQNLAGYKRQEALRPYLSSEEDRKKGKKFARYQLGDLLLHLEKKHGEDWGKVYDEAWERIDKKVEGLSKHIKLEEERRSEDAQSKAALTDWLRAKASFVIEGLKEADKDEFCRCELKLQKWYGDLRGKPFAIEAENSILDISGFSKQYNCAFIWQKDGVKKLNLYLIINYFKGGKLRFKKIKPEAFEANRFYTVINKKSGEIVPMEVNFNFDDPNLIILPLAFGKRVGREFIWNDLLSLETGSLKLANGRVIEKTLYNRRTRQDEPALFVALTFERREVLDSSNIKPMNLIGVDRGENIPAVIALTDPEGCPLSRFKDSLGNPTHILRIGESYKEKQRTIQAKKEVEQRRAGGYSRKYASKAKNLADDMVRNTARDLLYYAVTQDAMLIFENLSRGFGRQGKRTFMAERQYTRMEDWLTAKLAYEGLPSKTYLSKTLAQYTSKTCSNCGFTITSADYDRVLEKLKKTATGWMTTINGKELKVEGQITYYNRYKRQNVVKDLSVELDRLSEESVNNDISSWTKGRSGEALSLLKKRFSHRPVQEKFVCLNCGFETHADEQAALNIARSWLFLRSQEYKKYQTNKTTGNTDKRAFVETWQSFYRKKLKEVWKPAV

SEQ ID NO: 36711 - protein, 979 aa, synthetic construct
  REGION 1..979: note = engineered CasX variant
QEIKRINKIRRRLVKDSNTKKAGKTGPMKTLLVRVMTPDLRERLENLRKKPENIPQPISNTSRANLNKLLTDYTEMKKAILHVYWEEFQKDPVGLMSRVAQPASKKIDQNKLKPEMDEKGNLTTAGFACSQCGQPLFVYKLEQVSEKGKAYTNYFGRCNVAEHEKLIKLAQLKPEKDSDEAVTYSLGKFGQRALDFYSIHVTKESTHPVKPLAQIAGNRYASGPVGKALSDACMGTIASFLSKYQDIIIEHQKVVKGNQKRLESLRELAGKENLEYPSVTLPPQPHTKEGVDAYNEVIARVRMWVNLNLWQKLKLSRDDAKPLLRLKGFPSFPLVERQANAEVDWWDMVCNVKKLINEKKEDGKVFWQNLAGYKRQEALRPYLSSEEDRKKGKKFARYQLGDLLLHLEKKHGEDWGKVYDEAWERIDKKVEGLSKHIKLEEERRSEDAQSKAALTDWLRAKASFVIEGLKEADKDEFCRCELKLQKWYGDLRGKPFAIEAENSILDISGFSKQYNCAFIWQKDGVKKLNLYLIINYFKGGKLRFKKIKPEAFEANRFYTVINKKSGEIVPMEVNFNFDDPNLIILPLAFGKRVGREFIWNDLLSLETGSLKLANGRVIEKTLYNRRTRQDEPALFVALTFERREVLDSSNIKPMNLIGVDRGENIPAVIALTDPEGCPLSRFKDSLGNPTHILRIGESYKEKQRTIQAKKEVEQRRAGGYSRKYASKAKNLADDMVRNTARDLLYYAVTQDAMLIFENLSRGFGRQGKRTFMAERQYTRMEDWLTAKLAYEGLPSKTYLSKTLAQYTSKTCSNCGFTITSADYDRVLEKLKKTATGWMTTINGKELKVEGQITYYNRYKRQNVVKDLSVELDRLSEESVNNDISSWTKGRSGEALSLLKKRFSHRPVQEKFVCLNCGFETHADEQAALNIARSWLFLRSQEYKKYQTNKTTGNTDKRAFVETWQSFYRKKLKEVWKPAV

SEQ ID NO: 36712 - protein, 978 aa, synthetic construct
  REGION 1..978: note = engineered CasX variant
QEIKRINKIRRRLVKDSNTKKAGKTGPMKTLLVRVMTPDLRERLENLRKKPENIPQPISNTSRANLNKLLTDYTEMKKAILHVYWEEFQKDPVGLMSRVAQPASKKIDQNKLKPEMDEKGNLTTAGFACSQCGQPLFVYKLEQVSEKGKAYTNYFGRCNVAEHEKLILLAQLKPEKDSDEAVTYSLGKFGQRALDFYSIHVTKESTHPVKPLAQIAGNRYASPVGKALSDACMGTIASFLSKYQDIIIEHQKVVKGNQKRLESLRELAGKENLEYPSVTLPPQPHTKEGVDAYNEVIARVRMWVNLNLWQKLKLSRDDAKPLLRLKGFPSFPLVERQANAEVDWWDMVCNVKKLINEKKEDGKVFWQNLAGYKRQEALRPYLSSEEDRKKGKKFARYQLGDLLLHLEKKHGEDWGKVYDEAWERIDKKVEGLSKHIKLEEERRSEDAQSKAALTDWLRAKASFVIEGLKEADKDEFCRCELKLQKWYGDLRGKPFAIEAENSILDISGFSKQYNCAFIWQKDGVKKLNLYLIINYFKGGKLRFKKIKPEAFEANRFYTVINKKSGEIVPMEVNFNFDDPNLIILPLAFGKRVGREFIWNDLLSLETGSLKLANGRVIEKTLYNRRTRQDEPALFVALTFERREVLDSSNIKPMNLIGVDRGENIPAVIALTDPEGCPLSRFKDSLGNPTHILRIGESYKEKQRTIQAKKEVEQRRAGGYSRKYASKAKNLADDMVRNTARDLLYYAVTQDAMLIFENLSRGFGRQGKRTFMAERQYTRMEDWLTAKLAYEGLPSKTYLSKTLAQYTSKTCSNCGFTITSADYDRVLEKLKKTATGWMTTINGKELKVEGQITYYNRYKRQNVVKDLSVELDRLSEESVNNDISSWTKGRSGEALSLLKKRFSHRPVQEKFVCLNCGFETHADEQAALNIARSWLFLRSQEYKKYQTNKTTGNTDKRAFVETWQSFYRKKLKEVWKPAV

SEQ ID NO: 36713 - protein, 980 aa, synthetic construct
  REGION 1..980: note = engineered CasX variant
QEIKRINKIRRRLVKDSNTKKAGKTGPMKTLLVRVMTPDLRERLENLRKKPENIPQPISNTSRANLNKLLTDYTEMKKAILHVYWEEFQKDPVGLMSRVAQPASKKIDQNKLKPEMDEKGNLTTAGFACSQCGQPLFVYKLEQVSEKGKAYTNYFGRCNVAEHEKLILLAQLKPEKDSDEAVTYSLGKFGQRALDFYSIHVTKESTHPVKPLAQIAGNRYASYPVGKALSDACMGTIASFLSKYQDIIIEHQKVVKGNQKRLESLRELAGKENLEYPSVTLPPQPHTKEGVDAYNEVIARVRMWVNLNLWQKLKLSRDDAKPLLRLKGFPSFPLVERQANAEVDWWDMVCNVKKLINEKKEDGKVFWQNLAGYKRQEALRPYLSSEEDRKKGKKFARYQLGDLLLHLEKKHGEDWGKVYDEAWERIDKKVEGLSKHIKLEEERRSEDAQSKAALTDWLRAKASFVIEGLKEADKDEFCRCELKLQKWYGDLRGKPFAIEAENSILDISGFSKQYNCAFIWQKDGVKKLNLYLIINYFKGGKLRFKKIKPEAFEANRFYTVINKKSGEIVPMEVNFNFDDPNLIILPLAFGKRQGREFIWNDLLSLETGSLKLANGRVIEKTLYNRRTRQDEPALFVALTFERREVLDSSNIKTPMNLIGVDRGENIPAVIALTDPEGCPLSRFKDSLGNPTHILRIGESYKEKQRTIQAKKEVEQRRAGGYSRKYASKAKNLADDMVRNTARDLLYYAVTQDAMLIFENLSRGFGRQGKRTFMAERQYTRMEDWLTAKLAYEGLPSKTYLSKTLAQYTSKTCSNCGFTITSADYDRVLEKLKKTATGWMTTINGKELKVEGQITYYNRYKRQNVVKDLSVELDRLSEESVNNDISSWTKGRSGEALSLLKKRFSHRPVQEKFVCLNCGFETHADEQAALNIARSWLFLRSQEYKKYQTNKTTGNTDKRAFVETWQSFYRKKLKEVWKPAV

SEQ ID NO: 36714 - protein, 980 aa, synthetic construct
  REGION 1..980: note = engineered CasX variant
QEIKRINKIRRRLVKDSNTKKAGKTGPMKTLLVRVMTPDLRERLENLRKKPENIPQPISNTSRANLNKLLTDYTEMKKAILHVYWEEFQKDPVGLMSRVAQPASKKIDQNKLKPEMDEKGNLTTAGFACSQCGQPLFVYKLEQVSEKGKAYTNYFGRCNVAEHEKLILLAQLKPEKDSDEAVTYSLGKFGQRALDFYSIHVTKESTHPVKPLAQIAGNRYASHPVGKALSDACMGTIASFLSKYQDIIIEHQKVVKGNQKRLESLRELAGKENLEYPSVTLPPQPHTKEGVDAYNEVIARVRMWVNLNLWQKLKLSRDDAKPLLRLKGFPSFPLVERQANAEVDWWDMVCNVKKLINEKKEDGKVFWQNLAGYKRQEALRPYLSSEEDRKKGKKFARYQLGDLLLHLEKKHGEDWGKVYDEAWERIDKKVEGLSKHIKLEEERRSEDAQSKAALTDWLRAKASFVIEGLKEADKDEFCRCELKLQKWYGDLRGKPFAIEAENSILDISGFSKQYNCAFIWQKDGVKKLNLYLIINYFKGGKLRFKKIKPEAFEANRFYTVINKKSGEIVPMEVNFNFDDPNLIILPLAFGKRQGREFIWNDLLSLETGSLKLANGRVIEKTLYNRRTRQDEPALFVALTFERREVLDSSNIKTPMNLIGVDRGENIPAVIALTDPEGCPLSRFKDSLGNPTHILRIGESYKEKQRTIQAKKEVEQRRAGGYSRKYASKAKNLADDMVRNTARDLLYYAVTQDAMLIFENLSRGFGRQGKRTFMAERQYTRMEDWLTAKLAYEGLPSKTYLSKTLAQYTSKTCSNCGFTITSADYDRVLEKLKKTATGWMTTINGKELKVEGQITYYNRYKRQNVVKDLSVELDRLSEESVNNDISSWTKGRSGEALSLLKKRFSHRPVQEKFVCLNCGFETHADEQAALNIARSWLFLRSQEYKKYQTNKTTGNTDKRAFVETWQSFYRKKLKEVWKPAV

SEQ ID NO: 36715 - protein, 980 aa, synthetic construct
  REGION 1..980: note = engineered CasX variant
QEIKRINKIRRRLVKDSNTKKAGKTGPMKTLLVRVMTPDLRERLENLRKKPENIPQPISNTSRANLNKLLTDYTEMKKAILHVYWEEFQKDPVGLMSRVAQPASKKIDQNKLKPEMDEKGNLTTAGFACSQCGQPLFVYKLEQVSEKGKAYTNYFGRCNVAEHEKLILLAQLKPEKDSDEAVTYSLGKFGQRALDFYSIHVTKESTHPVKPLAQIAGNRYASSPVGKALSDACMGTIASFLSKYQDIIIEHQKVVKGNQKRLESLRELAGKENLEYPSVTLPPQPHTKEGVDAYNEVIARVRMWVNLNLWQKLKLSRDDAKPLLRLKGFPSFPLVERQANAEVDWWDMVCNVKKLINEKKEDGKVFWQNLAGYKRQEALRPYLSSEEDRKKGKKFARYQLGDLLLHLEKKHGEDWGKVYDEAWERIDKKVEGLSKHIKLEEERRSEDAQSKAALTDWLRAKASFVIEGLKEADKDEFCRCELKLQKWYGDLRGKPFAIEAENSILDISGFSKQYNCAFIWQKDGVKKLNLYLIINYFKGGKLRFKKIKPEAFEANRFYTVINKKSGEIVPMEVNFNFDDPNLIILPLAFGKRQGREFIWNDLLSLETGSLKLANGRVIEKTLYNRRTRQDEPALFVALTFERREVLDSSNIKTPMNLIGVDRGENIPAVIALTDPEGCPLSRFKDSLGNPTHILRIGESYKEKQRTIQAKKEVEQRRAGGYSRKYASKAKNLADDMVRNTARDLLYYAVTQDAMLIFENLSRGFGRQGKRTFMAERQYTRMEDWLTAKLAYEGLPSKTYLSKTLAQYTSKTCSNCGFTITSADYDRVLEKLKKTATGWMTTINGKELKVEGQITYYNRYKRQNVVKDLSVELDRLSEESVNNDISSWTKGRSGEALSLLKKRFSHRPVQEKFVCLNCGFETHADEQAALNIARSWLFLRSQEYKKYQTNKTTGNTDKRAFVETWQSFYRKKLKEVWKPAV

SEQ ID NO: 36716 - protein, 980 aa, synthetic construct
  REGION 1..980: note = engineered CasX variant
QEIKRINKIRRRLVKDSNTKKAGKTGPMKTLLVRVMTPDLRERLENLRKKPENIPQPISNTSRANLNKLLTDYTEMKKAILHVYWEEFQKDPVGLMSRVAQPASKKIDQNKLKPEMDEKGNLTTAGFACSQCGQPLFVYKLEQVSEKGKAYTNYFGRCNVAEHEKLILLAQLKPEKDSDEAVTYSLGKFGQRALDFYSIHVTKESTHPVKPLAQIAGNRYASTPVGKALSDACMGTIASFLSKYQDIIIEHQKVVKGNQKRLESLRELAGKENLEYPSVTLPPQPHTKEGVDAYNEVIARVRMWVNLNLWQKLKLSRDDAKPLLRLKGFPSFPLVERQANAEVDWWDMVCNVKKLINEKKEDGKVFWQNLAGYKRQEALRPYLSSEEDRKKGKKFARYQLGDLLLHLEKKHGEDWGKVYDEAWERIDKKVEGLSKHIKLEEERRSEDAQSKAALTDWLRAKASFVIEGLKEADKDEFCRCELKLQKWYGDLRGKPFAIEAENSILDISGFSKQYNCAFIWQKDGVKKLNLYLIINYFKGGKLRFKKIKPEAFEANRFYTVINKKSGEIVPMEVNFNFDDPNLIILPLAFGKRQGREFIWNDLLSLETGSLKLANGRVIEKTLYNRRTRQDEPALFVALTFERREVLDSSNIKTPMNLIGVDRGENIPAVIALTDPEGCPLSRFKDSLGNPTHILRIGESYKEKQRTIQAKKEVEQRRAGGYSRKYASKAKNLADDMVRNTARDLLYYAVTQDAMLIFENLSRGFGRQGKRTFMAERQYTRMEDWLTAKLAYEGLPSKTYLSKTLAQYTSKTCSNCGFTITSADYDRVLEKLKKTATGWMTTINGKELKVEGQITYYNRYKRQNVVKDLSVELDRLSEESVNNDISSWTKGRSGEALSLLKKRFSHRPVQEKFVCLNCGFETHADEQAALNIARSWLFLRSQEYKKYQTNKTTGNTDKRAFVETWQSFYRKKLKEVWKPAV

SEQ ID NO: 36717 - protein, 980 aa, synthetic construct
  REGION 1..980: note = engineered CasX variant
QEIKRINKIRRRLVKDSNTKKAGKTGPMKTLLVRVMTPDLRERLENLRKKPENIPQPISNTSRANLNKLLTDYTEMKKAILHVYWEEFQKDPVGLMSRVAQPASKKIDQNKLKPEMDEKGNLTTAGFACSQCGQPLFVYKLEQVSEKGKAYTNYFGRCNVAEHEKLILLAQLKPEKDSDEAVTYSLGKFGQRALDFYSIHVTKESTHPVKPLAQIAGNRYASAPVGKALSDACMGTIASFLSKYQDIIIEHQKVVKGNQKRLESLRELAGKENLEYPSVTLPPQPHTKEGVDAYNEVIARVRMWVNLNLWQKLKLSRDDAKPLLRLKGFPSFPLVERQANAEVDWWDMVCNVKKLINEKKEDGKVFWQNLAGYKRQEALRPYLSSEEDRKKGKKFARYQLGDLLLHLEKKHGEDWGKVYDEAWERIDKKVEGLSKHIKLEEERRSEDAQSKAALTDWLRAKASFVIEGLKEADKDEFCRCELKLQKWYGDLRGKPFAIEAENSILDISGFSKQYNCAFIWQKDGVKKLNLYLIINYFKGGKLRFKKIKPEAFEANRFYTVINKKSGEIVPMEVNFNFDDPNLIILPLAFGKRQGREFIWNDLLSLETGSLKLANGRVIEKTLYNRRTRQDEPALFVALTFERREVLDSSNIKTPMNLIGVDRGENIPAVIALTDPEGCPLSRFKDSLGNPTHILRIGESYKEKQRTIQAKKEVEQRRAGGYSRKYASKAKNLADDMVRNTARDLLYYAVTQDAMLIFENLSRGFGRQGKRTFMAERQYTRMEDWLTAKLAYEGLPSKTYLSKTLAQYTSKTCSNCGFTITSADYDRVLEKLKKTATGWMTTINGKELKVEGQITYYNRYKRQNVVKDLSVELDRLSEESVNNDISSWTKGRSGEALSLLKKRFSHRPVQEKFVCLNCGFETHADEQAALNIARSWLFLRSQEYKKYQTNKTTGNTDKRAFVETWQSFYRKKLKEVWKPAV

SEQ ID NO: 36718 - protein, 980 aa, synthetic construct
  REGION 1..980: note = engineered CasX variant
QEIKRINKIRRRLVKDSNTKKAGKTGPMKTLLVRVMTPDLRERLENLRKKPENIPQPISNTSRANLNKLLTDYTEMKKAILHVYWEEFQKDPVGLMSRVAQPASKKIDQNKLKPEMDEKGNLTTAGFACSQCGQPLFVYKLEQVSEKGKAYTNYFGRCNVAEHEKLILLAQLKPEKDSDEAVTYSLGKFGQRALDFYSIHVTKESTHPVKPLAQIAGNRYASVPVGKALSDACMGTIASFLSKYQDIIIEHQKVVKGNQKRLESLRELAGKENLEYPSVTLPPQPHTKEGVDAYNEVIARVRMWVNLNLWQKLKLSRDDAKPLLRLKGFPSFPLVERQANAEVDWWDMVCNVKKLINEKKEDGKVFWQNLAGYKRQEALRPYLSSEEDRKKGKKFARYQLGDLLLHLEKKHGEDWGKVYDEAWERIDKKVEGLSKHIKLEEERRSEDAQSKAALTDWLRAKASFVIEGLKEADKDEFCRCELKLQKWYGDLRGKPFAIEAENSILDISGFSKQYNCAFIWQKDGVKKLNLYLIINYFKGGKLRFKKIKPEAFEANRFYTVINKKSGEIVPMEVNFNFDDPNLIILPLAFGKRQGREFIWNDLLSLETGSLKLANGRVIEKTLYNRRTRQDEPALFVALTFERREVLDSSNIKTPMNLIGVDRGENIPAVIALTDPEGCPLSRFKDSLGNPTHILRIGESYKEKQRTIQAKKEVEQRRAGGYSRKYASKAKNLADDMVRNTARDLLYYAVTQDAMLIFENLSRGFGRQGKRTFMAERQYTRMEDWLTAKLAYEGLPSKTYLSKTLAQYTSKTCSNCGFTITSADYDRVLEKLKKTATGWMTTINGKELKVEGQITYYNRYKRQNVVKDLSVELDRLSEESVNNDISSWTKGRSGEALSLLKKRFSHRPVQEKFVCLNCGFETHADEQAALNIARSWLFLRSQEYKKYQTNKTTGNTDKRAFVETWQSFYRKKLKEVWKPAV

SEQ ID NO: 36719 - protein, 980 aa, synthetic construct
  REGION 1..980: note = engineered CasX variant
QEIKRINKIRRRLVKDSNTKKAGKTGPMKTLLVRVMTPDLRERLENLRKKPENIPQPISNTSRANLNKLLTDYTEMKKAILHVYWEEFQKDPVGLMSRVAQPASKKIDQNKLKPEMDEKGNLTTAGFACSQCGQPLFVYKLEQVSEKGKAYTNYFGRCNVAEHEKLIKLAQLKPEKDSDEAVTYSLGKFGQRALDFYSIHVTKESTHPVKPLAQIAGNRYASGPVGKALSDACMGTIASFLSKYQDIIIEHQKVVKGNQKRLESLRELAGKENLEYPSVTLPPQPHTKEGVDAYNEVIARVRMWVNLNLWQKLKLSRDDAKPLLRLKGFPSFPLVERQANAEVDWWDMVCNVKKLINEKKEDGKVFWQNLAGYKRQEALRPYLSSEEDRKKGKKFARYQLGDLLLHLEKKHGEDWGKVYDEAWERIDKKVEGLSKHIKLEEERRSEDAQSKAALTDWLRAKASFVIEGLKEADKDEFCRCELKLQKWYGDLRGKPFAIEAENSILDISGFSKQYNCAFIWQKDGVKKLNLYLIINYFKGGKLRFKKIKPEAFEANRFYTVINKKSGEIVPMEVNFNFDDPNLIILPLAFGKRQGREFIWNDLLSLETGSLKLANGRVIEKTLYNRRTRQDEPALFVALTFERREVLDSSNIKTPMNLIGVDRGENIPAVIALTDPEGCPLSRFKDSLGNPTHILRIGESYKEKQRTIQAKKEVEQRRAGGYSRKYASKAKNLADDMVRNTARDLLYYAVTQDAMLIFENLSRGFGRQGKRTFMAERQYTRMEDWLTAKLAYEGLPSKTYLSKTLAQYTSKTCSNCGFTITSADYDRVLEKLKKTATGWMTTINGKELKVEGQITYYNRYKRQNVVKDLSVELDRLSEESVNNDISSWTKGRSGEALSLLKKRFSHRPVQEKFVCLNCGFETHADEQAALNIARSWLFLRSQEYKKYQTNKTTGNTDKRAFVETWQSFYRKKLKEVWKPAV

SEQ ID NO: 36720 - protein, 979 aa, synthetic construct
  REGION 1..979: note = engineered CasX variant
QEIKRINKIRRRLVKDSNTKKAGKTGPMKTLLVRVMTPDLRERLENLRKKPENIPQPISNTSRANLNKLLTDYTEMKKAILHVYWEEFQKDPVGLMSRVAQPASKKIDQNKLKPEMDEKGNLTTAGFACSQCGQPLFVYKLEQVSEKGKAYTNYFGRCNVAEHEKLILLAQLKPEKDSDEAVTYSLGKFGQRALDFYSIHVTKESTHPVKPLAQIAGNRYASPVGKALSDACMGTIASFLSKYQDIIIEHQKVVKGNQKRLESLRELAGKENLEYPSVTLPPQPHTKEGVDAYNEVIARVRMWVNLNLWQKLKLSRDDAKPLLRLKGFPSFPLVERQANAEVDWWDMVCNVKKLINEKKEDGKVFWQNLAGYKRQEALRPYLSSEEDRKKGKKFARYQLGDLLLHLEKKHGEDWGKVYDEAWERIDKKVEGLSKHIKLEEERRSEDAQSKAALTDWLRAKASFVIEGLKEADKDEFCRCELKLQKWYGDLRGKPFAIEAENSILDISGFSKQYNCAFIWQKDGVKKLNLYLIINYFKGGKLRFKKIKPEAFEANRFYTVINKKSGEIVPMEVNFNFDDPNLIILPLAFGKRQGREFIWNDLLSLETGSLKLANGRVIEKTLYNRRTRQDEPALFVALTFERREVLDSSNIKTPMNLIGVDRGENIPAVIALTDPEGCPLSRFKDSLGNPTHILRIGESYKEKQRTIQAKKEVEQRRAGGYSRKYASKAKNLADDMVRNTARDLLYYAVTQDAMLIFENLSRGFGRQGKRTFMAERQYTRMEDWLTAKLAYEGLPSKTYLSKTLAQYTSKTCSNCGFTITSADYDRVLEKLKKTATGWMTTINGKELKVEGQITYYNRYKRQNVVKDLSVELDRLSEESVNNDISSWTKGRSGEALSLLKKRFSHRPVQEKFVCLNCGFETHADEQAALNIARSWLFLRSQEYKKYQTNKTTGNTDKRAFVETWQSFYRKKLKEVWKPAV

SEQ ID NO: 36721 - protein, 980 aa, synthetic construct
  REGION 1..980: note = engineered CasX variant
QEIKRINKIRRRLVKDSNTKKAGKTGPMKTLLVRVMTPDLRERLENLRKKPENIPQPISNTSRANLNKLLTDYTEMKKAILHVYWEEFQKDPVGLMSRVAQPASKKIDQNKLKPEMDEKGNLTTAGFACSQCGQPLFVYKLEQVSEKGKAYTNYFGRCNVAEHEKLILLAQLKPEKDSDEAVTYSLGKFGQRALDFYSIHVTKESTHPVKPLAQIAGNRYASYPVGKALSDACMGTIASFLSKYQDIIIEHQKVVKGNQKRLESLRELAGKENLEYPSVTLPPQPHTKEGVDAYNEVIARVRMWVNLNLWQKLKLSRDDAKPLLRLKGFPSFPLVERQANAEVDWWDMVCNVKKLINEKKEDGKVFWQNLAGYKRQEALRPYLSSEEDRKKGKKFARYQLGDLLLHLEKKHGEDWGKVYDEAWERIDKKVEGLSKHIKLEEERRSEDAQSKAALTDWLRAKASFVIEGLKEADKDEFCRCELKLQKWYGDLRGKPFAIEAENSILDISGFSKQYNCAFIWQKDGVKKLNLYLIINYFKGGKLRFKKIKPEAFEANRFYTVINKKSGEIVPMEVNFNFDDPNLIILPLAFGKRQGREFIWNDLLSLETGSLKLANGRVIEKTLYNRRTRQDEPALFVALTFERREVLDSSNIKPMSNLIGVDRGENIPAVIALTDPEGCPLSRFKDSLGNPTHILRIGESYKEKQRTIQAKKEVEQRRAGGYSRKYASKAKNLADDMVRNTARDLLYYAVTQDAMLIFENLSRGFGRQGKRTFMAERQYTRMEDWLTAKLAYEGLPSKTYLSKTLAQYTSKTCSNCGFTITSADYDRVLEKLKKTATGWMTTINGKELKVEGQITYYNRYKRQNVVKDLSVELDRLSEESVNNDISSWTKGRSGEALSLLKKRFSHRPVQEKFVCLNCGFETHADEQAALNIARSWLFLRSQEYKKYQTNKTTGNTDKRAFVETWQSFYRKKLKEVWKPAV

SEQ ID NO: 36722 - protein, 980 aa, synthetic construct
  REGION 1..980: note = engineered CasX variant
QEIKRINKIRRRLVKDSNTKKAGKTGPMKTLLVRVMTPDLRERLENLRKKPENIPQPISNTSRANLNKLLTDYTEMKKAILHVYWEEFQKDPVGLMSRVAQPASKKIDQNKLKPEMDEKGNLTTAGFACSQCGQPLFVYKLEQVSEKGKAYTNYFGRCNVAEHEKLILLAQLKPEKDSDEAVTYSLGKFGQRALDFYSIHVTKESTHPVKPLAQIAGNRYASHPVGKALSDACMGTIASFLSKYQDIIIEHQKVVKGNQKRLESLRELAGKENLEYPSVTLPPQPHTKEGVDAYNEVIARVRMWVNLNLWQKLKLSRDDAKPLLRLKGFPSFPLVERQANAEVDWWDMVCNVKKLINEKKEDGKVFWQNLAGYKRQEALRPYLSSEEDRKKGKKFARYQLGDLLLHLEKKHGEDWGKVYDEAWERIDKKVEGLSKHIKLEEERRSEDAQSKAALTDWLRAKASFVIEGLKEADKDEFCRCELKLQKWYGDLRGKPFAIEAENSILDISGFSKQYNCAFIWQKDGVKKLNLYLIINYFKGGKLRFKKIKPEAFEANRFYTVINKKSGEIVPMEVNFNFDDPNLIILPLAFGKRQGREFIWNDLLSLETGSLKLANGRVIEKTLYNRRTRQDEPALFVALTFERREVLDSSNIKPMSNLIGVDRGENIPAVIALTDPEGCPLSRFKDSLGNPTHILRIGESYKEKQRTIQAKKEVEQRRAGGYSRKYASKAKNLADDMVRNTARDLLYYAVTQDAMLIFENLSRGFGRQGKRTFMAERQYTRMEDWLTAKLAYEGLPSKTYLSKTLAQYTSKTCSNCGFTITSADYDRVLEKLKKTATGWMTTINGKELKVEGQITYYNRYKRQNVVKDLSVELDRLSEESVNNDISSWTKGRSGEALSLLKKRFSHRPVQEKFVCLNCGFETHADEQAALNIARSWLFLRSQEYKKYQTNKTTGNTDKRAFVETWQSFYRKKLKEVWKPAV

SEQ ID NO: 36723 - protein, 980 aa, synthetic construct
  REGION 1..980: note = engineered CasX variant
QEIKRINKIRRRLVKDSNTKKAGKTGPMKTLLVRVMTPDLRERLENLRKKPENIPQPISNTSRANLNKLLTDYTEMKKAILHVYWEEFQKDPVGLMSRVAQPASKKIDQNKLKPEMDEKGNLTTAGFACSQCGQPLFVYKLEQVSEKGKAYTNYFGRCNVAEHEKLILLAQLKPEKDSDEAVTYSLGKFGQRALDFYSIHVTKESTHPVKPLAQIAGNRYASSPVGKALSDACMGTIASFLSKYQDIIIEHQKVVKGNQKRLESLRELAGKENLEYPSVTLPPQPHTKEGVDAYNEVIARVRMWVNLNLWQKLKLSRDDAKPLLRLKGFPSFPLVERQANAEVDWWDMVCNVKKLINEKKEDGKVFWQNLAGYKRQEALRPYLSSEEDRKKGKKFARYQLGDLLLHLEKKHGEDWGKVYDEAWERIDKKVEGLSKHIKLEEERRSEDAQSKAALTDWLRAKASFVIEGLKEADKDEFCRCELKLQKWYGDLRGKPFAIEAENSILDISGFSKQYNCAFIWQKDGVKKLNLYLIINYFKGGKLRFKKIKPEAFEANRFYTVINKKSGEIVPMEVNFNFDDPNLIILPLAFGKRQGREFIWNDLLSLETGSLKLANGRVIEKTLYNRRTRQDEPALFVALTFERREVLDSSNIKPMSNLIGVDRGENIPAVIALTDPEGCPLSRFKDSLGNPTHILRIGESYKEKQRTIQAKKEVEQRRAGGYSRKYASKAKNLADDMVRNTARDLLYYAVTQDAMLIFENLSRGFGRQGKRTFMAERQYTRMEDWLTAKLAYEGLPSKTYLSKTLAQYTSKTCSNCGFTITSADYDRVLEKLKKTATGWMTTINGKELKVEGQITYYNRYKRQNVVKDLSVELDRLSEESVNNDISSWTKGRSGEALSLLKKRFSHRPVQEKFVCLNCGFETHADEQAALNIARSWLFLRSQEYKKYQTNKTTGNTDKRAFVETWQSFYRKKLKEVWKPAV

SEQ ID NO: 36724 - protein, 980 aa, synthetic construct
  REGION 1..980: note = engineered CasX variant
QEIKRINKIRRRLVKDSNTKKAGKTGPMKTLLVRVMTPDLRERLENLRKKPENIPQPISNTSRANLNKLLTDYTEMKKAILHVYWEEFQKDPVGLMSRVAQPASKKIDQNKLKPEMDEKGNLTTAGFACSQCGQPLFVYKLEQVSEKGKAYTNYFGRCNVAEHEKLILLAQLKPEKDSDEAVTYSLGKFGQRALDFYSIHVTKESTHPVKPLAQIAGNRYASTPVGKALSDACMGTIASFLSKYQDIIIEHQKVVKGNQKRLESLRELAGKENLEYPSVTLPPQPHTKEGVDAYNEVIARVRMWVNLNLWQKLKLSRDDAKPLLRLKGFPSFPLVERQANAEVDWWDMVCNVKKLINEKKEDGKVFWQNLAGYKRQEALRPYLSSEEDRKKGKKFARYQLGDLLLHLEKKHGEDWGKVYDEAWERIDKKVEGLSKHIKLEEERRSEDAQSKAALTDWLRAKASFVIEGLKEADKDEFCRCELKLQKWYGDLRGKPFAIEAENSILDISGFSKQYNCAFIWQKDGVKKLNLYLIINYFKGGKLRFKKIKPEAFEANRFYTVINKKSGEIVPMEVNFNFDDPNLIILPLAFGKRQGREFIWNDLLSLETGSLKLANGRVIEKTLYNRRTRQDEPALFVALTFERREVLDSSNIKPMSNLIGVDRGENIPAVIALTDPEGCPLSRFKDSLGNPTHILRIGESYKEKQRTIQAKKEVEQRRAGGYSRKYASKAKNLADDMVRNTARDLLYYAVTQDAMLIFENLSRGFGRQGKRTFMAERQYTRMEDWLTAKLAYEGLPSKTYLSKTLAQYTSKTCSNCGFTITSADYDRVLEKLKKTATGWMTTINGKELKVEGQITYYNRYKRQNVVKDLSVELDRLSEESVNNDISSWTKGRSGEALSLLKKRFSHRPVQEKFVCLNCGFETHADEQAALNIARSWLFLRSQEYKKYQTNKTTGNTDKRAFVETWQSFYRKKLKEVWKPAV

SEQ ID NO: 36725 - protein, 980 aa, synthetic construct
  REGION 1..980: note = engineered CasX variant
QEIKRINKIRRRLVKDSNTKKAGKTGPMKTLLVRVMTPDLRERLENLRKKPENIPQPISNTSRANLNKLLTDYTEMKKAILHVYWEEFQKDPVGLMSRVAQPASKKIDQNKLKPEMDEKGNLTTAGFACSQCGQPLFVYKLEQVSEKGKAYTNYFGRCNVAEHEKLILLAQLKPEKDSDEAVTYSLGKFGQRALDFYSIHVTKESTHPVKPLAQIAGNRYASAPVGKALSDACMGTIASFLSKYQDIIIEHQKVVKGNQKRLESLRELAGKENLEYPSVTLPPQPHTKEGVDAYNEVIARVRMWVNLNLWQKLKLSRDDAKPLLRLKGFPSFPLVERQANAEVDWWDMVCNVKKLINEKKEDGKVFWQNLAGYKRQEALRPYLSSEEDRKKGKKFARYQLGDLLLHLEKKHGEDWGKVYDEAWERIDKKVEGLSKHIKLEEERRSEDAQSKAALTDWLRAKASFVIEGLKEADKDEFCRCELKLQKWYGDLRGKPFAIEAENSILDISGFSKQYNCAFIWQKDGVKKLNLYLIINYFKGGKLRFKKIKPEAFEANRFYTVINKKSGEIVPMEVNFNFDDPNLIILPLAFGKRQGREFIWNDLLSLETGSLKLANGRVIEKTLYNRRTRQDEPALFVALTFERREVLDSSNIKPMSNLIGVDRGENIPAVIALTDPEGCPLSRFKDSLGNPTHILRIGESYKEKQRTIQAKKEVEQRRAGGYSRKYASKAKNLADDMVRNTARDLLYYAVTQDAMLIFENLSRGFGRQGKRTFMAERQYTRMEDWLTAKLAYEGLPSKTYLSKTLAQYTSKTCSNCGFTITSADYDRVLEKLKKTATGWMTTINGKELKVEGQITYYNRYKRQNVVKDLSVELDRLSEESVNNDISSWTKGRSGEALSLLKKRFSHRPVQEKFVCLNCGFETHADEQAALNIARSWLFLRSQEYKKYQTNKTTGNTDKRAFVETWQSFYRKKLKEVWKPAV

SEQ ID NO: 36726 - protein, 980 aa, synthetic construct
  REGION 1..980: note = engineered CasX variant
QEIKRINKIRRRLVKDSNTKKAGKTGPMKTLLVRVMTPDLRERLENLRKKPENIPQPISNTSRANLNKLLTDYTEMKKAILHVYWEEFQKDPVGLMSRVAQPASKKIDQNKLKPEMDEKGNLTTAGFACSQCGQPLFVYKLEQVSEKGKAYTNYFGRCNVAEHEKLILLAQLKPEKDSDEAVTYSLGKFGQRALDFYSIHVTKESTHPVKPLAQIAGNRYASVPVGKALSDACMGTIASFLSKYQDIIIEHQKVVKGNQKRLESLRELAGKENLEYPSVTLPPQPHTKEGVDAYNEVIARVRMWVNLNLWQKLKLSRDDAKPLLRLKGFPSFPLVERQANAEVDWWDMVCNVKKLINEKKEDGKVFWQNLAGYKRQEALRPYLSSEEDRKKGKKFARYQLGDLLLHLEKKHGEDWGKVYDEAWERIDKKVEGLSKHIKLEEERRSEDAQSKAALTDWLRAKASFVIEGLKEADKDEFCRCELKLQKWYGDLRGKPFAIEAENSILDISGFSKQYNCAFIWQKDGVKKLNLYLIINYFKGGKLRFKKIKPEAFEANRFYTVINKKSGEIVPMEVNFNFDDPNLIILPLAFGKRQGREFIWNDLLSLETGSLKLANGRVIEKTLYNRRTRQDEPALFVALTFERREVLDSSNIKPMSNLIGVDRGENIPAVIALTDPEGCPLSRFKDSLGNPTHILRIGESYKEKQRTIQAKKEVEQRRAGGYSRKYASKAKNLADDMVRNTARDLLYYAVTQDAMLIFENLSRGFGRQGKRTFMAERQYTRMEDWLTAKLAYEGLPSKTYLSKTLAQYTSKTCSNCGFTITSADYDRVLEKLKKTATGWMTTINGKELKVEGQITYYNRYKRQNVVKDLSVELDRLSEESVNNDISSWTKGRSGEALSLLKKRFSHRPVQEKFVCLNCGFETHADEQAALNIARSWLFLRSQEYKKYQTNKTTGNTDKRAFVETWQSFYRKKLKEVWKPAV

SEQ ID NO: 36727 - protein, 980 aa, synthetic construct
  REGION 1..980: note = engineered CasX variant
QEIKRINKIRRRLVKDSNTKKAGKTGPMKTLLVRVMTPDLRERLENLRKKPENIPQPISNTSRANLNKLLTDYTEMKKAILHVYWEEFQKDPVGLMSRVAQPASKKIDQNKLKPEMDEKGNLTTAGFACSQCGQPLFVYKLEQVSEKGKAYTNYFGRCNVAEHEKLIKLAQLKPEKDSDEAVTYSLGKFGQRALDFYSIHVTKESTHPVKPLAQIAGNRYASGPVGKALSDACMGTIASFLSKYQDIIIEHQKVVKGNQKRLESLRELAGKENLEYPSVTLPPQPHTKEGVDAYNEVIARVRMWVNLNLWQKLKLSRDDAKPLLRLKGFPSFPLVERQANAEVDWWDMVCNVKKLINEKKEDGKVFWQNLAGYKRQEALRPYLSSEEDRKKGKKFARYQLGDLLLHLEKKHGEDWGKVYDEAWERIDKKVEGLSKHIKLEEERRSEDAQSKAALTDWLRAKASFVIEGLKEADKDEFCRCELKLQKWYGDLRGKPFAIEAENSILDISGFSKQYNCAFIWQKDGVKKLNLYLIINYFKGGKLRFKKIKPEAFEANRFYTVINKKSGEIVPMEVNFNFDDPNLIILPLAFGKRQGREFIWNDLLSLETGSLKLANGRVIEKTLYNRRTRQDEPALFVALTFERREVLDSSNIKPMSNLIGVDRGENIPAVIALTDPEGCPLSRFKDSLGNPTHILRIGESYKEKQRTIQAKKEVEQRRAGGYSRKYASKAKNLADDMVRNTARDLLYYAVTQDAMLIFENLSRGFGRQGKRTFMAERQYTRMEDWLTAKLAYEGLPSKTYLSKTLAQYTSKTCSNCGFTITSADYDRVLEKLKKTATGWMTTINGKELKVEGQITYYNRYKRQNVVKDLSVELDRLSEESVNNDISSWTKGRSGEALSLLKKRFSHRPVQEKFVCLNCGFETHADEQAALNIARSWLFLRSQEYKKYQTNKTTGNTDKRAFVETWQSFYRKKLKEVWKPAV

SEQ ID NO: 36728 - protein, 979 aa, synthetic construct
  REGION 1..979: note = engineered CasX variant
QEIKRINKIRRRLVKDSNTKKAGKTGPMKTLLVRVMTPDLRERLENLRKKPENIPQPISNTSRANLNKLLTDYTEMKKAILHVYWEEFQKDPVGLMSRVAQPASKKIDQNKLKPEMDEKGNLTTAGFACSQCGQPLFVYKLEQVSEKGKAYTNYFGRCNVAEHEKLILLAQLKPEKDSDEAVTYSLGKFGQRALDFYSIHVTKESTHPVKPLAQIAGNRYASPVGKALSDACMGTIASFLSKYQDIIIEHQKVVKGNQKRLESLRELAGKENLEYPSVTLPPQPHTKEGVDAYNEVIARVRMWVNLNLWQKLKLSRDDAKPLLRLKGFPSFPLVERQANAEVDWWDMVCNVKKLINEKKEDGKVFWQNLAGYKRQEALRPYLSSEEDRKKGKKFARYQLGDLLLHLEKKHGEDWGKVYDEAWERIDKKVEGLSKHIKLEEERRSEDAQSKAALTDWLRAKASFVIEGLKEADKDEFCRCELKLQKWYGDLRGKPFAIEAENSILDISGFSKQYNCAFIWQKDGVKKLNLYLIINYFKGGKLRFKKIKPEAFEANRFYTVINKKSGEIVPMEVNFNFDDPNLIILPLAFGKRQGREFIWNDLLSLETGSLKLANGRVIEKTLYNRRTRQDEPALFVALTFERREVLDSSNIKPMSNLIGVDRGENIPAVIALTDPEGCPLSRFKDSLGNPTHILRIGESYKEKQRTIQAKKEVEQRRAGGYSRKYASKAKNLADDMVRNTARDLLYYAVTQDAMLIFENLSRGFGRQGKRTFMAERQYTRMEDWLTAKLAYEGLPSKTYLSKTLAQYTSKTCSNCGFTITSADYDRVLEKLKKTATGWMTTINGKELKVEGQITYYNRYKRQNVVKDLSVELDRLSEESVNNDISSWTKGRSGEALSLLKKRFSHRPVQEKFVCLNCGFETHADEQAALNIARSWLFLRSQEYKKYQTNKTTGNTDKRAFVETWQSFYRKKLKEVWKPAV

SEQ ID NO: 36729 - protein, 979 aa, synthetic construct
  REGION 1..979: note = engineered CasX variant
QEIKRINKIRRRLVKDSNTKKAGKTGPMKTLLVRVMTPDLRERLENLRKKPENIPQPISNTSRANLNKLLTDYTEMKKAILHVYWEEFQKDPVGLMSRVAQPASKKIDQNKLKPEMDEKGNLTTAGFACSQCGQPLFVYKLEQVSEKGKAYTNYFGRCNVAEHEKLILLAQLKPEKDSDEAVTYSLGKFGQRALDFYSIHVTKESTHPVKPLAQIAGNRYASYPVGKALSDACMGTIASFLSKYQDIIIEHQKVVKGNQKRLESLRELAGKENLEYPSVTLPPQPHTKEGVDAYNEVIARVRMWVNLNLWQKLKLSRDDAKPLLRLKGFPSFPLVERQANAEVDWWDMVCNVKKLINEKKEDGKVFWQNLAGYKRQEALRPYLSSEEDRKKGKKFARYQLGDLLLHLEKKHGEDWGKVYDEAWERIDKKVEGLSKHIKLEEERRSEDAQSKAALTDWLRAKASFVIEGLKEADKDEFCRCELKLQKWYGDLRGKPFAIEAENSILDISGFSKQYNCAFIWQKDGVKKLNLYLIINYFKGGKLRFKKIKPEAFEANRFYTVINKKSGEIVPMEVNFNFDDPNLIILPLAFGKRQGREFIWNDLLSLETGSLKLANGRVIEKTLYNRRTRQDEPALFVALTFERREVLDSSNIKPMNLIGVDRGENIPAVIALTDPEGCPLSRFKDSLGNPTHILRIRESYKEKQRTIQAKKEVEQRRAGGYSRKYASKAKNLADDMVRNTARDLLYYAVTQDAMLIFENLSRGFGRQGKRTFMAERQYTRMEDWLTAKLAYEGLPSKTYLSKTLAQYTSKTCSNCGFTITSADYDRVLEKLKKTATGWMTTINGKELKVEGQITYYNRYKRQNVVKDLSVELDRLSEESVNNDISSWTKGRSGEALSLLKKRFSHRPVQEKFVCLNCGFETHADEQAALNIARSWLFLRSQEYKKYQTNKTTGNTDKRAFVETWQSFYRKKLKEVWKPAV

SEQ ID NO: 36730 - protein, 979 aa, synthetic construct
  REGION 1..979: note = engineered CasX variant
QEIKRINKIRRRLVKDSNTKKAGKTGPMKTLLVRVMTPDLRERLENLRKKPENIPQPISNTSRANLNKLLTDYTEMKKAILHVYWEEFQKDPVGLMSRVAQPASKKIDQNKLKPEMDEKGNLTTAGFACSQCGQPLFVYKLEQVSEKGKAYTNYFGRCNVAEHEKLILLAQLKPEKDSDEAVTYSLGKFGQRALDFYSIHVTKESTHPVKPLAQIAGNRYASHPVGKALSDACMGTIASFLSKYQDIIIEHQKVVKGNQKRLESLRELAGKENLEYPSVTLPPQPHTKEGVDAYNEVIARVRMWVNLNLWQKLKLSRDDAKPLLRLKGFPSFPLVERQANAEVDWWDMVCNVKKLINEKKEDGKVFWQNLAGYKRQEALRPYLSSEEDRKKGKKFARYQLGDLLLHLEKKHGEDWGKVYDEAWERIDKKVEGLSKHIKLEEERRSEDAQSKAALTDWLRAKASFVIEGLKEADKDEFCRCELKLQKWYGDLRGKPFAIEAENSILDISGFSKQYNCAFIWQKDGVKKLNLYLIINYFKGGKLRFKKIKPEAFEANRFYTVINKKSGEIVPMEVNFNFDDPNLIILPLAFGKRQGREFIWNDLLSLETGSLKLANGRVIEKTLYNRRTRQDEPALFVALTFERREVLDSSNIKPMNLIGVDRGENIPAVIALTDPEGCPLSRFKDSLGNPTHILRIRESYKEKQRTIQAKKEVEQRRAGGYSRKYASKAKNLADDMVRNTARDLLYYAVTQDAMLIFENLSRGFGRQGKRTFMAERQYTRMEDWLTAKLAYEGLPSKTYLSKTLAQYTSKTCSNCGFTITSADYDRVLEKLKKTATGWMTTINGKELKVEGQITYYNRYKRQNVVKDLSVELDRLSEESVNNDISSWTKGRSGEALSLLKKRFSHRPVQEKFVCLNCGFETHADEQAALNIARSWLFLRSQEYKKYQTNKTTGNTDKRAFVETWQSFYRKKLKEVWKPAV

SEQ ID NO: 36731 - protein, 979 aa, synthetic construct
  REGION 1..979: note = engineered CasX variant
QEIKRINKIRRRLVKDSNTKKAGKTGPMKTLLVRVMTPDLRERLENLRKKPENIPQPISNTSRANLNKLLTDYTEMKKAILHVYWEEFQKDPVGLMSRVAQPASKKIDQNKLKPEMDEKGNLTTAGFACSQCGQPLFVYKLEQVSEKGKAYTNYFGRCNVAEHEKLILLAQLKPEKDSDEAVTYSLGKFGQRALDFYSIHVTKESTHPVKPLAQIAGNRYASSPVGKALSDACMGTIASFLSKYQDIIIEHQKVVKGNQKRLESLRELAGKENLEYPSVTLPPQPHTKEGVDAYNEVIARVRMWVNLNLWQKLKLSRDDAKPLLRLKGFPSFPLVERQANAEVDWWDMVCNVKKLINEKKEDGKVFWQNLAGYKRQEALRPYLSSEEDRKKGKKFARYQLGDLLLHLEKKHGEDWGKVYDEAWERIDKKVEGLSKHIKLEEERRSEDAQSKAALTDWLRAKASFVIEGLKEADKDEFCRCELKLQKWYGDLRGKPFAIEAENSILDISGFSKQYNCAFIWQKDGVKKLNLYLIINYFKGGKLRFKKIKPEAFEANRFYTVINKKSGEIVPMEVNFNFDDPNLIILPLAFGKRQGREFIWNDLLSLETGSLKLANGRVIEKTLYNRRTRQDEPALFVALTFERREVLDSSNIKPMNLIGVDRGENIPAVIALTDPEGCPLSRFKDSLGNPTHILRIRESYKEKQRTIQAKKEVEQRRAGGYSRKYASKAKNLADDMVRNTARDLLYYAVTQDAMLIFENLSRGFGRQGKRTFMAERQYTRMEDWLTAKLAYEGLPSKTYLSKTLAQYTSKTCSNCGFTITSADYDRVLEKLKKTATGWMTTINGKELKVEGQITYYNRYKRQNVVKDLSVELDRLSEESVNNDISSWTKGRSGEALSLLKKRFSHRPVQEKFVCLNCGFETHADEQAALNIARSWLFLRSQEYKKYQTNKTTGNTDKRAFVETWQSFYRKKLKEVWKPAV

SEQ ID NO: 36732 - protein, 979 aa, synthetic construct
  REGION 1..979: note = engineered CasX variant
QEIKRINKIRRRLVKDSNTKKAGKTGPMKTLLVRVMTPDLRERLENLRKKPENIPQPISNTSRANLNKLLTDYTEMKKAILHVYWEEFQKDPVGLMSRVAQPASKKIDQNKLKPEMDEKGNLTTAGFACSQCGQPLFVYKLEQVSEKGKAYTNYFGRCNVAEHEKLILLAQLKPEKDSDEAVTYSLGKFGQRALDFYSIHVTKESTHPVKPLAQIAGNRYASTPVGKALSDACMGTIASFLSKYQDIIIEHQKVVKGNQKRLESLRELAGKENLEYPSVTLPPQPHTKEGVDAYNEVIARVRMWVNLNLWQKLKLSRDDAKPLLRLKGFPSFPLVERQANAEVDWWDMVCNVKKLINEKKEDGKVFWQNLAGYKRQEALRPYLSSEEDRKKGKKFARYQLGDLLLHLEKKHGEDWGKVYDEAWERIDKKVEGLSKHIKLEEERRSEDAQSKAALTDWLRAKASFVIEGLKEADKDEFCRCELKLQKWYGDLRGKPFAIEAENSILDISGFSKQYNCAFIWQKDGVKKLNLYLIINYFKGGKLRFKKIKPEAFEANRFYTVINKKSGEIVPMEVNFNFDDPNLIILPLAFGKRQGREFIWNDLLSLETGSLKLANGRVIEKTLYNRRTRQDEPALFVALTFERREVLDSSNIKPMNLIGVDRGENIPAVIALTDPEGCPLSRFKDSLGNPTHILRIRESYKEKQRTIQAKKEVEQRRAGGYSRKYASKAKNLADDMVRNTARDLLYYAVTQDAMLIFENLSRGFGRQGKRTFMAERQYTRMEDWLTAKLAYEGLPSKTYLSKTLAQYTSKTCSNCGFTITSADYDRVLEKLKKTATGWMTTINGKELKVEGQITYYNRYKRQNVVKDLSVELDRLSEESVNNDISSWTKGRSGEALSLLKKRFSHRPVQEKFVCLNCGFETHADEQAALNIARSWLFLRSQEYKKYQTNKTTGNTDKRAFVETWQSFYRKKLKEVWKPAV

SEQ ID NO: 36733 - protein, 979 aa, synthetic construct
  REGION 1..979: note = engineered CasX variant
QEIKRINKIRRRLVKDSNTKKAGKTGPMKTLLVRVMTPDLRERLENLRKKPENIPQPISNTSRANLNKLLTDYTEMKKAILHVYWEEFQKDPVGLMSRVAQPASKKIDQNKLKPEMDEKGNLTTAGFACSQCGQPLFVYKLEQVSEKGKAYTNYFGRCNVAEHEKLILLAQLKPEKDSDEAVTYSLGKFGQRALDFYSIHVTKESTHPVKPLAQIAGNRYASAPVGKALSDACMGTIASFLSKYQDIIIEHQKVVKGNQKRLESLRELAGKENLEYPSVTLPPQPHTKEGVDAYNEVIARVRMWVNLNLWQKLKLSRDDAKPLLRLKGFPSFPLVERQANAEVDWWDMVCNVKKLINEKKEDGKVFWQNLAGYKRQEALRPYLSSEEDRKKGKKFARYQLGDLLLHLEKKHGEDWGKVYDEAWERIDKKVEGLSKHIKLEEERRSEDAQSKAALTDWLRAKASFVIEGLKEADKDEFCRCELKLQKWYGDLRGKPFAIEAENSILDISGFSKQYNCAFIWQKDGVKKLNLYLIINYFKGGKLRFKKIKPEAFEANRFYTVINKKSGEIVPMEVNFNFDDPNLIILPLAFGKRQGREFIWNDLLSLETGSLKLANGRVIEKTLYNRRTRQDEPALFVALTFERREVLDSSNIKPMNLIGVDRGENIPAVIALTDPEGCPLSRFKDSLGNPTHILRIRESYKEKQRTIQAKKEVEQRRAGGYSRKYASKAKNLADDMVRNTARDLLYYAVTQDAMLIFENLSRGFGRQGKRTFMAERQYTRMEDWLTAKLAYEGLPSKTYLSKTLAQYTSKTCSNCGFTITSADYDRVLEKLKKTATGWMTTINGKELKVEGQITYYNRYKRQNVVKDLSVELDRLSEESVNNDISSWTKGRSGEALSLLKKRFSHRPVQEKFVCLNCGFETHADEQAALNIARSWLFLRSQEYKKYQTNKTTGNTDKRAFVETWQSFYRKKLKEVWKPAV

SEQ ID NO: 36734 - protein, 979 aa, synthetic construct
  REGION 1..979: note = engineered CasX variant
QEIKRINKIRRRLVKDSNTKKAGKTGPMKTLLVRVMTPDLRERLENLRKKPENIPQPISNTSRANLNKLLTDYTEMKKAILHVYWEEFQKDPVGLMSRVAQPASKKIDQNKLKPEMDEKGNLTTAGFACSQCGQPLFVYKLEQVSEKGKAYTNYFGRCNVAEHEKLILLAQLKPEKDSDEAVTYSLGKFGQRALDFYSIHVTKESTHPVKPLAQIAGNRYASVPVGKALSDACMGTIASFLSKYQDIIIEHQKVVKGNQKRLESLRELAGKENLEYPSVTLPPQPHTKEGVDAYNEVIARVRMWVNLNLWQKLKLSRDDAKPLLRLKGFPSFPLVERQANAEVDWWDMVCNVKKLINEKKEDGKVFWQNLAGYKRQEALRPYLSSEEDRKKGKKFARYQLGDLLLHLEKKHGEDWGKVYDEAWERIDKKVEGLSKHIKLEEERRSEDAQSKAALTDWLRAKASFVIEGLKEADKDEFCRCELKLQKWYGDLRGKPFAIEAENSILDISGFSKQYNCAFIWQKDGVKKLNLYLIINYFKGGKLRFKKIKPEAFEANRFYTVINKKSGEIVPMEVNFNFDDPNLIILPLAFGKRQGREFIWNDLLSLETGSLKLANGRVIEKTLYNRRTRQDEPALFVALTFERREVLDSSNIKPMNLIGVDRGENIPAVIALTDPEGCPLSRFKDSLGNPTHILRIRESYKEKQRTIQAKKEVEQRRAGGYSRKYASKAKNLADDMVRNTARDLLYYAVTQDAMLIFENLSRGFGRQGKRTFMAERQYTRMEDWLTAKLAYEGLPSKTYLSKTLAQYTSKTCSNCGFTITSADYDRVLEKLKKTATGWMTTINGKELKVEGQITYYNRYKRQNVVKDLSVELDRLSEESVNNDISSWTKGRSGEALSLLKKRFSHRPVQEKFVCLNCGFETHADEQAALNIARSWLFLRSQEYKKYQTNKTTGNTDKRAFVETWQSFYRKKLKEVWKPAV

SEQ ID NO: 36735 - protein, 979 aa, synthetic construct
  REGION 1..979: note = engineered CasX variant
QEIKRINKIRRRLVKDSNTKKAGKTGPMKTLLVRVMTPDLRERLENLRKKPENIPQPISNTSRANLNKLLTDYTEMKKAILHVYWEEFQKDPVGLMSRVAQPASKKIDQNKLKPEMDEKGNLTTAGFACSQCGQPLFVYKLEQVSEKGKAYTNYFGRCNVAEHEKLIKLAQLKPEKDSDEAVTYSLGKFGQRALDFYSIHVTKESTHPVKPLAQIAGNRYASGPVGKALSDACMGTIASFLSKYQDIIIEHQKVVKGNQKRLESLRELAGKENLEYPSVTLPPQPHTKEGVDAYNEVIARVRMWVNLNLWQKLKLSRDDAKPLLRLKGFPSFPLVERQANAEVDWWDMVCNVKKLINEKKEDGKVFWQNLAGYKRQEALRPYLSSEEDRKKGKKFARYQLGDLLLHLEKKHGEDWGKVYDEAWERIDKKVEGLSKHIKLEEERRSEDAQSKAALTDWLRAKASFVIEGLKEADKDEFCRCELKLQKWYGDLRGKPFAIEAENSILDISGFSKQYNCAFIWQKDGVKKLNLYLIINYFKGGKLRFKKIKPEAFEANRFYTVINKKSGEIVPMEVNFNFDDPNLIILPLAFGKRQGREFIWNDLLSLETGSLKLANGRVIEKTLYNRRTRQDEPALFVALTFERREVLDSSNIKPMNLIGVDRGENIPAVIALTDPEGCPLSRFKDSLGNPTHILRIRESYKEKQRTIQAKKEVEQRRAGGYSRKYASKAKNLADDMVRNTARDLLYYAVTQDAMLIFENLSRGFGRQGKRTFMAERQYTRMEDWLTAKLAYEGLPSKTYLSKTLAQYTSKTCSNCGFTITSADYDRVLEKLKKTATGWMTTINGKELKVEGQITYYNRYKRQNVVKDLSVELDRLSEESVNNDISSWTKGRSGEALSLLKKRFSHRPVQEKFVCLNCGFETHADEQAALNIARSWLFLRSQEYKKYQTNKTTGNTDKRAFVETWQSFYRKKLKEVWKPAV

SEQ ID NO: 36736 - protein, 978 aa, synthetic construct
  REGION 1..978: note = engineered CasX variant
QEIKRINKIRRRLVKDSNTKKAGKTGPMKTLLVRVMTPDLRERLENLRKKPENIPQPISNTSRANLNKLLTDYTEMKKAILHVYWEEFQKDPVGLMSRVAQPASKKIDQNKLKPEMDEKGNLTTAGFACSQCGQPLFVYKLEQVSEKGKAYTNYFGRCNVAEHEKLILLAQLKPEKDSDEAVTYSLGKFGQRALDFYSIHVTKESTHPVKPLAQIAGNRYASPVGKALSDACMGTIASFLSKYQDIIIEHQKVVKGNQKRLESLRELAGKENLEYPSVTLPPQPHTKEGVDAYNEVIARVRMWVNLNLWQKLKLSRDDAKPLLRLKGFPSFPLVERQANAEVDWWDMVCNVKKLINEKKEDGKVFWQNLAGYKRQEALRPYLSSEEDRKKGKKFARYQLGDLLLHLEKKHGEDWGKVYDEAWERIDKKVEGLSKHIKLEEERRSEDAQSKAALTDWLRAKASFVIEGLKEADKDEFCRCELKLQKWYGDLRGKPFAIEAENSILDISGFSKQYNCAFIWQKDGVKKLNLYLIINYFKGGKLRFKKIKPEAFEANRFYTVINKKSGEIVPMEVNFNFDDPNLIILPLAFGKRQGREFIWNDLLSLETGSLKLANGRVIEKTLYNRRTRQDEPALFVALTFERREVLDSSNIKPMNLIGVDRGENIPAVIALTDPEGCPLSRFKDSLGNPTHILRIRESYKEKQRTIQAKKEVEQRRAGGYSRKYASKAKNLADDMVRNTARDLLYYAVTQDAMLIFENLSRGFGRQGKRTFMAERQYTRMEDWLTAKLAYEGLPSKTYLSKTLAQYTSKTCSNCGFTITSADYDRVLEKLKKTATGWMTTINGKELKVEGQITYYNRYKRQNVVKDLSVELDRLSEESVNNDISSWTKGRSGEALSLLKKRFSHRPVQEKFVCLNCGFETHADEQAALNIARSWLFLRSQEYKKYQTNKTTGNTDKRAFVETWQSFYRKKLKEVWKPAV

SEQ ID NO: 36737 - protein, 979 aa, synthetic construct
  REGION 1..979: note = engineered CasX variant
QEIKRINKIRRRLVKDSNTKKAGKTGPMKTLLVRVMTPDLRERLENLRKKPENIPQPISNTSRANLNKLLTDYTEMKKAILHVYWEEFQKDPVGLMSRVAQPASKKIDQNKLKPEMDEKGNLTTAGFACSQCGQPLFVYKLEQVSEKGKAYTNYFGRCNVAEHEKLILLAQLKPEKDSDEAVTYSLGKFGQRALDFYSIHVTKESTHPVKPLAQIAGNRYASYPVGKALSDACMGTIASFLSKYQDIIIEHQKVVKGNQKRLESLRELAGKENLEYPSVTLPPQPHTKEGVDAYNEVIARVRMWVNLNLWQKLKLSRDDAKPLLRLKGFPSFPLVERQANAEVDWWDMVCNVKKLINEKKEDGKVFWQNLAGYKRQEALRPYLSSEEDRKKGKKFARYQLGDLLLHLEKKHGEDWGKVYDEAWERIDKKVEGLSKHIKLEEERRSEDAQSKAALTDWLRAKASFVIEGLKEADKDEFCRCELKLQKWYGDLRGKPFAIEAENSILDISGFSKQYNCAFIWQKDGVKKLNLYLIINYFKGGKLRFKKIKPEAFEANRFYTVINKKSGEIVPMEVNFNFDDPNLIILPLAFGKRQGREFIWNDLLSLETGSLKLANGRVIEKTLYNRRTRQDEPALFVALTFERREVLDSSNIKPMNLIGVDRGENIPAVIALTDPEGCPLSRFKDSLGNPTHILRIGESYKEKQRTIQAKKEVEQRRAGGYSRKYASKAKNLADDMVRNTARDLLYYAVTQDAMLIFENLSRGFGRQGKRTFSAERQYTRMEDWLTAKLAYEGLPSKTYLSKTLAQYTSKTCSNCGFTITSADYDRVLEKLKKTATGWMTTINGKELKVEGQITYYNRYKRQNVVKDLSVELDRLSEESVNNDISSWTKGRSGEALSLLKKRFSHRPVQEKFVCLNCGFETHADEQAALNIARSWLFLRSQEYKKYQTNKTTGNTDKRAFVETWQSFYRKKLKEVWKPAV

SEQ ID NO: 36738 - protein, 979 aa, synthetic construct
  REGION 1..979: note = engineered CasX variant
QEIKRINKIRRRLVKDSNTKKAGKTGPMKTLLVRVMTPDLRERLENLRKKPENIPQPISNTSRANLNKLLTDYTEMKKAILHVYWEEFQKDPVGLMSRVAQPASKKIDQNKLKPEMDEKGNLTTAGFACSQCGQPLFVYKLEQVSEKGKAYTNYFGRCNVAEHEKLILLAQLKPEKDSDEAVTYSLGKFGQRALDFYSIHVTKESTHPVKPLAQIAGNRYASHPVGKALSDACMGTIASFLSKYQDIIIEHQKVVKGNQKRLESLRELAGKENLEYPSVTLPPQPHTKEGVDAYNEVIARVRMWVNLNLWQKLKLSRDDAKPLLRLKGFPSFPLVERQANAEVDWWDMVCNVKKLINEKKEDGKVFWQNLAGYKRQEALRPYLSSEEDRKKGKKFARYQLGDLLLHLEKKHGEDWGKVYDEAWERIDKKVEGLSKHIKLEEERRSEDAQSKAALTDWLRAKASFVIEGLKEADKDEFCRCELKLQKWYGDLRGKPFAIEAENSILDISGFSKQYNCAFIWQKDGVKKLNLYLIINYFKGGKLRFKKIKPEAFEANRFYTVINKKSGEIVPMEVNFNFDDPNLIILPLAFGKRQGREFIWNDLLSLETGSLKLANGRVIEKTLYNRRTRQDEPALFVALTFERREVLDSSNIKPMNLIGVDRGENIPAVIALTDPEGCPLSRFKDSLGNPTHILRIGESYKEKQRTIQAKKEVEQRRAGGYSRKYASKAKNLADDMVRNTARDLLYYAVTQDAMLIFENLSRGFGRQGKRTFSAERQYTRMEDWLTAKLAYEGLPSKTYLSKTLAQYTSKTCSNCGFTITSADYDRVLEKLKKTATGWMTTINGKELKVEGQITYYNRYKRQNVVKDLSVELDRLSEESVNNDISSWTKGRSGEALSLLKKRFSHRPVQEKFVCLNCGFETHADEQAALNIARSWLFLRSQEYKKYQTNKTTGNTDKRAFVETWQSFYRKKLKEVWKPAV

SEQ ID NO: 36739 - protein, 979 aa, synthetic construct
  REGION 1..979: note = engineered CasX variant
QEIKRINKIRRRLVKDSNTKKAGKTGPMKTLLVRVMTPDLRERLENLRKKPENIPQPISNTSRANLNKLLTDYTEMKKAILHVYWEEFQKDPVGLMSRVAQPASKKIDQNKLKPEMDEKGNLTTAGFACSQCGQPLFVYKLEQVSEKGKAYTNYFGRCNVAEHEKLILLAQLKPEKDSDEAVTYSLGKFGQRALDFYSIHVTKESTHPVKPLAQIAGNRYASSPVGKALSDACMGTIASFLSKYQDIIIEHQKVVKGNQKRLESLRELAGKENLEYPSVTLPPQPHTKEGVDAYNEVIARVRMWVNLNLWQKLKLSRDDAKPLLRLKGFPSFPLVERQANAEVDWWDMVCNVKKLINEKKEDGKVFWQNLAGYKRQEALRPYLSSEEDRKKGKKFARYQLGDLLLHLEKKHGEDWGKVYDEAWERIDKKVEGLSKHIKLEEERRSEDAQSKAALTDWLRAKASFVIEGLKEADKDEFCRCELKLQKWYGDLRGKPFAIEAENSILDISGFSKQYNCAFIWQKDGVKKLNLYLIINYFKGGKLRFKKIKPEAFEANRFYTVINKKSGEIVPMEVNFNFDDPNLIILPLAFGKRQGREFIWNDLLSLETGSLKLANGRVIEKTLYNRRTRQDEPALFVALTFERREVLDSSNIKPMNLIGVDRGENIPAVIALTDPEGCPLSRFKDSLGNPTHILRIGESYKEKQRTIQAKKEVEQRRAGGYSRKYASKAKNLADDMVRNTARDLLYYAVTQDAMLIFENLSRGFGRQGKRTFSAERQYTRMEDWLTAKLAYEGLPSKTYLSKTLAQYTSKTCSNCGFTITSADYDRVLEKLKKTATGWMTTINGKELKVEGQITYYNRYKRQNVVKDLSVELDRLSEESVNNDISSWTKGRSGEALSLLKKRFSHRPVQEKFVCLNCGFETHADEQAALNIARSWLFLRSQEYKKYQTNKTTGNTDKRAFVETWQSFYRKKLKEVWKPAV

SEQ ID NO: 36740 - protein, 979 aa, synthetic construct
  REGION 1..979: note = engineered CasX variant
QEIKRINKIRRRLVKDSNTKKAGKTGPMKTLLVRVMTPDLRERLENLRKKPENIPQPISNTSRANLNKLLTDYTEMKKAILHVYWEEFQKDPVGLMSRVAQPASKKIDQNKLKPEMDEKGNLTTAGFACSQCGQPLFVYKLEQVSEKGKAYTNYFGRCNVAEHEKLILLAQLKPEKDSDEAVTYSLGKFGQRALDFYSIHVTKESTHPVKPLAQIAGNRYASTPVGKALSDACMGTIASFLSKYQDIIIEHQKVVKGNQKRLESLRELAGKENLEYPSVTLPPQPHTKEGVDAYNEVIARVRMWVNLNLWQKLKLSRDDAKPLLRLKGFPSFPLVERQANAEVDWWDMVCNVKKLINEKKEDGKVFWQNLAGYKRQEALRPYLSSEEDRKKGKKFARYQLGDLLLHLEKKHGEDWGKVYDEAWERIDKKVEGLSKHIKLEEERRSEDAQSKAALTDWLRAKASFVIEGLKEADKDEFCRCELKLQKWYGDLRGKPFAIEAENSILDISGFSKQYNCAFIWQKDGVKKLNLYLIINYFKGGKLRFKKIKPEAFEANRFYTVINKKSGEIVPMEVNFNFDDPNLIILPLAFGKRQGREFIWNDLLSLETGSLKLANGRVIEKTLYNRRTRQDEPALFVALTFERREVLDSSNIKPMNLIGVDRGENIPAVIALTDPEGCPLSRFKDSLGNPTHILRIGESYKEKQRTIQAKKEVEQRRAGGYSRKYASKAKNLADDMVRNTARDLLYYAVTQDAMLIFENLSRGFGRQGKRTFSAERQYTRMEDWLTAKLAYEGLPSKTYLSKTLAQYTSKTCSNCGFTITSADYDRVLEKLKKTATGWMTTINGKELKVEGQITYYNRYKRQNVVKDLSVELDRLSEESVNNDISSWTKGRSGEALSLLKKRFSHRPVQEKFVCLNCGFETHADEQAALNIARSWLFLRSQEYKKYQTNKTTGNTDKRAFVETWQSFYRKKLKEVWKPAV

SEQ ID NO: 36741 - protein, 979 aa, synthetic construct
  REGION 1..979: note = engineered CasX variant
QEIKRINKIRRRLVKDSNTKKAGKTGPMKTLLVRVMTPDLRERLENLRKKPENIPQPISNTSRANLNKLLTDYTEMKKAILHVYWEEFQKDPVGLMSRVAQPASKKIDQNKLKPEMDEKGNLTTAGFACSQCGQPLFVYKLEQVSEKGKAYTNYFGRCNVAEHEKLILLAQLKPEKDSDEAVTYSLGKFGQRALDFYSIHVTKESTHPVKPLAQIAGNRYASAPVGKALSDACMGTIASFLSKYQDIIIEHQKVVKGNQKRLESLRELAGKENLEYPSVTLPPQPHTKEGVDAYNEVIARVRMWVNLNLWQKLKLSRDDAKPLLRLKGFPSFPLVERQANAEVDWWDMVCNVKKLINEKKEDGKVFWQNLAGYKRQEALRPYLSSEEDRKKGKKFARYQLGDLLLHLEKKHGEDWGKVYDEAWERIDKKVEGLSKHIKLEEERRSEDAQSKAALTDWLRAKASFVIEGLKEADKDEFCRCELKLQKWYGDLRGKPFAIEAENSILDISGFSKQYNCAFIWQKDGVKKLNLYLIINYFKGGKLRFKKIKPEAFEANRFYTVINKKSGEIVPMEVNFNFDDPNLIILPLAFGKRQGREFIWNDLLSLETGSLKLANGRVIEKTLYNRRTRQDEPALFVALTFERREVLDSSNIKPMNLIGVDRGENIPAVIALTDPEGCPLSRFKDSLGNPTHILRIGESYKEKQRTIQAKKEVEQRRAGGYSRKYASKAKNLADDMVRNTARDLLYYAVTQDAMLIFENLSRGFGRQGKRTFSAERQYTRMEDWLTAKLAYEGLPSKTYLSKTLAQYTSKTCSNCGFTITSADYDRVLEKLKKTATGWMTTINGKELKVEGQITYYNRYKRQNVVKDLSVELDRLSEESVNNDISSWTKGRSGEALSLLKKRFSHRPVQEKFVCLNCGFETHADEQAALNIARSWLFLRSQEYKKYQTNKTTGNTDKRAFVETWQSFYRKKLKEVWKPAV

SEQ ID NO: 36742 - protein, 979 aa, synthetic construct
  REGION 1..979: note = engineered CasX variant
QEIKRINKIRRRLVKDSNTKKAGKTGPMKTLLVRVMTPDLRERLENLRKKPENIPQPISNTSRANLNKLLTDYTEMKKAILHVYWEEFQKDPVGLMSRVAQPASKKIDQNKLKPEMDEKGNLTTAGFACSQCGQPLFVYKLEQVSEKGKAYTNYFGRCNVAEHEKLILLAQLKPEKDSDEAVTYSLGKFGQRALDFYSIHVTKESTHPVKPLAQIAGNRYASVPVGKALSDACMGTIASFLSKYQDIIIEHQKVVKGNQKRLESLRELAGKENLEYPSVTLPPQPHTKEGVDAYNEVIARVRMWVNLNLWQKLKLSRDDAKPLLRLKGFPSFPLVERQANAEVDWWDMVCNVKKLINEKKEDGKVFWQNLAGYKRQEALRPYLSSEEDRKKGKKFARYQLGDLLLHLEKKHGEDWGKVYDEAWERIDKKVEGLSKHIKLEEERRSEDAQSKAALTDWLRAKASFVIEGLKEADKDEFCRCELKLQKWYGDLRGKPFAIEAENSILDISGFSKQYNCAFIWQKDGVKKLNLYLIINYFKGGKLRFKKIKPEAFEANRFYTVINKKSGEIVPMEVNFNFDDPNLIILPLAFGKRQGREFIWNDLLSLETGSLKLANGRVIEKTLYNRRTRQDEPALFVALTFERREVLDSSNIKPMNLIGVDRGENIPAVIALTDPEGCPLSRFKDSLGNPTHILRIGESYKEKQRTIQAKKEVEQRRAGGYSRKYASKAKNLADDMVRNTARDLLYYAVTQDAMLIFENLSRGFGRQGKRTFSAERQYTRMEDWLTAKLAYEGLPSKTYLSKTLAQYTSKTCSNCGFTITSADYDRVLEKLKKTATGWMTTINGKELKVEGQITYYNRYKRQNVVKDLSVELDRLSEESVNNDISSWTKGRSGEALSLLKKRFSHRPVQEKFVCLNCGFETHADEQAALNIARSWLFLRSQEYKKYQTNKTTGNTDKRAFVETWQSFYRKKLKEVWKPAV

SEQ ID NO: 36743 - protein, 979 aa, synthetic construct
  REGION 1..979: note = engineered CasX variant
QEIKRINKIRRRLVKDSNTKKAGKTGPMKTLLVRVMTPDLRERLENLRKKPENIPQPISNTSRANLNKLLTDYTEMKKAILHVYWEEFQKDPVGLMSRVAQPASKKIDQNKLKPEMDEKGNLTTAGFACSQCGQPLFVYKLEQVSEKGKAYTNYFGRCNVAEHEKLIKLAQLKPEKDSDEAVTYSLGKFGQRALDFYSIHVTKESTHPVKPLAQIAGNRYASGPVGKALSDACMGTIASFLSKYQDIIIEHQKVVKGNQKRLESLRELAGKENLEYPSVTLPPQPHTKEGVDAYNEVIARVRMWVNLNLWQKLKLSRDDAKPLLRLKGFPSFPLVERQANAEVDWWDMVCNVKKLINEKKEDGKVFWQNLAGYKRQEALRPYLSSEEDRKKGKKFARYQLGDLLLHLEKKHGEDWGKVYDEAWERIDKKVEGLSKHIKLEEERRSEDAQSKAALTDWLRAKASFVIEGLKEADKDEFCRCELKLQKWYGDLRGKPFAIEAENSILDISGFSKQYNCAFIWQKDGVKKLNLYLIINYFKGGKLRFKKIKPEAFEANRFYTVINKKSGEIVPMEVNFNFDDPNLIILPLAFGKRQGREFIWNDLLSLETGSLKLANGRVIEKTLYNRRTRQDEPALFVALTFERREVLDSSNIKPMNLIGVDRGENIPAVIALTDPEGCPLSRFKDSLGNPTHILRIGESYKEKQRTIQAKKEVEQRRAGGYSRKYASKAKNLADDMVRNTARDLLYYAVTQDAMLIFENLSRGFGRQGKRTFSAERQYTRMEDWLTAKLAYEGLPSKTYLSKTLAQYTSKTCSNCGFTITSADYDRVLEKLKKTATGWMTTINGKELKVEGQITYYNRYKRQNVVKDLSVELDRLSEESVNNDISSWTKGRSGEALSLLKKRFSHRPVQEKFVCLNCGFETHADEQAALNIARSWLFLRSQEYKKYQTNKTTGNTDKRAFVETWQSFYRKKLKEVWKPAV

SEQ ID NO: 36744 - protein, 978 aa, synthetic construct
  REGION 1..978: note = engineered CasX variant
QEIKRINKIRRRLVKDSNTKKAGKTGPMKTLLVRVMTPDLRERLENLRKKPENIPQPISNTSRANLNKLLTDYTEMKKAILHVYWEEFQKDPVGLMSRVAQPASKKIDQNKLKPEMDEKGNLTTAGFACSQCGQPLFVYKLEQVSEKGKAYTNYFGRCNVAEHEKLILLAQLKPEKDSDEAVTYSLGKFGQRALDFYSIHVTKESTHPVKPLAQIAGNRYASPVGKALSDACMGTIASFLSKYQDIIIEHQKVVKGNQKRLESLRELAGKENLEYPSVTLPPQPHTKEGVDAYNEVIARVRMWVNLNLWQKLKLSRDDAKPLLRLKGFPSFPLVERQANAEVDWWDMVCNVKKLINEKKEDGKVFWQNLAGYKRQEALRPYLSSEEDRKKGKKFARYQLGDLLLHLEKKHGEDWGKVYDEAWERIDKKVEGLSKHIKLEEERRSEDAQSKAALTDWLRAKASFVIEGLKEADKDEFCRCELKLQKWYGDLRGKPFAIEAENSILDISGFSKQYNCAFIWQKDGVKKLNLYLIINYFKGGKLRFKKIKPEAFEANRFYTVINKKSGEIVPMEVNFNFDDPNLIILPLAFGKRQGREFIWNDLLSLETGSLKLANGRVIEKTLYNRRTRQDEPALFVALTFERREVLDSSNIKPMNLIGVDRGENIPAVIALTDPEGCPLSRFKDSLGNPTHILRIGESYKEKQRTIQAKKEVEQRRAGGYSRKYASKAKNLADDMVRNTARDLLYYAVTQDAMLIFENLSRGFGRQGKRTFSAERQYTRMEDWLTAKLAYEGLPSKTYLSKTLAQYTSKTCSNCGFTITSADYDRVLEKLKKTATGWMTTINGKELKVEGQITYYNRYKRQNVVKDLSVELDRLSEESVNNDISSWTKGRSGEALSLLKKRFSHRPVQEKFVCLNCGFETHADEQAALNIARSWLFLRSQEYKKYQTNKTTGNTDKRAFVETWQSFYRKKLKEVWKPAV

SEQ ID NO: 36745 - protein, 979 aa, synthetic construct
  REGION 1..979: note = engineered CasX variant
QEIKRINKIRRRLVKDSNTKKAGKTGPMKTLLVRVMTPDLRERLENLRKKPENIPQPISNTSRANLNKLLTDYTEMKKAILHVYWEEFQKDPVGLMSRVAQPASKKIDQNKLKPEMDEKGNLTTAGFACSQCGQPLFVYKLEQVSEKGKAYTNYFGRCNVAEHEKLILLAQLKPEKDSDEAVTYSLGKFGQRALDFYSIHVTKESTHPVKPLAQIAGNRYASYPVGKALSDACMGTIASFLSKYQDIIIEHQKVVKGNQKRLESLRELAGKENLEYPSVTLPPQPHTKEGVDAYNEVIARVRMWVNLNLWQKLKLSRDDAKPLLRLKGFPSFPLVERQANAEVDWWDMVCNVKKLINEKKEDGKVFWQNLAGYKRQEALRPYLSSEEDRKKGKKFARYQLGDLLLHLEKKHGEDWGKVYDEAWERIDKKVEGLSKHIKLEEERRSEDAQSKAALTDWLRAKASFVIEGLKEADKDEFCRCELKLQKWYGDLRGKPFAIEAENSILDISGFSKQYNCAFIWQKDGVKKLNLYLIINYFKGGKLRFKKIKPEAFEANRFYTVINKKSGEIVPMEVNFNFDDPNLIILPLAFGKRQGREFIWNDLLSLETGSLKLANGRVIEKTLYNRRTRQDEPALFVALTFERREVLDSSNIKPMNLIGVDRGENIPAVIALTDPEGCPLSRFKDSLGNPTHILRIGESYKEKQRTIQAKKEVEQRRAGGYSRKYASKAKNLADDMVRNTARDLLYYAVTQDAMLIFENLSRGFGRQGKRTFMAERQYTRMEDWLTAKLAYEGLPSKTYLSKTLAQYTSKTCSNCGFTITSADYDRVLEKLKKTATGWMTTINGKELKVEGQITYYNRYKRQNVVKDLSVELDRLSEESVNNDISSWDKGRSGEALSLLKKRFSHRPVQEKFVCLNCGFETHADEQAALNIARSWLFLRSQEYKKYQTNKTTGNTDKRAFVETWQSFYRKKLKEVWKPAV

SEQ ID NO: 36746 - protein, 979 aa, synthetic construct
  REGION 1..979: note = engineered CasX variant
QEIKRINKIRRRLVKDSNTKKAGKTGPMKTLLVRVMTPDLRERLENLRKKPENIPQPISNTSRANLNKLLTDYTEMKKAILHVYWEEFQKDPVGLMSRVAQPASKKIDQNKLKPEMDEKGNLTTAGFACSQCGQPLFVYKLEQVSEKGKAYTNYFGRCNVAEHEKLILLAQLKPEKDSDEAVTYSLGKFGQRALDFYSIHVTKESTHPVKPLAQIAGNRYASHPVGKALSDACMGTIASFLSKYQDIIIEHQKVVKGNQKRLESLRELAGKENLEYPSVTLPPQPHTKEGVDAYNEVIARVRMWVNLNLWQKLKLSRDDAKPLLRLKGFPSFPLVERQANAEVDWWDMVCNVKKLINEKKEDGKVFWQNLAGYKRQEALRPYLSSEEDRKKGKKFARYQLGDLLLHLEKKHGEDWGKVYDEAWERIDKKVEGLSKHIKLEEERRSEDAQSKAALTDWLRAKASFVIEGLKEADKDEFCRCELKLQKWYGDLRGKPFAIEAENSILDISGFSKQYNCAFIWQKDGVKKLNLYLIINYFKGGKLRFKKIKPEAFEANRFYTVINKKSGEIVPMEVNFNFDDPNLIILPLAFGKRQGREFIWNDLLSLETGSLKLANGRVIEKTLYNRRTRQDEPALFVALTFERREVLDSSNIKPMNLIGVDRGENIPAVIALTDPEGCPLSRFKDSLGNPTHILRIGESYKEKQRTIQAKKEVEQRRAGGYSRKYASKAKNLADDMVRNTARDLLYYAVTQDAMLIFENLSRGFGRQGKRTFMAERQYTRMEDWLTAKLAYEGLPSKTYLSKTLAQYTSKTCSNCGFTITSADYDRVLEKLKKTATGWMTTINGKELKVEGQITYYNRYKRQNVVKDLSVELDRLSEESVNNDISSWDKGRSGEALSLLKKRFSHRPVQEKFVCLNCGFETHADEQAALNIARSWLFLRSQEYKKYQTNKTTGNTDKRAFVETWQSFYRKKLKEVWKPAV

SEQ ID NO: 36747 - protein, 979 aa, synthetic construct
  REGION 1..979: note = engineered CasX variant
QEIKRINKIRRRLVKDSNTKKAGKTGPMKTLLVRVMTPDLRERLENLRKKPENIPQPISNTSRANLNKLLTDYTEMKKAILHVYWEEFQKDPVGLMSRVAQPASKKIDQNKLKPEMDEKGNLTTAGFACSQCGQPLFVYKLEQVSEKGKAYTNYFGRCNVAEHEKLILLAQLKPEKDSDEAVTYSLGKFGQRALDFYSIHVTKESTHPVKPLAQIAGNRYASSPVGKALSDACMGTIASFLSKYQDIIIEHQKVVKGNQKRLESLRELAGKENLEYPSVTLPPQPHTKEGVDAYNEVIARVRMWVNLNLWQKLKLSRDDAKPLLRLKGFPSFPLVERQANAEVDWWDMVCNVKKLINEKKEDGKVFWQNLAGYKRQEALRPYLSSEEDRKKGKKFARYQLGDLLLHLEKKHGEDWGKVYDEAWERIDKKVEGLSKHIKLEEERRSEDAQSKAALTDWLRAKASFVIEGLKEADKDEFCRCELKLQKWYGDLRGKPFAIEAENSILDISGFSKQYNCAFIWQKDGVKKLNLYLIINYFKGGKLRFKKIKPEAFEANRFYTVINKKSGEIVPMEVNFNFDDPNLIILPLAFGKRQGREFIWNDLLSLETGSLKLANGRVIEKTLYNRRTRQDEPALFVALTFERREVLDSSNIKPMNLIGVDRGENIPAVIALTDPEGCPLSRFKDSLGNPTHILRIGESYKEKQRTIQAKKEVEQRRAGGYSRKYASKAKNLADDMVRNTARDLLYYAVTQDAMLIFENLSRGFGRQGKRTFMAERQYTRMEDWLTAKLAYEGLPSKTYLSKTLAQYTSKTCSNCGFTITSADYDRVLEKLKKTATGWMTTINGKELKVEGQITYYNRYKRQNVVKDLSVELDRLSEESVNNDISSWDKGRSGEALSLLKKRFSHRPVQEKFVCLNCGFETHADEQAALNIARSWLFLRSQEYKKYQTNKTTGNTDKRAFVETWQSFYRKKLKEVWKPAV

SEQ ID NO: 36748 - protein, 979 aa, synthetic construct
  REGION 1..979: note = engineered CasX variant
QEIKRINKIRRRLVKDSNTKKAGKTGPMKTLLVRVMTPDLRERLENLRKKPENIPQPISNTSRANLNKLLTDYTEMKKAILHVYWEEFQKDPVGLMSRVAQPASKKIDQNKLKPEMDEKGNLTTAGFACSQCGQPLFVYKLEQVSEKGKAYTNYFGRCNVAEHEKLILLAQLKPEKDSDEAVTYSLGKFGQRALDFYSIHVTKESTHPVKPLAQIAGNRYASTPVGKALSDACMGTIASFLSKYQDIIIEHQKVVKGNQKRLESLRELAGKENLEYPSVTLPPQPHTKEGVDAYNEVIARVRMWVNLNLWQKLKLSRDDAKPLLRLKGFPSFPLVERQANAEVDWWDMVCNVKKLINEKKEDGKVFWQNLAGYKRQEALRPYLSSEEDRKKGKKFARYQLGDLLLHLEKKHGEDWGKVYDEAWERIDKKVEGLSKHIKLEEERRSEDAQSKAALTDWLRAKASFVIEGLKEADKDEFCRCELKLQKWYGDLRGKPFAIEAENSILDISGFSKQYNCAFIWQKDGVKKLNLYLIINYFKGGKLRFKKIKPEAFEANRFYTVINKKSGEIVPMEVNFNFDDPNLIILPLAFGKRQGREFIWNDLLSLETGSLKLANGRVIEKTLYNRRTRQDEPALFVALTFERREVLDSSNIKPMNLIGVDRGENIPAVIALTDPEGCPLSRFKDSLGNPTHILRIGESYKEKQRTIQAKKEVEQRRAGGYSRKYASKAKNLADDMVRNTARDLLYYAVTQDAMLIFENLSRGFGRQGKRTFMAERQYTRMEDWLTAKLAYEGLPSKTYLSKTLAQYTSKTCSNCGFTITSADYDRVLEKLKKTATGWMTTINGKELKVEGQITYYNRYKRQNVVKDLSVELDRLSEESVNNDISSWDKGRSGEALSLLKKRFSHRPVQEKFVCLNCGFETHADEQAALNIARSWLFLRSQEYKKYQTNKTTGNTDKRAFVETWQSFYRKKLKEVWKPAV

SEQ ID NO: 36749 - protein, 979 aa, synthetic construct
  REGION 1..979: note = engineered CasX variant
QEIKRINKIRRRLVKDSNTKKAGKTGPMKTLLVRVMTPDLRERLENLRKKPENIPQPISNTSRANLNKLLTDYTEMKKAILHVYWEEFQKDPVGLMSRVAQPASKKIDQNKLKPEMDEKGNLTTAGFACSQCGQPLFVYKLEQVSEKGKAYTNYFGRCNVAEHEKLILLAQLKPEKDSDEAVTYSLGKFGQRALDFYSIHVTKESTHPVKPLAQIAGNRYASAPVGKALSDACMGTIASFLSKYQDIIIEHQKVVKGNQKRLESLRELAGKENLEYPSVTLPPQPHTKEGVDAYNEVIARVRMWVNLNLWQKLKLSRDDAKPLLRLKGFPSFPLVERQANAEVDWWDMVCNVKKLINEKKEDGKVFWQNLAGYKRQEALRPYLSSEEDRKKGKKFARYQLGDLLLHLEKKHGEDWGKVYDEAWERIDKKVEGLSKHIKLEEERRSEDAQSKAALTDWLRAKASFVIEGLKEADKDEFCRCELKLQKWYGDLRGKPFAIEAENSILDISGFSKQYNCAFIWQKDGVKKLNLYLIINYFKGGKLRFKKIKPEAFEANRFYTVINKKSGEIVPMEVNFNFDDPNLIILPLAFGKRQGREFIWNDLLSLETGSLKLANGRVIEKTLYNRRTRQDEPALFVALTFERREVLDSSNIKPMNLIGVDRGENIPAVIALTDPEGCPLSRFKDSLGNPTHILRIGESYKEKQRTIQAKKEVEQRRAGGYSRKYASKAKNLADDMVRNTARDLLYYAVTQDAMLIFENLSRGFGRQGKRTFMAERQYTRMEDWLTAKLAYEGLPSKTYLSKTLAQYTSKTCSNCGFTITSADYDRVLEKLKKTATGWMTTINGKELKVEGQITYYNRYKRQNVVKDLSVELDRLSEESVNNDISSWDKGRSGEALSLLKKRFSHRPVQEKFVCLNCGFETHADEQAALNIARSWLFLRSQEYKKYQTNKTTGNTDKRAFVETWQSFYRKKLKEVWKPAV

SEQ ID NO: 36750 - protein, 979 aa, synthetic construct
  REGION 1..979: note = engineered CasX variant
QEIKRINKIRRRLVKDSNTKKAGKTGPMKTLLVRVMTPDLRERLENLRKKPENIPQPISNTSRANLNKLLTDYTEMKKAILHVYWEEFQKDPVGLMSRVAQPASKKIDQNKLKPEMDEKGNLTTAGFACSQCGQPLFVYKLEQVSEKGKAYTNYFGRCNVAEHEKLILLAQLKPEKDSDEAVTYSLGKFGQRALDFYSIHVTKESTHPVKPLAQIAGNRYASVPVGKALSDACMGTIASFLSKYQDIIIEHQKVVKGNQKRLESLRELAGKENLEYPSVTLPPQPHTKEGVDAYNEVIARVRMWVNLNLWQKLKLSRDDAKPLLRLKGFPSFPLVERQANAEVDWWDMVCNVKKLINEKKEDGKVFWQNLAGYKRQEALRPYLSSEEDRKKGKKFARYQLGDLLLHLEKKHGEDWGKVYDEAWERIDKKVEGLSKHIKLEEERRSEDAQSKAALTDWLRAKASFVIEGLKEADKDEFCRCELKLQKWYGDLRGKPFAIEAENSILDISGFSKQYNCAFIWQKDGVKKLNLYLIINYFKGGKLRFKKIKPEAFEANRFYTVINKKSGEIVPMEVNFNFDDPNLIILPLAFGKRQGREFIWNDLLSLETGSLKLANGRVIEKTLYNRRTRQDEPALFVALTFERREVLDSSNIKPMNLIGVDRGENIPAVIALTDPEGCPLSRFKDSLGNPTHILRIGESYKEKQRTIQAKKEVEQRRAGGYSRKYASKAKNLADDMVRNTARDLLYYAVTQDAMLIFENLSRGFGRQGKRTFMAERQYTRMEDWLTAKLAYEGLPSKTYLSKTLAQYTSKTCSNCGFTITSADYDRVLEKLKKTATGWMTTINGKELKVEGQITYYNRYKRQNVVKDLSVELDRLSEESVNNDISSWDKGRSGEALSLLKKRFSHRPVQEKFVCLNCGFETHADEQAALNIARSWLFLRSQEYKKYQTNKTTGNTDKRAFVETWQSFYRKKLKEVWKPAV

SEQ ID NO: 36751 - protein, 979 aa, synthetic construct
  REGION 1..979: note = engineered CasX variant
QEIKRINKIRRRLVKDSNTKKAGKTGPMKTLLVRVMTPDLRERLENLRKKPENIPQPISNTSRANLNKLLTDYTEMKKAILHVYWEEFQKDPVGLMSRVAQPASKKIDQNKLKPEMDEKGNLTTAGFACSQCGQPLFVYKLEQVSEKGKAYTNYFGRCNVAEHEKLIKLAQLKPEKDSDEAVTYSLGKFGQRALDFYSIHVTKESTHPVKPLAQIAGNRYASGPVGKALSDACMGTIASFLSKYQDIIIEHQKVVKGNQKRLESLRELAGKENLEYPSVTLPPQPHTKEGVDAYNEVIARVRMWVNLNLWQKLKLSRDDAKPLLRLKGFPSFPLVERQANAEVDWWDMVCNVKKLINEKKEDGKVFWQNLAGYKRQEALRPYLSSEEDRKKGKKFARYQLGDLLLHLEKKHGEDWGKVYDEAWERIDKKVEGLSKHIKLEEERRSEDAQSKAALTDWLRAKASFVIEGLKEADKDEFCRCELKLQKWYGDLRGKPFAIEAENSILDISGFSKQYNCAFIWQKDGVKKLNLYLIINYFKGGKLRFKKIKPEAFEANRFYTVINKKSGEIVPMEVNFNFDDPNLIILPLAFGKRQGREFIWNDLLSLETGSLKLANGRVIEKTLYNRRTRQDEPALFVALTFERREVLDSSNIKPMNLIGVDRGENIPAVIALTDPEGCPLSRFKDSLGNPTHILRIGESYKEKQRTIQAKKEVEQRRAGGYSRKYASKAKNLADDMVRNTARDLLYYAVTQDAMLIFENLSRGFGRQGKRTFMAERQYTRMEDWLTAKLAYEGLPSKTYLSKTLAQYTSKTCSNCGFTITSADYDRVLEKLKKTATGWMTTINGKELKVEGQITYYNRYKRQNVVKDLSVELDRLSEESVNNDISSWDKGRSGEALSLLKKRFSHRPVQEKFVCLNCGFETHADEQAALNIARSWLFLRSQEYKKYQTNKTTGNTDKRAFVETWQSFYRKKLKEVWKPAV

SEQ ID NO: 36752 - protein, 978 aa, synthetic construct
  REGION 1..978: note = engineered CasX variant
QEIKRINKIRRRLVKDSNTKKAGKTGPMKTLLVRVMTPDLRERLENLRKKPENIPQPISNTSRANLNKLLTDYTEMKKAILHVYWEEFQKDPVGLMSRVAQPASKKIDQNKLKPEMDEKGNLTTAGFACSQCGQPLFVYKLEQVSEKGKAYTNYFGRCNVAEHEKLILLAQLKPEKDSDEAVTYSLGKFGQRALDFYSIHVTKESTHPVKPLAQIAGNRYASPVGKALSDACMGTIASFLSKYQDIIIEHQKVVKGNQKRLESLRELAGKENLEYPSVTLPPQPHTKEGVDAYNEVIARVRMWVNLNLWQKLKLSRDDAKPLLRLKGFPSFPLVERQANAEVDWWDMVCNVKKLINEKKEDGKVFWQNLAGYKRQEALRPYLSSEEDRKKGKKFARYQLGDLLLHLEKKHGEDWGKVYDEAWERIDKKVEGLSKHIKLEEERRSEDAQSKAALTDWLRAKASFVIEGLKEADKDEFCRCELKLQKWYGDLRGKPFAIEAENSILDISGFSKQYNCAFIWQKDGVKKLNLYLIINYFKGGKLRFKKIKPEAFEANRFYTVINKKSGEIVPMEVNFNFDDPNLIILPLAFGKRQGREFIWNDLLSLETGSLKLANGRVIEKTLYNRRTRQDEPALFVALTFERREVLDSSNIKPMNLIGVDRGENIPAVIALTDPEGCPLSRFKDSLGNPTHILRIGESYKEKQRTIQAKKEVEQRRAGGYSRKYASKAKNLADDMVRNTARDLLYYAVTQDAMLIFENLSRGFGRQGKRTFMAERQYTRMEDWLTAKLAYEGLPSKTYLSKTLAQYTSKTCSNCGFTITSADYDRVLEKLKKTATGWMTTINGKELKVEGQITYYNRYKRQNVVKDLSVELDRLSEESVNNDISSWDKGRSGEALSLLKKRFSHRPVQEKFVCLNCGFETHADEQAALNIARSWLFLRSQEYKKYQTNKTTGNTDKRAFVETWQSFYRKKLKEVWKPAV

SEQ ID NO: 36753 - protein, 979 aa, synthetic construct
  REGION 1..979: note = engineered CasX variant
QEIKRINKIRRRLVKDSNTKKAGKTGPMKTLLVRVMTPDLRERLENLRKKPENIPQPISNTSRANLNKLLTDYTEMKKAILHVYWEEFQVDPVGLMSRVAQPASKKIDQNKLKPEMDEKGNLTTAGFACSQCGQPLFVYKLEQVSEKGKAYTNYFGRCNVAEHEKLILLAQLKPEKDSDEAVTYSLGKFGQRALDFYSIHVTKESTHPVKPLAQIAGNRYASYPVGKALSDACMGTIASFLSKYQDIIIEHQKVVKGNQKRLESLRELAGKENLEYPSVTLPPQPHTKEGVDAYNEVIARVRMWVNLNLWQKLKLSRDDAKPLLRLKGFPSFPLVERQANAEVDWWDMVCNVKKLINEKKEDGKVFWQNLAGYKRQEALRPYLSSEEDRKKGKKFARYQLGDLLLHLEKKHGEDWGKVYDEAWERIDKKVEGLSKHIKLEEERRSEDAQSKAALTDWLRAKASFVIEGLKEADKDEFCRCELKLQKWYGDLRGKPFAIEAENSILDISGFSKQYNCAFIWQKDGVKKLNLYLIINYFKGGKLRFKKIKPEAFEANRFYTVINKKSGEIVPMEVNFNFDDPNLIILPLAFGKRQGREFIWNDLLSLETGSLKLANGRVIEKTLYNRRTRQDEPALFVALTFERREVLDSSNIKPMNLIGVDRGENIPAVIALTDPEGCPLSRFKDSLGNPTHILRIGESYKEKQRTIQAKKEVEQRRAGGYSRKYASKAKNLADDMVRNTARDLLYYAVTQDAMLIFENLSRGFGRQGKRTFMAERQYTRMEDWLTAKLAYEGLPSKTYLSKTLAQYTSKTCSNCGFTITSADYDRVLEKLKKTATGWMTTINGKELKVEGQITYYNRYKRQNVVKDLSVELDRLSEESVNNDISSWTKGRSGEALSLLKKRFSHRPVQEKFVCLNCGFETHADEQAALNIARSWLFLRSQEYKKYQTNKTTGNTDKRAFVETWQSFYRKKLKEVWKPAV

SEQ ID NO: 36754 - protein, 979 aa, synthetic construct
  REGION 1..979: note = engineered CasX variant
QEIKRINKIRRRLVKDSNTKKAGKTGPMKTLLVRVMTPDLRERLENLRKKPENIPQPISNTSRANLNKLLTDYTEMKKAILHVYWEEFQVDPVGLMSRVAQPASKKIDQNKLKPEMDEKGNLTTAGFACSQCGQPLFVYKLEQVSEKGKAYTNYFGRCNVAEHEKLILLAQLKPEKDSDEAVTYSLGKFGQRALDFYSIHVTKESTHPVKPLAQIAGNRYASHPVGKALSDACMGTIASFLSKYQDIIIEHQKVVKGNQKRLESLRELAGKENLEYPSVTLPPQPHTKEGVDAYNEVIARVRMWVNLNLWQKLKLSRDDAKPLLRLKGFPSFPLVERQANAEVDWWDMVCNVKKLINEKKEDGKVFWQNLAGYKRQEALRPYLSSEEDRKKGKKFARYQLGDLLLHLEKKHGEDWGKVYDEAWERIDKKVEGLSKHIKLEEERRSEDAQSKAALTDWLRAKASFVIEGLKEADKDEFCRCELKLQKWYGDLRGKPFAIEAENSILDISGFSKQYNCAFIWQKDGVKKLNLYLIINYFKGGKLRFKKIKPEAFEANRFYTVINKKSGEIVPMEVNFNFDDPNLIILPLAFGKRQGREFIWNDLLSLETGSLKLANGRVIEKTLYNRRTRQDEPALFVALTFERREVLDSSNIKPMNLIGVDRGENIPAVIALTDPEGCPLSRFKDSLGNPTHILRIGESYKEKQRTIQAKKEVEQRRAGGYSRKYASKAKNLADDMVRNTARDLLYYAVTQDAMLIFENLSRGFGRQGKRTFMAERQYTRMEDWLTAKLAYEGLPSKTYLSKTLAQYTSKTCSNCGFTITSADYDRVLEKLKKTATGWMTTINGKELKVEGQITYYNRYKRQNVVKDLSVELDRLSEESVNNDISSWTKGRSGEALSLLKKRFSHRPVQEKFVCLNCGFETHADEQAALNIARSWLFLRSQEYKKYQTNKTTGNTDKRAFVETWQSFYRKKLKEVWKPAV

SEQ ID NO: 36755 - protein, 979 aa, synthetic construct
  REGION 1..979: note = engineered CasX variant
QEIKRINKIRRRLVKDSNTKKAGKTGPMKTLLVRVMTPDLRERLENLRKKPENIPQPISNTSRANLNKLLTDYTEMKKAILHVYWEEFQVDPVGLMSRVAQPASKKIDQNKLKPEMDEKGNLTTAGFACSQCGQPLFVYKLEQVSEKGKAYTNYFGRCNVAEHEKLILLAQLKPEKDSDEAVTYSLGKFGQRALDFYSIHVTKESTHPVKPLAQIAGNRYASSPVGKALSDACMGTIASFLSKYQDIIIEHQKVVKGNQKRLESLRELAGKENLEYPSVTLPPQPHTKEGVDAYNEVIARVRMWVNLNLWQKLKLSRDDAKPLLRLKGFPSFPLVERQANAEVDWWDMVCNVKKLINEKKEDGKVFWQNLAGYKRQEALRPYLSSEEDRKKGKKFARYQLGDLLLHLEKKHGEDWGKVYDEAWERIDKKVEGLSKHIKLEEERRSEDAQSKAALTDWLRAKASFVIEGLKEADKDEFCRCELKLQKWYGDLRGKPFAIEAENSILDISGFSKQYNCAFIWQKDGVKKLNLYLIINYFKGGKLRFKKIKPEAFEANRFYTVINKKSGEIVPMEVNFNFDDPNLIILPLAFGKRQGREFIWNDLLSLETGSLKLANGRVIEKTLYNRRTRQDEPALFVALTFERREVLDSSNIKPMNLIGVDRGENIPAVIALTDPEGCPLSRFKDSLGNPTHILRIGESYKEKQRTIQAKKEVEQRRAGGYSRKYASKAKNLADDMVRNTARDLLYYAVTQDAMLIFENLSRGFGRQGKRTFMAERQYTRMEDWLTAKLAYEGLPSKTYLSKTLAQYTSKTCSNCGFTITSADYDRVLEKLKKTATGWMTTINGKELKVEGQITYYNRYKRQNVVKDLSVELDRLSEESVNNDISSWTKGRSGEALSLLKKRFSHRPVQEKFVCLNCGFETHADEQAALNIARSWLFLRSQEYKKYQTNKTTGNTDKRAFVETWQSFYRKKLKEVWKPAV

SEQ ID NO: 36756 - protein, 979 aa, synthetic construct
  REGION 1..979: note = engineered CasX variant
QEIKRINKIRRRLVKDSNTKKAGKTGPMKTLLVRVMTPDLRERLENLRKKPENIPQPISNTSRANLNKLLTDYTEMKKAILHVYWEEFQVDPVGLMSRVAQPASKKIDQNKLKPEMDEKGNLTTAGFACSQCGQPLFVYKLEQVSEKGKAYTNYFGRCNVAEHEKLILLAQLKPEKDSDEAVTYSLGKFGQRALDFYSIHVTKESTHPVKPLAQIAGNRYASTPVGKALSDACMGTIASFLSKYQDIIIEHQKVVKGNQKRLESLRELAGKENLEYPSVTLPPQPHTKEGVDAYNEVIARVRMWVNLNLWQKLKLSRDDAKPLLRLKGFPSFPLVERQANAEVDWWDMVCNVKKLINEKKEDGKVFWQNLAGYKRQEALRPYLSSEEDRKKGKKFARYQLGDLLLHLEKKHGEDWGKVYDEAWERIDKKVEGLSKHIKLEEERRSEDAQSKAALTDWLRAKASFVIEGLKEADKDEFCRCELKLQKWYGDLRGKPFAIEAENSILDISGFSKQYNCAFIWQKDGVKKLNLYLIINYFKGGKLRFKKIKPEAFEANRFYTVINKKSGEIVPMEVNFNFDDPNLIILPLAFGKRQGREFIWNDLLSLETGSLKLANGRVIEKTLYNRRTRQDEPALFVALTFERREVLDSSNIKPMNLIGVDRGENIPAVIALTDPEGCPLSRFKDSLGNPTHILRIGESYKEKQRTIQAKKEVEQRRAGGYSRKYASKAKNLADDMVRNTARDLLYYAVTQDAMLIFENLSRGFGRQGKRTFMAERQYTRMEDWLTAKLAYEGLPSKTYLSKTLAQYTSKTCSNCGFTITSADYDRVLEKLKKTATGWMTTINGKELKVEGQITYYNRYKRQNVVKDLSVELDRLSEESVNNDISSWTKGRSGEALSLLKKRFSHRPVQEKFVCLNCGFETHADEQAALNIARSWLFLRSQEYKKYQTNKTTGNTDKRAFVETWQSFYRKKLKEVWKPAV

SEQ ID NO: 36757 - protein, 979 aa, synthetic construct
  REGION 1..979: note = engineered CasX variant
QEIKRINKIRRRLVKDSNTKKAGKTGPMKTLLVRVMTPDLRERLENLRKKPENIPQPISNTSRANLNKLLTDYTEMKKAILHVYWEEFQVDPVGLMSRVAQPASKKIDQNKLKPEMDEKGNLTTAGFACSQCGQPLFVYKLEQVSEKGKAYTNYFGRCNVAEHEKLILLAQLKPEKDSDEAVTYSLGKFGQRALDFYSIHVTKESTHPVKPLAQIAGNRYASAPVGKALSDACMGTIASFLSKYQDIIIEHQKVVKGNQKRLESLRELAGKENLEYPSVTLPPQPHTKEGVDAYNEVIARVRMWVNLNLWQKLKLSRDDAKPLLRLKGFPSFPLVERQANAEVDWWDMVCNVKKLINEKKEDGKVFWQNLAGYKRQEALRPYLSSEEDRKKGKKFARYQLGDLLLHLEKKHGEDWGKVYDEAWERIDKKVEGLSKHIKLEEERRSEDAQSKAALTDWLRAKASFVIEGLKEADKDEFCRCELKLQKWYGDLRGKPFAIEAENSILDISGFSKQYNCAFIWQKDGVKKLNLYLIINYFKGGKLRFKKIKPEAFEANRFYTVINKKSGEIVPMEVNFNFDDPNLIILPLAFGKRQGREFIWNDLLSLETGSLKLANGRVIEKTLYNRRTRQDEPALFVALTFERREVLDSSNIKPMNLIGVDRGENIPAVIALTDPEGCPLSRFKDSLGNPTHILRIGESYKEKQRTIQAKKEVEQRRAGGYSRKYASKAKNLADDMVRNTARDLLYYAVTQDAMLIFENLSRGFGRQGKRTFMAERQYTRMEDWLTAKLAYEGLPSKTYLSKTLAQYTSKTCSNCGFTITSADYDRVLEKLKKTATGWMTTINGKELKVEGQITYYNRYKRQNVVKDLSVELDRLSEESVNNDISSWTKGRSGEALSLLKKRFSHRPVQEKFVCLNCGFETHADEQAALNIARSWLFLRSQEYKKYQTNKTTGNTDKRAFVETWQSFYRKKLKEVWKPAV

SEQ ID NO: 36758 - protein, 979 aa, synthetic construct
  REGION 1..979: note = engineered CasX variant
QEIKRINKIRRRLVKDSNTKKAGKTGPMKTLLVRVMTPDLRERLENLRKKPENIPQPISNTSRANLNKLLTDYTEMKKAILHVYWEEFQVDPVGLMSRVAQPASKKIDQNKLKPEMDEKGNLTTAGFACSQCGQPLFVYKLEQVSEKGKAYTNYFGRCNVAEHEKLILLAQLKPEKDSDEAVTYSLGKFGQRALDFYSIHVTKESTHPVKPLAQIAGNRYASVPVGKALSDACMGTIASFLSKYQDIIIEHQKVVKGNQKRLESLRELAGKENLEYPSVTLPPQPHTKEGVDAYNEVIARVRMWVNLNLWQKLKLSRDDAKPLLRLKGFPSFPLVERQANAEVDWWDMVCNVKKLINEKKEDGKVFWQNLAGYKRQEALRPYLSSEEDRKKGKKFARYQLGDLLLHLEKKHGEDWGKVYDEAWERIDKKVEGLSKHIKLEEERRSEDAQSKAALTDWLRAKASFVIEGLKEADKDEFCRCELKLQKWYGDLRGKPFAIEAENSILDISGFSKQYNCAFIWQKDGVKKLNLYLIINYFKGGKLRFKKIKPEAFEANRFYTVINKKSGEIVPMEVNFNFDDPNLIILPLAFGKRQGREFIWNDLLSLETGSLKLANGRVIEKTLYNRRTRQDEPALFVALTFERREVLDSSNIKPMNLIGVDRGENIPAVIALTDPEGCPLSRFKDSLGNPTHILRIGESYKEKQRTIQAKKEVEQRRAGGYSRKYASKAKNLADDMVRNTARDLLYYAVTQDAMLIFENLSRGFGRQGKRTFMAERQYTRMEDWLTAKLAYEGLPSKTYLSKTLAQYTSKTCSNCGFTITSADYDRVLEKLKKTATGWMTTINGKELKVEGQITYYNRYKRQNVVKDLSVELDRLSEESVNNDISSWTKGRSGEALSLLKKRFSHRPVQEKFVCLNCGFETHADEQAALNIARSWLFLRSQEYKKYQTNKTTGNTDKRAFVETWQSFYRKKLKEVWKPAV

SEQ ID NO: 36759 - protein, 979 aa, synthetic construct
  REGION 1..979: note = engineered CasX variant
QEIKRINKIRRRLVKDSNTKKAGKTGPMKTLLVRVMTPDLRERLENLRKKPENIPQPISNTSRANLNKLLTDYTEMKKAILHVYWEEFQVDPVGLMSRVAQPASKKIDQNKLKPEMDEKGNLTTAGFACSQCGQPLFVYKLEQVSEKGKAYTNYFGRCNVAEHEKLIKLAQLKPEKDSDEAVTYSLGKFGQRALDFYSIHVTKESTHPVKPLAQIAGNRYASGPVGKALSDACMGTIASFLSKYQDIIIEHQKVVKGNQKRLESLRELAGKENLEYPSVTLPPQPHTKEGVDAYNEVIARVRMWVNLNLWQKLKLSRDDAKPLLRLKGFPSFPLVERQANAEVDWWDMVCNVKKLINEKKEDGKVFWQNLAGYKRQEALRPYLSSEEDRKKGKKFARYQLGDLLLHLEKKHGEDWGKVYDEAWERIDKKVEGLSKHIKLEEERRSEDAQSKAALTDWLRAKASFVIEGLKEADKDEFCRCELKLQKWYGDLRGKPFAIEAENSILDISGFSKQYNCAFIWQKDGVKKLNLYLIINYFKGGKLRFKKIKPEAFEANRFYTVINKKSGEIVPMEVNFNFDDPNLIILPLAFGKRQGREFIWNDLLSLETGSLKLANGRVIEKTLYNRRTRQDEPALFVALTFERREVLDSSNIKPMNLIGVDRGENIPAVIALTDPEGCPLSRFKDSLGNPTHILRIGESYKEKQRTIQAKKEVEQRRAGGYSRKYASKAKNLADDMVRNTARDLLYYAVTQDAMLIFENLSRGFGRQGKRTFMAERQYTRMEDWLTAKLAYEGLPSKTYLSKTLAQYTSKTCSNCGFTITSADYDRVLEKLKKTATGWMTTINGKELKVEGQITYYNRYKRQNVVKDLSVELDRLSEESVNNDISSWTKGRSGEALSLLKKRFSHRPVQEKFVCLNCGFETHADEQAALNIARSWLFLRSQEYKKYQTNKTTGNTDKRAFVETWQSFYRKKLKEVWKPAV

SEQ ID NO: 36760 - protein, 978 aa, synthetic construct
  REGION 1..978: note = engineered CasX variant
QEIKRINKIRRRLVKDSNTKKAGKTGPMKTLLVRVMTPDLRERLENLRKKPENIPQPISNTSRANLNKLLTDYTEMKKAILHVYWEEFQVDPVGLMSRVAQPASKKIDQNKLKPEMDEKGNLTTAGFACSQCGQPLFVYKLEQVSEKGKAYTNYFGRCNVAEHEKLILLAQLKPEKDSDEAVTYSLGKFGQRALDFYSIHVTKESTHPVKPLAQIAGNRYASPVGKALSDACMGTIASFLSKYQDIIIEHQKVVKGNQKRLESLRELAGKENLEYPSVTLPPQPHTKEGVDAYNEVIARVRMWVNLNLWQKLKLSRDDAKPLLRLKGFPSFPLVERQANAEVDWWDMVCNVKKLINEKKEDGKVFWQNLAGYKRQEALRPYLSSEEDRKKGKKFARYQLGDLLLHLEKKHGEDWGKVYDEAWERIDKKVEGLSKHIKLEEERRSEDAQSKAALTDWLRAKASFVIEGLKEADKDEFCRCELKLQKWYGDLRGKPFAIEAENSILDISGFSKQYNCAFIWQKDGVKKLNLYLIINYFKGGKLRFKKIKPEAFEANRFYTVINKKSGEIVPMEVNFNFDDPNLIILPLAFGKRQGREFIWNDLLSLETGSLKLANGRVIEKTLYNRRTRQDEPALFVALTFERREVLDSSNIKPMNLIGVDRGENIPAVIALTDPEGCPLSRFKDSLGNPTHILRIGESYKEKQRTIQAKKEVEQRRAGGYSRKYASKAKNLADDMVRNTARDLLYYAVTQDAMLIFENLSRGFGRQGKRTFMAERQYTRMEDWLTAKLAYEGLPSKTYLSKTLAQYTSKTCSNCGFTITSADYDRVLEKLKKTATGWMTTINGKELKVEGQITYYNRYKRQNVVKDLSVELDRLSEESVNNDISSWTKGRSGEALSLLKKRFSHRPVQEKFVCLNCGFETHADEQAALNIARSWLFLRSQEYKKYQTNKTTGNTDKRAFVETWQSFYRKKLKEVWKPAV

SEQ ID NO: 36761 - protein, 979 aa, synthetic construct
  REGION 1..979: note = engineered CasX variant
QEIKRLNKIRRRLVKDSNTKKAGKTGPMKTLLVRVMTPDLRERLENLRKKPENIPQPISNTSRANLNKLLTDYTEMKKAILHVYWEEFQKDPVGLMSRVAQPASKKIDQNKLKPEMDEKGNLTTAGFACSQCGQPLFVYKLEQVSEKGKAYTNYFGRCNVAEHEKLILLAQLKPEKDSDEAVTYSLGKFGQRALDFYSIHVTKESTHPVKPLAQIAGNRYASYPVGKALSDACMGTIASFLSKYQDIIIEHQKVVKGNQKRLESLRELAGKENLEYPSVTLPPQPHTKEGVDAYNEVIARVRMWVNLNLWQKLKLSRDDAKPLLRLKGFPSFPLVERQANAEVDWWDMVCNVKKLINEKKEDGKVFWQNLAGYKRQEALRPYLSSEEDRKKGKKFARYQLGDLLLHLEKKHGEDWGKVYDEAWERIDKKVEGLSKHIKLEEERRSEDAQSKAALTDWLRAKASFVIEGLKEADKDEFCRCELKLQKWYGDLRGKPFAIEAENSILDISGFSKQYNCAFIWQKDGVKKLNLYLIINYFKGGKLRFKKIKPEAFEANRFYTVINKKSGEIVPMEVNFNFDDPNLIILPLAFGKRQGREFIWNDLLSLETGSLKLANGRVIEKTLYNRRTRQDEPALFVALTFERREVLDSSNIKPMNLIGVDRGENIPAVIALTDPEGCPLSRFKDSLGNPTHILRIGESYKEKQRTIQAKKEVEQRRAGGYSRKYASKAKNLADDMVRNTARDLLYYAVTQDAMLIFENLSRGFGRQGKRTFMAERQYTRMEDWLTAKLAYEGLPSKTYLSKTLAQYTSKTCSNCGFTITSADYDRVLEKLKKTATGWMTTINGKELKVEGQITYYNRYKRQNVVKDLSVELDRLSEESVNNDISSWTKGRSGEALSLLKKRFSHRPVQEKFVCLNCGFETHADEQAALNIARSWLFLRSQEYKKYQTNKTTGNTDKRAFVETWQSFYRKKLKEVWKPAV

SEQ ID NO: 36762 - protein, 979 aa, synthetic construct
  REGION 1..979: note = engineered CasX variant
QEIKRLNKIRRRLVKDSNTKKAGKTGPMKTLLVRVMTPDLRERLENLRKKPENIPQPISNTSRANLNKLLTDYTEMKKAILHVYWEEFQKDPVGLMSRVAQPASKKIDQNKLKPEMDEKGNLTTAGFACSQCGQPLFVYKLEQVSEKGKAYTNYFGRCNVAEHEKLILLAQLKPEKDSDEAVTYSLGKFGQRALDFYSIHVTKESTHPVKPLAQIAGNRYASHPVGKALSDACMGTIASFLSKYQDIIIEHQKVVKGNQKRLESLRELAGKENLEYPSVTLPPQPHTKEGVDAYNEVIARVRMWVNLNLWQKLKLSRDDAKPLLRLKGFPSFPLVERQANAEVDWWDMVCNVKKLINEKKEDGKVFWQNLAGYKRQEALRPYLSSEEDRKKGKKFARYQLGDLLLHLEKKHGEDWGKVYDEAWERIDKKVEGLSKHIKLEEERRSEDAQSKAALTDWLRAKASFVIEGLKEADKDEFCRCELKLQKWYGDLRGKPFAIEAENSILDISGFSKQYNCAFIWQKDGVKKLNLYLIINYFKGGKLRFKKIKPEAFEANRFYTVINKKSGEIVPMEVNFNFDDPNLIILPLAFGKRQGREFIWNDLLSLETGSLKLANGRVIEKTLYNRRTRQDEPALFVALTFERREVLDSSNIKPMNLIGVDRGENIPAVIALTDPEGCPLSRFKDSLGNPTHILRIGESYKEKQRTIQAKKEVEQRRAGGYSRKYASKAKNLADDMVRNTARDLLYYAVTQDAMLIFENLSRGFGRQGKRTFMAERQYTRMEDWLTAKLAYEGLPSKTYLSKTLAQYTSKTCSNCGFTITSADYDRVLEKLKKTATGWMTTINGKELKVEGQITYYNRYKRQNVVKDLSVELDRLSEESVNNDISSWTKGRSGEALSLLKKRFSHRPVQEKFVCLNCGFETHADEQAALNIARSWLFLRSQEYKKYQTNKTTGNTDKRAFVETWQSFYRKKLKEVWKPAV

SEQ ID NO: 36763 - protein, 979 aa, synthetic construct
  REGION 1..979: note = engineered CasX variant
QEIKRLNKIRRRLVKDSNTKKAGKTGPMKTLLVRVMTPDLRERLENLRKKPENIPQPISNTSRANLNKLLTDYTEMKKAILHVYWEEFQKDPVGLMSRVAQPASKKIDQNKLKPEMDEKGNLTTAGFACSQCGQPLFVYKLEQVSEKGKAYTNYFGRCNVAEHEKLILLAQLKPEKDSDEAVTYSLGKFGQRALDFYSIHVTKESTHPVKPLAQIAGNRYASSPVGKALSDACMGTIASFLSKYQDIIIEHQKVVKGNQKRLESLRELAGKENLEYPSVTLPPQPHTKEGVDAYNEVIARVRMWVNLNLWQKLKLSRDDAKPLLRLKGFPSFPLVERQANAEVDWWDMVCNVKKLINEKKEDGKVFWQNLAGYKRQEALRPYLSSEEDRKKGKKFARYQLGDLLLHLEKKHGEDWGKVYDEAWERIDKKVEGLSKHIKLEEERRSEDAQSKAALTDWLRAKASFVIEGLKEADKDEFCRCELKLQKWYGDLRGKPFAIEAENSILDISGFSKQYNCAFIWQKDGVKKLNLYLIINYFKGGKLRFKKIKPEAFEANRFYTVINKKSGEIVPMEVNFNFDDPNLIILPLAFGKRQGREFIWNDLLSLETGSLKLANGRVIEKTLYNRRTRQDEPALFVALTFERREVLDSSNIKPMNLIGVDRGENIPAVIALTDPEGCPLSRFKDSLGNPTHILRIGESYKEKQRTIQAKKEVEQRRAGGYSRKYASKAKNLADDMVRNTARDLLYYAVTQDAMLIFENLSRGFGRQGKRTFMAERQYTRMEDWLTAKLAYEGLPSKTYLSKTLAQYTSKTCSNCGFTITSADYDRVLEKLKKTATGWMTTINGKELKVEGQITYYNRYKRQNVVKDLSVELDRLSEESVNNDISSWTKGRSGEALSLLKKRFSHRPVQEKFVCLNCGFETHADEQAALNIARSWLFLRSQEYKKYQTNKTTGNTDKRAFVETWQSFYRKKLKEVWKPAV

SEQ ID NO: 36764 - protein, 979 aa, synthetic construct
  REGION 1..979: note = engineered CasX variant
QEIKRLNKIRRRLVKDSNTKKAGKTGPMKTLLVRVMTPDLRERLENLRKKPENIPQPISNTSRANLNKLLTDYTEMKKAILHVYWEEFQKDPVGLMSRVAQPASKKIDQNKLKPEMDEKGNLTTAGFACSQCGQPLFVYKLEQVSEKGKAYTNYFGRCNVAEHEKLILLAQLKPEKDSDEAVTYSLGKFGQRALDFYSIHVTKESTHPVKPLAQIAGNRYASTPVGKALSDACMGTIASFLSKYQDIIIEHQKVVKGNQKRLESLRELAGKENLEYPSVTLPPQPHTKEGVDAYNEVIARVRMWVNLNLWQKLKLSRDDAKPLLRLKGFPSFPLVERQANAEVDWWDMVCNVKKLINEKKEDGKVFWQNLAGYKRQEALRPYLSSEEDRKKGKKFARYQLGDLLLHLEKKHGEDWGKVYDEAWERIDKKVEGLSKHIKLEEERRSEDAQSKAALTDWLRAKASFVIEGLKEADKDEFCRCELKLQKWYGDLRGKPFAIEAENSILDISGFSKQYNCAFIWQKDGVKKLNLYLIINYFKGGKLRFKKIKPEAFEANRFYTVINKKSGEIVPMEVNFNFDDPNLIILPLAFGKRQGREFIWNDLLSLETGSLKLANGRVIEKTLYNRRTRQDEPALFVALTFERREVLDSSNIKPMNLIGVDRGENIPAVIALTDPEGCPLSRFKDSLGNPTHILRIGESYKEKQRTIQAKKEVEQRRAGGYSRKYASKAKNLADDMVRNTARDLLYYAVTQDAMLIFENLSRGFGRQGKRTFMAERQYTRMEDWLTAKLAYEGLPSKTYLSKTLAQYTSKTCSNCGFTITSADYDRVLEKLKKTATGWMTTINGKELKVEGQITYYNRYKRQNVVKDLSVELDRLSEESVNNDISSWTKGRSGEALSLLKKRFSHRPVQEKFVCLNCGFETHADEQAALNIARSWLFLRSQEYKKYQTNKTTGNTDKRAFVETWQSFYRKKLKEVWKPAV

SEQ ID NO: 36765 - protein, 979 aa, synthetic construct
  REGION 1..979: note = engineered CasX variant
QEIKRLNKIRRRLVKDSNTKKAGKTGPMKTLLVRVMTPDLRERLENLRKKPENIPQPISNTSRANLNKLLTDYTEMKKAILHVYWEEFQKDPVGLMSRVAQPASKKIDQNKLKPEMDEKGNLTTAGFACSQCGQPLFVYKLEQVSEKGKAYTNYFGRCNVAEHEKLILLAQLKPEKDSDEAVTYSLGKFGQRALDFYSIHVTKESTHPVKPLAQIAGNRYASAPVGKALSDACMGTIASFLSKYQDIIIEHQKVVKGNQKRLESLRELAGKENLEYPSVTLPPQPHTKEGVDAYNEVIARVRMWVNLNLWQKLKLSRDDAKPLLRLKGFPSFPLVERQANAEVDWWDMVCNVKKLINEKKEDGKVFWQNLAGYKRQEALRPYLSSEEDRKKGKKFARYQLGDLLLHLEKKHGEDWGKVYDEAWERIDKKVEGLSKHIKLEEERRSEDAQSKAALTDWLRAKASFVIEGLKEADKDEFCRCELKLQKWYGDLRGKPFAIEAENSILDISGFSKQYNCAFIWQKDGVKKLNLYLIINYFKGGKLRFKKIKPEAFEANRFYTVINKKSGEIVPMEVNFNFDDPNLIILPLAFGKRQGREFIWNDLLSLETGSLKLANGRVIEKTLYNRRTRQDEPALFVALTFERREVLDSSNIKPMNLIGVDRGENIPAVIALTDPEGCPLSRFKDSLGNPTHILRIGESYKEKQRTIQAKKEVEQRRAGGYSRKYASKAKNLADDMVRNTARDLLYYAVTQDAMLIFENLSRGFGRQGKRTFMAERQYTRMEDWLTAKLAYEGLPSKTYLSKTLAQYTSKTCSNCGFTITSADYDRVLEKLKKTATGWMTTINGKELKVEGQITYYNRYKRQNVVKDLSVELDRLSEESVNNDISSWTKGRSGEALSLLKKRFSHRPVQEKFVCLNCGFETHADEQAALNIARSWLFLRSQEYKKYQTNKTTGNTDKRAFVETWQSFYRKKLKEVWKPAV

SEQ ID NO: 36766 - protein, 979 aa, synthetic construct
  REGION 1..979: note = engineered CasX variant
QEIKRLNKIRRRLVKDSNTKKAGKTGPMKTLLVRVMTPDLRERLENLRKKPENIPQPISNTSRANLNKLLTDYTEMKKAILHVYWEEFQKDPVGLMSRVAQPASKKIDQNKLKPEMDEKGNLTTAGFACSQCGQPLFVYKLEQVSEKGKAYTNYFGRCNVAEHEKLILLAQLKPEKDSDEAVTYSLGKFGQRALDFYSIHVTKESTHPVKPLAQIAGNRYASVPVGKALSDACMGTIASFLSKYQDIIIEHQKVVKGNQKRLESLRELAGKENLEYPSVTLPPQPHTKEGVDAYNEVIARVRMWVNLNLWQKLKLSRDDAKPLLRLKGFPSFPLVERQANAEVDWWDMVCNVKKLINEKKEDGKVFWQNLAGYKRQEALRPYLSSEEDRKKGKKFARYQLGDLLLHLEKKHGEDWGKVYDEAWERIDKKVEGLSKHIKLEEERRSEDAQSKAALTDWLRAKASFVIEGLKEADKDEFCRCELKLQKWYGDLRGKPFAIEAENSILDISGFSKQYNCAFIWQKDGVKKLNLYLIINYFKGGKLRFKKIKPEAFEANRFYTVINKKSGEIVPMEVNFNFDDPNLIILPLAFGKRQGREFIWNDLLSLETGSLKLANGRVIEKTLYNRRTRQDEPALFVALTFERREVLDSSNIKPMNLIGVDRGENIPAVIALTDPEGCPLSRFKDSLGNPTHILRIGESYKEKQRTIQAKKEVEQRRAGGYSRKYASKAKNLADDMVRNTARDLLYYAVTQDAMLIFENLSRGFGRQGKRTFMAERQYTRMEDWLTAKLAYEGLPSKTYLSKTLAQYTSKTCSNCGFTITSADYDRVLEKLKKTATGWMTTINGKELKVEGQITYYNRYKRQNVVKDLSVELDRLSEESVNNDISSWTKGRSGEALSLLKKRFSHRPVQEKFVCLNCGFETHADEQAALNIARSWLFLRSQEYKKYQTNKTTGNTDKRAFVETWQSFYRKKLKEVWKPAV

SEQ ID NO: 36767 - protein, 979 aa, synthetic construct
  REGION 1..979: note = engineered CasX variant
QEIKRLNKIRRRLVKDSNTKKAGKTGPMKTLLVRVMTPDLRERLENLRKKPENIPQPISNTSRANLNKLLTDYTEMKKAILHVYWEEFQKDPVGLMSRVAQPASKKIDQNKLKPEMDEKGNLTTAGFACSQCGQPLFVYKLEQVSEKGKAYTNYFGRCNVAEHEKLIKLAQLKPEKDSDEAVTYSLGKFGQRALDFYSIHVTKESTHPVKPLAQIAGNRYASGPVGKALSDACMGTIASFLSKYQDIIIEHQKVVKGNQKRLESLRELAGKENLEYPSVTLPPQPHTKEGVDAYNEVIARVRMWVNLNLWQKLKLSRDDAKPLLRLKGFPSFPLVERQANAEVDWWDMVCNVKKLINEKKEDGKVFWQNLAGYKRQEALRPYLSSEEDRKKGKKFARYQLGDLLLHLEKKHGEDWGKVYDEAWERIDKKVEGLSKHIKLEEERRSEDAQSKAALTDWLRAKASFVIEGLKEADKDEFCRCELKLQKWYGDLRGKPFAIEAENSILDISGFSKQYNCAFIWQKDGVKKLNLYLIINYFKGGKLRFKKIKPEAFEANRFYTVINKKSGEIVPMEVNFNFDDPNLIILPLAFGKRQGREFIWNDLLSLETGSLKLANGRVIEKTLYNRRTRQDEPALFVALTFERREVLDSSNIKPMNLIGVDRGENIPAVIALTDPEGCPLSRFKDSLGNPTHILRIGESYKEKQRTIQAKKEVEQRRAGGYSRKYASKAKNLADDMVRNTARDLLYYAVTQDAMLIFENLSRGFGRQGKRTFMAERQYTRMEDWLTAKLAYEGLPSKTYLSKTLAQYTSKTCSNCGFTITSADYDRVLEKLKKTATGWMTTINGKELKVEGQITYYNRYKRQNVVKDLSVELDRLSEESVNNDISSWTKGRSGEALSLLKKRFSHRPVQEKFVCLNCGFETHADEQAALNIARSWLFLRSQEYKKYQTNKTTGNTDKRAFVETWQSFYRKKLKEVWKPAV

SEQ ID NO: 36768 - protein, 978 aa, synthetic construct
  REGION 1..978: note = engineered CasX variant
QEIKRLNKIRRRLVKDSNTKKAGKTGPMKTLLVRVMTPDLRERLENLRKKPENIPQPISNTSRANLNKLLTDYTEMKKAILHVYWEEFQKDPVGLMSRVAQPASKKIDQNKLKPEMDEKGNLTTAGFACSQCGQPLFVYKLEQVSEKGKAYTNYFGRCNVAEHEKLILLAQLKPEKDSDEAVTYSLGKFGQRALDFYSIHVTKESTHPVKPLAQIAGNRYASPVGKALSDACMGTIASFLSKYQDIIIEHQKVVKGNQKRLESLRELAGKENLEYPSVTLPPQPHTKEGVDAYNEVIARVRMWVNLNLWQKLKLSRDDAKPLLRLKGFPSFPLVERQANAEVDWWDMVCNVKKLINEKKEDGKVFWQNLAGYKRQEALRPYLSSEEDRKKGKKFARYQLGDLLLHLEKKHGEDWGKVYDEAWERIDKKVEGLSKHIKLEEERRSEDAQSKAALTDWLRAKASFVIEGLKEADKDEFCRCELKLQKWYGDLRGKPFAIEAENSILDISGFSKQYNCAFIWQKDGVKKLNLYLIINYFKGGKLRFKKIKPEAFEANRFYTVINKKSGEIVPMEVNFNFDDPNLIILPLAFGKRQGREFIWNDLLSLETGSLKLANGRVIEKTLYNRRTRQDEPALFVALTFERREVLDSSNIKPMNLIGVDRGENIPAVIALTDPEGCPLSRFKDSLGNPTHILRIGESYKEKQRTIQAKKEVEQRRAGGYSRKYASKAKNLADDMVRNTARDLLYYAVTQDAMLIFENLSRGFGRQGKRTFMAERQYTRMEDWLTAKLAYEGLPSKTYLSKTLAQYTSKTCSNCGFTITSADYDRVLEKLKKTATGWMTTINGKELKVEGQITYYNRYKRQNVVKDLSVELDRLSEESVNNDISSWTKGRSGEALSLLKKRFSHRPVQEKFVCLNCGFETHADEQAALNIARSWLFLRSQEYKKYQTNKTTGNTDKRAFVETWQSFYRKKLKEVWKPAV

SEQ ID NO: 36769 - protein, 979 aa, synthetic construct
  REGION 1..979: note = engineered CasX variant
QEIKRINKIRRRLVKDSNTKKAGKTGPMKTLLVRVMTPDLRERLENLRKKPENIPQPISNTSRANLNKLLTDYTEMKKAILHVYWEEFQKDPVGLMSRVAQPASKKIDQNKLKPEMDEKGNLTTAGFACSQCGQPLFVYKLEQVSEKGKAYTNYVGRCNVAEHEKLILLAQLKPEKDSDEAVTYSLGKFGQRALDFYSIHVTKESTHPVKPLAQIAGNRYASYPVGKALSDACMGTIASFLSKYQDIIIEHQKVVKGNQKRLESLRELAGKENLEYPSVTLPPQPHTKEGVDAYNEVIARVRMWVNLNLWQKLKLSRDDAKPLLRLKGFPSFPLVERQANAEVDWWDMVCNVKKLINEKKEDGKVFWQNLAGYKRQEALRPYLSSEEDRKKGKKFARYQLGDLLLHLEKKHGEDWGKVYDEAWERIDKKVEGLSKHIKLEEERRSEDAQSKAALTDWLRAKASFVIEGLKEADKDEFCRCELKLQKWYGDLRGKPFAIEAENSILDISGFSKQYNCAFIWQKDGVKKLNLYLIINYFKGGKLRFKKIKPEAFEANRFYTVINKKSGEIVPMEVNFNFDDPNLIILPLAFGKRQGREFIWNDLLSLETGSLKLANGRVIEKTLYNRRTRQDEPALFVALTFERREVLDSSNIKPMNLIGVDRGENIPAVIALTDPEGCPLSRFKDSLGNPTHILRIGESYKEKQRTIQAKKEVEQRRAGGYSRKYASKAKNLADDMVRNTARDLLYYAVTQDAMLIFENLSRGFGRQGKRTFMAERQYTRMEDWLTAKLAYEGLPSKTYLSKTLAQYTSKTCSNCGFTITSADYDRVLEKLKKTATGWMTTINGKELKVEGQITYYNRYKRQNVVKDLSVELDRLSEESVNNDISSWTKGRSGEALSLLKKRFSHRPVQEKFVCLNCGFETHADEQAALNIARSWLFLRSQEYKKYQTNKTTGNTDKRAFVETWQSFYRKKLKEVWKPAV

SEQ ID NO: 36770 - protein, 979 aa, synthetic construct
  REGION 1..979: note = engineered CasX variant
QEIKRINKIRRRLVKDSNTKKAGKTGPMKTLLVRVMTPDLRERLENLRKKPENIPQPISNTSRANLNKLLTDYTEMKKAILHVYWEEFQKDPVGLMSRVAQPASKKIDQNKLKPEMDEKGNLTTAGFACSQCGQPLFVYKLEQVSEKGKAYTNYVGRCNVAEHEKLILLAQLKPEKDSDEAVTYSLGKFGQRALDFYSIHVTKESTHPVKPLAQIAGNRYASHPVGKALSDACMGTIASFLSKYQDIIIEHQKVVKGNQKRLESLRELAGKENLEYPSVTLPPQPHTKEGVDAYNEVIARVRMWVNLNLWQKLKLSRDDAKPLLRLKGFPSFPLVERQANAEVDWWDMVCNVKKLINEKKEDGKVFWQNLAGYKRQEALRPYLSSEEDRKKGKKFARYQLGDLLLHLEKKHGEDWGKVYDEAWERIDKKVEGLSKHIKLEEERRSEDAQSKAALTDWLRAKASFVIEGLKEADKDEFCRCELKLQKWYGDLRGKPFAIEAENSILDISGFSKQYNCAFIWQKDGVKKLNLYLIINYFKGGKLRFKKIKPEAFEANRFYTVINKKSGEIVPMEVNFNFDDPNLIILPLAFGKRQGREFIWNDLLSLETGSLKLANGRVIEKTLYNRRTRQDEPALFVALTFERREVLDSSNIKPMNLIGVDRGENIPAVIALTDPEGCPLSRFKDSLGNPTHILRIGESYKEKQRTIQAKKEVEQRRAGGYSRKYASKAKNLADDMVRNTARDLLYYAVTQDAMLIFENLSRGFGRQGKRTFMAERQYTRMEDWLTAKLAYEGLPSKTYLSKTLAQYTSKTCSNCGFTITSADYDRVLEKLKKTATGWMTTINGKELKVEGQITYYNRYKRQNVVKDLSVELDRLSEESVNNDISSWTKGRSGEALSLLKKRFSHRPVQEKFVCLNCGFETHADEQAALNIARSWLFLRSQEYKKYQTNKTTGNTDKRAFVETWQSFYRKKLKEVWKPAV

SEQ ID NO: 36771 - protein, 979 aa, synthetic construct
  REGION 1..979: note = engineered CasX variant
QEIKRINKIRRRLVKDSNTKKAGKTGPMKTLLVRVMTPDLRERLENLRKKPENIPQPISNTSRANLNKLLTDYTEMKKAILHVYWEEFQKDPVGLMSRVAQPASKKIDQNKLKPEMDEKGNLTTAGFACSQCGQPLFVYKLEQVSEKGKAYTNYVGRCNVAEHEKLILLAQLKPEKDSDEAVTYSLGKFGQRALDFYSIHVTKESTHPVKPLAQIAGNRYASSPVGKALSDACMGTIASFLSKYQDIIIEHQKVVKGNQKRLESLRELAGKENLEYPSVTLPPQPHTKEGVDAYNEVIARVRMWVNLNLWQKLKLSRDDAKPLLRLKGFPSFPLVERQANAEVDWWDMVCNVKKLINEKKEDGKVFWQNLAGYKRQEALRPYLSSEEDRKKGKKFARYQLGDLLLHLEKKHGEDWGKVYDEAWERIDKKVEGLSKHIKLEEERRSEDAQSKAALTDWLRAKASFVIEGLKEADKDEFCRCELKLQKWYGDLRGKPFAIEAENSILDISGFSKQYNCAFIWQKDGVKKLNLYLIINYFKGGKLRFKKIKPEAFEANRFYTVINKKSGEIVPMEVNFNFDDPNLIILPLAFGKRQGREFIWNDLLSLETGSLKLANGRVIEKTLYNRRTRQDEPALFVALTFERREVLDSSNIKPMNLIGVDRGENIPAVIALTDPEGCPLSRFKDSLGNPTHILRIGESYKEKQRTIQAKKEVEQRRAGGYSRKYASKAKNLADDMVRNTARDLLYYAVTQDAMLIFENLSRGFGRQGKRTFMAERQYTRMEDWLTAKLAYEGLPSKTYLSKTLAQYTSKTCSNCGFTITSADYDRVLEKLKKTATGWMTTINGKELKVEGQITYYNRYKRQNVVKDLSVELDRLSEESVNNDISSWTKGRSGEALSLLKKRFSHRPVQEKFVCLNCGFETHADEQAALNIARSWLFLRSQEYKKYQTNKTTGNTDKRAFVETWQSFYRKKLKEVWKPAV

SEQ ID NO: 36772 - protein, 979 aa, synthetic construct
  REGION 1..979: note = engineered CasX variant
QEIKRINKIRRRLVKDSNTKKAGKTGPMKTLLVRVMTPDLRERLENLRKKPENIPQPISNTSRANLNKLLTDYTEMKKAILHVYWEEFQKDPVGLMSRVAQPASKKIDQNKLKPEMDEKGNLTTAGFACSQCGQPLFVYKLEQVSEKGKAYTNYVGRCNVAEHEKLILLAQLKPEKDSDEAVTYSLGKFGQRALDFYSIHVTKESTHPVKPLAQIAGNRYASTPVGKALSDACMGTIASFLSKYQDIIIEHQKVVKGNQKRLESLRELAGKENLEYPSVTLPPQPHTKEGVDAYNEVIARVRMWVNLNLWQKLKLSRDDAKPLLRLKGFPSFPLVERQANAEVDWWDMVCNVKKLINEKKEDGKVFWQNLAGYKRQEALRPYLSSEEDRKKGKKFARYQLGDLLLHLEKKHGEDWGKVYDEAWERIDKKVEGLSKHIKLEEERRSEDAQSKAALTDWLRAKASFVIEGLKEADKDEFCRCELKLQKWYGDLRGKPFAIEAENSILDISGFSKQYNCAFIWQKDGVKKLNLYLIINYFKGGKLRFKKIKPEAFEANRFYTVINKKSGEIVPMEVNFNFDDPNLIILPLAFGKRQGREFIWNDLLSLETGSLKLANGRVIEKTLYNRRTRQDEPALFVALTFERREVLDSSNIKPMNLIGVDRGENIPAVIALTDPEGCPLSRFKDSLGNPTHILRIGESYKEKQRTIQAKKEVEQRRAGGYSRKYASKAKNLADDMVRNTARDLLYYAVTQDAMLIFENLSRGFGRQGKRTFMAERQYTRMEDWLTAKLAYEGLPSKTYLSKTLAQYTSKTCSNCGFTITSADYDRVLEKLKKTATGWMTTINGKELKVEGQITYYNRYKRQNVVKDLSVELDRLSEESVNNDISSWTKGRSGEALSLLKKRFSHRPVQEKFVCLNCGFETHADEQAALNIARSWLFLRSQEYKKYQTNKTTGNTDKRAFVETWQSFYRKKLKEVWKPAV

SEQ ID NO: 36773 - protein, 979 aa, synthetic construct
  REGION 1..979: note = engineered CasX variant
QEIKRINKIRRRLVKDSNTKKAGKTGPMKTLLVRVMTPDLRERLENLRKKPENIPQPISNTSRANLNKLLTDYTEMKKAILHVYWEEFQKDPVGLMSRVAQPASKKIDQNKLKPEMDEKGNLTTAGFACSQCGQPLFVYKLEQVSEKGKAYTNYVGRCNVAEHEKLILLAQLKPEKDSDEAVTYSLGKFGQRALDFYSIHVTKESTHPVKPLAQIAGNRYASAPVGKALSDACMGTIASFLSKYQDIIIEHQKVVKGNQKRLESLRELAGKENLEYPSVTLPPQPHTKEGVDAYNEVIARVRMWVNLNLWQKLKLSRDDAKPLLRLKGFPSFPLVERQANAEVDWWDMVCNVKKLINEKKEDGKVFWQNLAGYKRQEALRPYLSSEEDRKKGKKFARYQLGDLLLHLEKKHGEDWGKVYDEAWERIDKKVEGLSKHIKLEEERRSEDAQSKAALTDWLRAKASFVIEGLKEADKDEFCRCELKLQKWYGDLRGKPFAIEAENSILDISGFSKQYNCAFIWQKDGVKKLNLYLIINYFKGGKLRFKKIKPEAFEANRFYTVINKKSGEIVPMEVNFNFDDPNLIILPLAFGKRQGREFIWNDLLSLETGSLKLANGRVIEKTLYNRRTRQDEPALFVALTFERREVLDSSNIKPMNLIGVDRGENIPAVIALTDPEGCPLSRFKDSLGNPTHILRIGESYKEKQRTIQAKKEVEQRRAGGYSRKYASKAKNLADDMVRNTARDLLYYAVTQDAMLIFENLSRGFGRQGKRTFMAERQYTRMEDWLTAKLAYEGLPSKTYLSKTLAQYTSKTCSNCGFTITSADYDRVLEKLKKTATGWMTTINGKELKVEGQITYYNRYKRQNVVKDLSVELDRLSEESVNNDISSWTKGRSGEALSLLKKRFSHRPVQEKFVCLNCGFETHADEQAALNIARSWLFLRSQEYKKYQTNKTTGNTDKRAFVETWQSFYRKKLKEVWKPAV

SEQ ID NO: 36774 - protein, 979 aa, synthetic construct
  REGION 1..979: note = engineered CasX variant
QEIKRINKIRRRLVKDSNTKKAGKTGPMKTLLVRVMTPDLRERLENLRKKPENIPQPISNTSRANLNKLLTDYTEMKKAILHVYWEEFQKDPVGLMSRVAQPASKKIDQNKLKPEMDEKGNLTTAGFACSQCGQPLFVYKLEQVSEKGKAYTNYVGRCNVAEHEKLILLAQLKPEKDSDEAVTYSLGKFGQRALDFYSIHVTKESTHPVKPLAQIAGNRYASVPVGKALSDACMGTIASFLSKYQDIIIEHQKVVKGNQKRLESLRELAGKENLEYPSVTLPPQPHTKEGVDAYNEVIARVRMWVNLNLWQKLKLSRDDAKPLLRLKGFPSFPLVERQANAEVDWWDMVCNVKKLINEKKEDGKVFWQNLAGYKRQEALRPYLSSEEDRKKGKKFARYQLGDLLLHLEKKHGEDWGKVYDEAWERIDKKVEGLSKHIKLEEERRSEDAQSKAALTDWLRAKASFVIEGLKEADKDEFCRCELKLQKWYGDLRGKPFAIEAENSILDISGFSKQYNCAFIWQKDGVKKLNLYLIINYFKGGKLRFKKIKPEAFEANRFYTVINKKSGEIVPMEVNFNFDDPNLIILPLAFGKRQGREFIWNDLLSLETGSLKLANGRVIEKTLYNRRTRQDEPALFVALTFERREVLDSSNIKPMNLIGVDRGENIPAVIALTDPEGCPLSRFKDSLGNPTHILRIGESYKEKQRTIQAKKEVEQRRAGGYSRKYASKAKNLADDMVRNTARDLLYYAVTQDAMLIFENLSRGFGRQGKRTFMAERQYTRMEDWLTAKLAYEGLPSKTYLSKTLAQYTSKTCSNCGFTITSADYDRVLEKLKKTATGWMTTINGKELKVEGQITYYNRYKRQNVVKDLSVELDRLSEESVNNDISSWTKGRSGEALSLLKKRFSHRPVQEKFVCLNCGFETHADEQAALNIARSWLFLRSQEYKKYQTNKTTGNTDKRAFVETWQSFYRKKLKEVWKPAV

SEQ ID NO: 36775 - protein, 979 aa, synthetic construct
  REGION 1..979: note = engineered CasX variant
QEIKRINKIRRRLVKDSNTKKAGKTGPMKTLLVRVMTPDLRERLENLRKKPENIPQPISNTSRANLNKLLTDYTEMKKAILHVYWEEFQKDPVGLMSRVAQPASKKIDQNKLKPEMDEKGNLTTAGFACSQCGQPLFVYKLEQVSEKGKAYTNYVGRCNVAEHEKLIKLAQLKPEKDSDEAVTYSLGKFGQRALDFYSIHVTKESTHPVKPLAQIAGNRYASGPVGKALSDACMGTIASFLSKYQDIIIEHQKVVKGNQKRLESLRELAGKENLEYPSVTLPPQPHTKEGVDAYNEVIARVRMWVNLNLWQKLKLSRDDAKPLLRLKGFPSFPLVERQANAEVDWWDMVCNVKKLINEKKEDGKVFWQNLAGYKRQEALRPYLSSEEDRKKGKKFARYQLGDLLLHLEKKHGEDWGKVYDEAWERIDKKVEGLSKHIKLEEERRSEDAQSKAALTDWLRAKASFVIEGLKEADKDEFCRCELKLQKWYGDLRGKPFAIEAENSILDISGFSKQYNCAFIWQKDGVKKLNLYLIINYFKGGKLRFKKIKPEAFEANRFYTVINKKSGEIVPMEVNFNFDDPNLIILPLAFGKRQGREFIWNDLLSLETGSLKLANGRVIEKTLYNRRTRQDEPALFVALTFERREVLDSSNIKPMNLIGVDRGENIPAVIALTDPEGCPLSRFKDSLGNPTHILRIGESYKEKQRTIQAKKEVEQRRAGGYSRKYASKAKNLADDMVRNTARDLLYYAVTQDAMLIFENLSRGFGRQGKRTFMAERQYTRMEDWLTAKLAYEGLPSKTYLSKTLAQYTSKTCSNCGFTITSADYDRVLEKLKKTATGWMTTINGKELKVEGQITYYNRYKRQNVVKDLSVELDRLSEESVNNDISSWTKGRSGEALSLLKKRFSHRPVQEKFVCLNCGFETHADEQAALNIARSWLFLRSQEYKKYQTNKTTGNTDKRAFVETWQSFYRKKLKEVWKPAV

SEQ ID NO: 36776 - protein, 978 aa, synthetic construct
  REGION 1..978: note = engineered CasX variant
QEIKRINKIRRRLVKDSNTKKAGKTGPMKTLLVRVMTPDLRERLENLRKKPENIPQPISNTSRANLNKLLTDYTEMKKAILHVYWEEFQKDPVGLMSRVAQPASKKIDQNKLKPEMDEKGNLTTAGFACSQCGQPLFVYKLEQVSEKGKAYTNYVGRCNVAEHEKLILLAQLKPEKDSDEAVTYSLGKFGQRALDFYSIHVTKESTHPVKPLAQIAGNRYASPVGKALSDACMGTIASFLSKYQDIIIEHQKVVKGNQKRLESLRELAGKENLEYPSVTLPPQPHTKEGVDAYNEVIARVRMWVNLNLWQKLKLSRDDAKPLLRLKGFPSFPLVERQANAEVDWWDMVCNVKKLINEKKEDGKVFWQNLAGYKRQEALRPYLSSEEDRKKGKKFARYQLGDLLLHLEKKHGEDWGKVYDEAWERIDKKVEGLSKHIKLEEERRSEDAQSKAALTDWLRAKASFVIEGLKEADKDEFCRCELKLQKWYGDLRGKPFAIEAENSILDISGFSKQYNCAFIWQKDGVKKLNLYLIINYFKGGKLRFKKIKPEAFEANRFYTVINKKSGEIVPMEVNFNFDDPNLIILPLAFGKRQGREFIWNDLLSLETGSLKLANGRVIEKTLYNRRTRQDEPALFVALTFERREVLDSSNIKPMNLIGVDRGENIPAVIALTDPEGCPLSRFKDSLGNPTHILRIGESYKEKQRTIQAKKEVEQRRAGGYSRKYASKAKNLADDMVRNTARDLLYYAVTQDAMLIFENLSRGFGRQGKRTFMAERQYTRMEDWLTAKLAYEGLPSKTYLSKTLAQYTSKTCSNCGFTITSADYDRVLEKLKKTATGWMTTINGKELKVEGQITYYNRYKRQNVVKDLSVELDRLSEESVNNDISSWTKGRSGEALSLLKKRFSHRPVQEKFVCLNCGFETHADEQAALNIARSWLFLRSQEYKKYQTNKTTGNTDKRAFVETWQSFYRKKLKEVWKPAV

SEQ ID NO: 36777 - protein, 979 aa, synthetic construct
  REGION 1..979: note = engineered CasX variant
QEIKRINKIRRRLVKDSNTKKAGKTGPMKTLLVRVMTPDLRERLENLRKKPENIPQPISNTSRANLNKLLTDYTEMKKAILHVYWEEFQKDPVGLMSRVAQPASKKIDQNKLKPEMDEKGNLTTAGFACSQCGQPLFVYKLEQVSEKGKAYTNYFGRCNVAEHEKLILLAQLKPEKDSDEAVTYSLGKFGQRALDFYSIHVTKESTHPVKPLAQIAGNRYASYPVGKALSDACMGTIASFLSKYQDIIIEHQKVVKGNQKRLESLRELAGKENLEYPSVTLPPQPHTKEGVDAYNEVIARVRMWVNLNLWQKLKLSRDDAKPLLRLKGFPSFPLVERQANAEVDWWDMVCNVKKLINEKKEDGKVFWQNLAGYKRQEALRPYLSSEEDRKKGKKFARYQLGDLLLHLEKKHGEDWGKVYDEAWERIDKKVEGLSKHIKLEEERRSEDAQSKAALTDWLRAKASFVIEGLKEADKDEFCRCELKLQKWYGDLRGKPFAIEAENSILDISGFSKQYNCAFIWQKDGVKKLNLYLIINYFKGGKLRFKKIKPEAFEANRFYTVINKKSGEIVPMEVNFNFDDPNLIILPLAFGKRQGREFIWNDLLSLETGSLKLANGRVIEKTLYNRRTRQDEPALFVALTFERREVLDSSNIKPMNLIGVDRGENIPAVIALTDPEGCPLSRFKDSLGNPTHILRIGESYKEKQRTIQAKKEVEQRRAGGYSRKYASKAKNLADDMVRNTARDLLYYAVTQDAMLIFENLSRGFGRQGKRTFMAERQYTRMEDWLTAKLAYEGLASKTYLSKTLAQYTSKTCSNCGFTITSADYDRVLEKLKKTATGWMTTINGKELKVEGQITYYNRYKRQNVVKDLSVELDRLSEESVNNDISSWTKGRSGEALSLLKKRFSHRPVQEKFVCLNCGFETHADEQAALNIARSWLFLRSQEYKKYQTNKTTGNTDKRAFVETWQSFYRKKLKEVWKPAV

SEQ ID NO: 36778 - protein, 979 aa, synthetic construct
  REGION 1..979: note = engineered CasX variant
QEIKRINKIRRRLVKDSNTKKAGKTGPMKTLLVRVMTPDLRERLENLRKKPENIPQPISNTSRANLNKLLTDYTEMKKAILHVYWEEFQKDPVGLMSRVAQPASKKIDQNKLKPEMDEKGNLTTAGFACSQCGQPLFVYKLEQVSEKGKAYTNYFGRCNVAEHEKLILLAQLKPEKDSDEAVTYSLGKFGQRALDFYSIHVTKESTHPVKPLAQIAGNRYASHPVGKALSDACMGTIASFLSKYQDIIIEHQKVVKGNQKRLESLRELAGKENLEYPSVTLPPQPHTKEGVDAYNEVIARVRMWVNLNLWQKLKLSRDDAKPLLRLKGFPSFPLVERQANAEVDWWDMVCNVKKLINEKKEDGKVFWQNLAGYKRQEALRPYLSSEEDRKKGKKFARYQLGDLLLHLEKKHGEDWGKVYDEAWERIDKKVEGLSKHIKLEEERRSEDAQSKAALTDWLRAKASFVIEGLKEADKDEFCRCELKLQKWYGDLRGKPFAIEAENSILDISGFSKQYNCAFIWQKDGVKKLNLYLIINYFKGGKLRFKKIKPEAFEANRFYTVINKKSGEIVPMEVNFNFDDPNLIILPLAFGKRQGREFIWNDLLSLETGSLKLANGRVIEKTLYNRRTRQDEPALFVALTFERREVLDSSNIKPMNLIGVDRGENIPAVIALTDPEGCPLSRFKDSLGNPTHILRIGESYKEKQRTIQAKKEVEQRRAGGYSRKYASKAKNLADDMVRNTARDLLYYAVTQDAMLIFENLSRGFGRQGKRTFMAERQYTRMEDWLTAKLAYEGLASKTYLSKTLAQYTSKTCSNCGFTITSADYDRVLEKLKKTATGWMTTINGKELKVEGQITYYNRYKRQNVVKDLSVELDRLSEESVNNDISSWTKGRSGEALSLLKKRFSHRPVQEKFVCLNCGFETHADEQAALNIARSWLFLRSQEYKKYQTNKTTGNTDKRAFVETWQSFYRKKLKEVWKPAV

SEQ ID NO: 36779 - protein, 979 aa, synthetic construct
  REGION 1..979: note = engineered CasX variant
QEIKRINKIRRRLVKDSNTKKAGKTGPMKTLLVRVMTPDLRERLENLRKKPENIPQPISNTSRANLNKLLTDYTEMKKAILHVYWEEFQKDPVGLMSRVAQPASKKIDQNKLKPEMDEKGNLTTAGFACSQCGQPLFVYKLEQVSEKGKAYTNYFGRCNVAEHEKLILLAQLKPEKDSDEAVTYSLGKFGQRALDFYSIHVTKESTHPVKPLAQIAGNRYASSPVGKALSDACMGTIASFLSKYQDIIIEHQKVVKGNQKRLESLRELAGKENLEYPSVTLPPQPHTKEGVDAYNEVIARVRMWVNLNLWQKLKLSRDDAKPLLRLKGFPSFPLVERQANAEVDWWDMVCNVKKLINEKKEDGKVFWQNLAGYKRQEALRPYLSSEEDRKKGKKFARYQLGDLLLHLEKKHGEDWGKVYDEAWERIDKKVEGLSKHIKLEEERRSEDAQSKAALTDWLRAKASFVIEGLKEADKDEFCRCELKLQKWYGDLRGKPFAIEAENSILDISGFSKQYNCAFIWQKDGVKKLNLYLIINYFKGGKLRFKKIKPEAFEANRFYTVINKKSGEIVPMEVNFNFDDPNLIILPLAFGKRQGREFIWNDLLSLETGSLKLANGRVIEKTLYNRRTRQDEPALFVALTFERREVLDSSNIKPMNLIGVDRGENIPAVIALTDPEGCPLSRFKDSLGNPTHILRIGESYKEKQRTIQAKKEVEQRRAGGYSRKYASKAKNLADDMVRNTARDLLYYAVTQDAMLIFENLSRGFGRQGKRTFMAERQYTRMEDWLTAKLAYEGLASKTYLSKTLAQYTSKTCSNCGFTITSADYDRVLEKLKKTATGWMTTINGKELKVEGQITYYNRYKRQNVVKDLSVELDRLSEESVNNDISSWTKGRSGEALSLLKKRFSHRPVQEKFVCLNCGFETHADEQAALNIARSWLFLRSQEYKKYQTNKTTGNTDKRAFVETWQSFYRKKLKEVWKPAV

SEQ ID NO: 36780 - protein, 979 aa, synthetic construct
  REGION 1..979: note = engineered CasX variant
QEIKRINKIRRRLVKDSNTKKAGKTGPMKTLLVRVMTPDLRERLENLRKKPENIPQPISNTSRANLNKLLTDYTEMKKAILHVYWEEFQKDPVGLMSRVAQPASKKIDQNKLKPEMDEKGNLTTAGFACSQCGQPLFVYKLEQVSEKGKAYTNYFGRCNVAEHEKLILLAQLKPEKDSDEAVTYSLGKFGQRALDFYSIHVTKESTHPVKPLAQIAGNRYASTPVGKALSDACMGTIASFLSKYQDIIIEHQKVVKGNQKRLESLRELAGKENLEYPSVTLPPQPHTKEGVDAYNEVIARVRMWVNLNLWQKLKLSRDDAKPLLRLKGFPSFPLVERQANAEVDWWDMVCNVKKLINEKKEDGKVFWQNLAGYKRQEALRPYLSSEEDRKKGKKFARYQLGDLLLHLEKKHGEDWGKVYDEAWERIDKKVEGLSKHIKLEEERRSEDAQSKAALTDWLRAKASFVIEGLKEADKDEFCRCELKLQKWYGDLRGKPFAIEAENSILDISGFSKQYNCAFIWQKDGVKKLNLYLIINYFKGGKLRFKKIKPEAFEANRFYTVINKKSGEIVPMEVNFNFDDPNLIILPLAFGKRQGREFIWNDLLSLETGSLKLANGRVIEKTLYNRRTRQDEPALFVALTFERREVLDSSNIKPMNLIGVDRGENIPAVIALTDPEGCPLSRFKDSLGNPTHILRIGESYKEKQRTIQAKKEVEQRRAGGYSRKYASKAKNLADDMVRNTARDLLYYAVTQDAMLIFENLSRGFGRQGKRTFMAERQYTRMEDWLTAKLAYEGLASKTYLSKTLAQYTSKTCSNCGFTITSADYDRVLEKLKKTATGWMTTINGKELKVEGQITYYNRYKRQNVVKDLSVELDRLSEESVNNDISSWTKGRSGEALSLLKKRFSHRPVQEKFVCLNCGFETHADEQAALNIARSWLFLRSQEYKKYQTNKTTGNTDKRAFVETWQSFYRKKLKEVWKPAV

SEQ ID NO: 36781 - protein, 979 aa, synthetic construct
  REGION 1..979: note = engineered CasX variant
QEIKRINKIRRRLVKDSNTKKAGKTGPMKTLLVRVMTPDLRERLENLRKKPENIPQPISNTSRANLNKLLTDYTEMKKAILHVYWEEFQKDPVGLMSRVAQPASKKIDQNKLKPEMDEKGNLTTAGFACSQCGQPLFVYKLEQVSEKGKAYTNYFGRCNVAEHEKLILLAQLKPEKDSDEAVTYSLGKFGQRALDFYSIHVTKESTHPVKPLAQIAGNRYASAPVGKALSDACMGTIASFLSKYQDIIIEHQKVVKGNQKRLESLRELAGKENLEYPSVTLPPQPHTKEGVDAYNEVIARVRMWVNLNLWQKLKLSRDDAKPLLRLKGFPSFPLVERQANAEVDWWDMVCNVKKLINEKKEDGKVFWQNLAGYKRQEALRPYLSSEEDRKKGKKFARYQLGDLLLHLEKKHGEDWGKVYDEAWERIDKKVEGLSKHIKLEEERRSEDAQSKAALTDWLRAKASFVIEGLKEADKDEFCRCELKLQKWYGDLRGKPFAIEAENSILDISGFSKQYNCAFIWQKDGVKKLNLYLIINYFKGGKLRFKKIKPEAFEANRFYTVINKKSGEIVPMEVNFNFDDPNLIILPLAFGKRQGREFIWNDLLSLETGSLKLANGRVIEKTLYNRRTRQDEPALFVALTFERREVLDSSNIKPMNLIGVDRGENIPAVIALTDPEGCPLSRFKDSLGNPTHILRIGESYKEKQRTIQAKKEVEQRRAGGYSRKYASKAKNLADDMVRNTARDLLYYAVTQDAMLIFENLSRGFGRQGKRTFMAERQYTRMEDWLTAKLAYEGLASKTYLSKTLAQYTSKTCSNCGFTITSADYDRVLEKLKKTATGWMTTINGKELKVEGQITYYNRYKRQNVVKDLSVELDRLSEESVNNDISSWTKGRSGEALSLLKKRFSHRPVQEKFVCLNCGFETHADEQAALNIARSWLFLRSQEYKKYQTNKTTGNTDKRAFVETWQSFYRKKLKEVWKPAV

SEQ ID NO: 36782 - protein, 979 aa, synthetic construct
  REGION 1..979: note = engineered CasX variant
QEIKRINKIRRRLVKDSNTKKAGKTGPMKTLLVRVMTPDLRERLENLRKKPENIPQPISNTSRANLNKLLTDYTEMKKAILHVYWEEFQKDPVGLMSRVAQPASKKIDQNKLKPEMDEKGNLTTAGFACSQCGQPLFVYKLEQVSEKGKAYTNYFGRCNVAEHEKLILLAQLKPEKDSDEAVTYSLGKFGQRALDFYSIHVTKESTHPVKPLAQIAGNRYASVPVGKALSDACMGTIASFLSKYQDIIIEHQKVVKGNQKRLESLRELAGKENLEYPSVTLPPQPHTKEGVDAYNEVIARVRMWVNLNLWQKLKLSRDDAKPLLRLKGFPSFPLVERQANAEVDWWDMVCNVKKLINEKKEDGKVFWQNLAGYKRQEALRPYLSSEEDRKKGKKFARYQLGDLLLHLEKKHGEDWGKVYDEAWERIDKKVEGLSKHIKLEEERRSEDAQSKAALTDWLRAKASFVIEGLKEADKDEFCRCELKLQKWYGDLRGKPFAIEAENSILDISGFSKQYNCAFIWQKDGVKKLNLYLIINYFKGGKLRFKKIKPEAFEANRFYTVINKKSGEIVPMEVNFNFDDPNLIILPLAFGKRQGREFIWNDLLSLETGSLKLANGRVIEKTLYNRRTRQDEPALFVALTFERREVLDSSNIKPMNLIGVDRGENIPAVIALTDPEGCPLSRFKDSLGNPTHILRIGESYKEKQRTIQAKKEVEQRRAGGYSRKYASKAKNLADDMVRNTARDLLYYAVTQDAMLIFENLSRGFGRQGKRTFMAERQYTRMEDWLTAKLAYEGLASKTYLSKTLAQYTSKTCSNCGFTITSADYDRVLEKLKKTATGWMTTINGKELKVEGQITYYNRYKRQNVVKDLSVELDRLSEESVNNDISSWTKGRSGEALSLLKKRFSHRPVQEKFVCLNCGFETHADEQAALNIARSWLFLRSQEYKKYQTNKTTGNTDKRAFVETWQSFYRKKLKEVWKPAV

SEQ ID NO: 36783 - protein, 979 aa, synthetic construct
  REGION 1..979: note = engineered CasX variant
QEIKRINKIRRRLVKDSNTKKAGKTGPMKTLLVRVMTPDLRERLENLRKKPENIPQPISNTSRANLNKLLTDYTEMKKAILHVYWEEFQKDPVGLMSRVAQPASKKIDQNKLKPEMDEKGNLTTAGFACSQCGQPLFVYKLEQVSEKGKAYTNYFGRCNVAEHEKLIKLAQLKPEKDSDEAVTYSLGKFGQRALDFYSIHVTKESTHPVKPLAQIAGNRYASGPVGKALSDACMGTIASFLSKYQDIIIEHQKVVKGNQKRLESLRELAGKENLEYPSVTLPPQPHTKEGVDAYNEVIARVRMWVNLNLWQKLKLSRDDAKPLLRLKGFPSFPLVERQANAEVDWWDMVCNVKKLINEKKEDGKVFWQNLAGYKRQEALRPYLSSEEDRKKGKKFARYQLGDLLLHLEKKHGEDWGKVYDEAWERIDKKVEGLSKHIKLEEERRSEDAQSKAALTDWLRAKASFVIEGLKEADKDEFCRCELKLQKWYGDLRGKPFAIEAENSILDISGFSKQYNCAFIWQKDGVKKLNLYLIINYFKGGKLRFKKIKPEAFEANRFYTVINKKSGEIVPMEVNFNFDDPNLIILPLAFGKRQGREFIWNDLLSLETGSLKLANGRVIEKTLYNRRTRQDEPALFVALTFERREVLDSSNIKPMNLIGVDRGENIPAVIALTDPEGCPLSRFKDSLGNPTHILRIGESYKEKQRTIQAKKEVEQRRAGGYSRKYASKAKNLADDMVRNTARDLLYYAVTQDAMLIFENLSRGFGRQGKRTFMAERQYTRMEDWLTAKLAYEGLASKTYLSKTLAQYTSKTCSNCGFTITSADYDRVLEKLKKTATGWMTTINGKELKVEGQITYYNRYKRQNVVKDLSVELDRLSEESVNNDISSWTKGRSGEALSLLKKRFSHRPVQEKFVCLNCGFETHADEQAALNIARSWLFLRSQEYKKYQTNKTTGNTDKRAFVETWQSFYRKKLKEVWKPAV

SEQ ID NO: 36784 - protein, 978 aa, synthetic construct
  REGION 1..978: note = engineered CasX variant
QEIKRINKIRRRLVKDSNTKKAGKTGPMKTLLVRVMTPDLRERLENLRKKPENIPQPISNTSRANLNKLLTDYTEMKKAILHVYWEEFQKDPVGLMSRVAQPASKKIDQNKLKPEMDEKGNLTTAGFACSQCGQPLFVYKLEQVSEKGKAYTNYFGRCNVAEHEKLILLAQLKPEKDSDEAVTYSLGKFGQRALDFYSIHVTKESTHPVKPLAQIAGNRYASPVGKALSDACMGTIASFLSKYQDIIIEHQKVVKGNQKRLESLRELAGKENLEYPSVTLPPQPHTKEGVDAYNEVIARVRMWVNLNLWQKLKLSRDDAKPLLRLKGFPSFPLVERQANAEVDWWDMVCNVKKLINEKKEDGKVFWQNLAGYKRQEALRPYLSSEEDRKKGKKFARYQLGDLLLHLEKKHGEDWGKVYDEAWERIDKKVEGLSKHIKLEEERRSEDAQSKAALTDWLRAKASFVIEGLKEADKDEFCRCELKLQKWYGDLRGKPFAIEAENSILDISGFSKQYNCAFIWQKDGVKKLNLYLIINYFKGGKLRFKKIKPEAFEANRFYTVINKKSGEIVPMEVNFNFDDPNLIILPLAFGKRQGREFIWNDLLSLETGSLKLANGRVIEKTLYNRRTRQDEPALFVALTFERREVLDSSNIKPMNLIGVDRGENIPAVIALTDPEGCPLSRFKDSLGNPTHILRIGESYKEKQRTIQAKKEVEQRRAGGYSRKYASKAKNLADDMVRNTARDLLYYAVTQDAMLIFENLSRGFGRQGKRTFMAERQYTRMEDWLTAKLAYEGLASKTYLSKTLAQYTSKTCSNCGFTITSADYDRVLEKLKKTATGWMTTINGKELKVEGQITYYNRYKRQNVVKDLSVELDRLSEESVNNDISSWTKGRSGEALSLLKKRFSHRPVQEKFVCLNCGFETHADEQAALNIARSWLFLRSQEYKKYQTNKTTGNTDKRAFVETWQSFYRKKLKEVWKPAV

SEQ ID NO: 36785 - protein, 979 aa, synthetic construct
  REGION 1..979: note = engineered CasX variant
QEIKRINKIRRRLVKDSNTKKAGKTGPMKTLLVRVMTPDLRERLENLRKKPENIPQPISNTSRANLNKLLTDYTEMKKAILHVYWEEFQKDPVGLMSRVAQPASKKIDQNKLKPEMDEKGNLTTAGFACSQCGQPLFVYKLEQVSEKGKAYTNYFGRCNVAEHEKLILLAQLKPEKDSDEAVTYSLGKFGQRALDFYSIHVTKESTHPVKPLAQIAGNRYASYPVGKALSDACMGTIASFLSKYQDIIIEHQKVVKGNQKRLESLRELAGKENLEYPSVTLPPQPHTKEGVDAYNEVIARVRMWVNLNLWQKLKLSRDDAKPLLRLKGFPSFPLVERQANAEVDWWDMVCNVKKLINEKKEDGKVFWQNLAGYKRQEALRPYLSSEEDRKKGKKFARYQLGDLLLHLEKKHGEDWGKVYDEAWERIDKKVEGLSKHIKLEEERRSEDAQSKAALTDWLRAKASFVIEGLKEADKDEFCRCELKLQKWYGDLRGKPFAIEAENSILDISGFSKQYNCAFIWQKDGVKKLNLYLIINYFKGGKLRFKKIKPEAFEANRFYTVINKKSGEIVPMEVNFNFDDPNLIILPLAFGKRQGREFIWNDLLSLETGSLKLANGRVIEKTLYNRRTRQDEPALFVALTFERREVLDSSNIKPMNLIGVDRGENIPAVIALTDPEGCPLSRFKDSLGNPTHILRIGESYKEKQRTIQAKKEVEQRRAGGYSRKYASKAKNLADDMVRNTARDLLYYAVTQDAMLIFENLSRGFGRQGKRTFMAERQYTRMEDWLTAKLAYEGLPSKVYLSKTLAQYTSKTCSNCGFTITSADYDRVLEKLKKTATGWMTTINGKELKVEGQITYYNRYKRQNVVKDLSVELDRLSEESVNNDISSWTKGRSGEALSLLKKRFSHRPVQEKFVCLNCGFETHADEQAALNIARSWLFLRSQEYKKYQTNKTTGNTDKRAFVETWQSFYRKKLKEVWKPAV

SEQ ID NO: 36786 - protein, 979 aa, synthetic construct
  REGION 1..979: note = engineered CasX variant
QEIKRINKIRRRLVKDSNTKKAGKTGPMKTLLVRVMTPDLRERLENLRKKPENIPQPISNTSRANLNKLLTDYTEMKKAILHVYWEEFQKDPVGLMSRVAQPASKKIDQNKLKPEMDEKGNLTTAGFACSQCGQPLFVYKLEQVSEKGKAYTNYFGRCNVAEHEKLILLAQLKPEKDSDEAVTYSLGKFGQRALDFYSIHVTKESTHPVKPLAQIAGNRYASHPVGKALSDACMGTIASFLSKYQDIIIEHQKVVKGNQKRLESLRELAGKENLEYPSVTLPPQPHTKEGVDAYNEVIARVRMWVNLNLWQKLKLSRDDAKPLLRLKGFPSFPLVERQANAEVDWWDMVCNVKKLINEKKEDGKVFWQNLAGYKRQEALRPYLSSEEDRKKGKKFARYQLGDLLLHLEKKHGEDWGKVYDEAWERIDKKVEGLSKHIKLEEERRSEDAQSKAALTDWLRAKASFVIEGLKEADKDEFCRCELKLQKWYGDLRGKPFAIEAENSILDISGFSKQYNCAFIWQKDGVKKLNLYLIINYFKGGKLRFKKIKPEAFEANRFYTVINKKSGEIVPMEVNFNFDDPNLIILPLAFGKRQGREFIWNDLLSLETGSLKLANGRVIEKTLYNRRTRQDEPALFVALTFERREVLDSSNIKPMNLIGVDRGENIPAVIALTDPEGCPLSRFKDSLGNPTHILRIGESYKEKQRTIQAKKEVEQRRAGGYSRKYASKAKNLADDMVRNTARDLLYYAVTQDAMLIFENLSRGFGRQGKRTFMAERQYTRMEDWLTAKLAYEGLPSKVYLSKTLAQYTSKTCSNCGFTITSADYDRVLEKLKKTATGWMTTINGKELKVEGQITYYNRYKRQNVVKDLSVELDRLSEESVNNDISSWTKGRSGEALSLLKKRFSHRPVQEKFVCLNCGFETHADEQAALNIARSWLFLRSQEYKKYQTNKTTGNTDKRAFVETWQSFYRKKLKEVWKPAV

SEQ ID NO: 36787 - protein, 979 aa, synthetic construct
  REGION 1..979: note = engineered CasX variant
QEIKRINKIRRRLVKDSNTKKAGKTGPMKTLLVRVMTPDLRERLENLRKKPENIPQPISNTSRANLNKLLTDYTEMKKAILHVYWEEFQKDPVGLMSRVAQPASKKIDQNKLKPEMDEKGNLTTAGFACSQCGQPLFVYKLEQVSEKGKAYTNYFGRCNVAEHEKLILLAQLKPEKDSDEAVTYSLGKFGQRALDFYSIHVTKESTHPVKPLAQIAGNRYASSPVGKALSDACMGTIASFLSKYQDIIIEHQKVVKGNQKRLESLRELAGKENLEYPSVTLPPQPHTKEGVDAYNEVIARVRMWVNLNLWQKLKLSRDDAKPLLRLKGFPSFPLVERQANAEVDWWDMVCNVKKLINEKKEDGKVFWQNLAGYKRQEALRPYLSSEEDRKKGKKFARYQLGDLLLHLEKKHGEDWGKVYDEAWERIDKKVEGLSKHIKLEEERRSEDAQSKAALTDWLRAKASFVIEGLKEADKDEFCRCELKLQKWYGDLRGKPFAIEAENSILDISGFSKQYNCAFIWQKDGVKKLNLYLIINYFKGGKLRFKKIKPEAFEANRFYTVINKKSGEIVPMEVNFNFDDPNLIILPLAFGKRQGREFIWNDLLSLETGSLKLANGRVIEKTLYNRRTRQDEPALFVALTFERREVLDSSNIKPMNLIGVDRGENIPAVIALTDPEGCPLSRFKDSLGNPTHILRIGESYKEKQRTIQAKKEVEQRRAGGYSRKYASKAKNLADDMVRNTARDLLYYAVTQDAMLIFENLSRGFGRQGKRTFMAERQYTRMEDWLTAKLAYEGLPSKVYLSKTLAQYTSKTCSNCGFTITSADYDRVLEKLKKTATGWMTTINGKELKVEGQITYYNRYKRQNVVKDLSVELDRLSEESVNNDISSWTKGRSGEALSLLKKRFSHRPVQEKFVCLNCGFETHADEQAALNIARSWLFLRSQEYKKYQTNKTTGNTDKRAFVETWQSFYRKKLKEVWKPAV

SEQ ID NO: 36788 - protein, 979 aa, synthetic construct
  REGION 1..979: note = engineered CasX variant
QEIKRINKIRRRLVKDSNTKKAGKTGPMKTLLVRVMTPDLRERLENLRKKPENIPQPISNTSRANLNKLLTDYTEMKKAILHVYWEEFQKDPVGLMSRVAQPASKKIDQNKLKPEMDEKGNLTTAGFACSQCGQPLFVYKLEQVSEKGKAYTNYFGRCNVAEHEKLILLAQLKPEKDSDEAVTYSLGKFGQRALDFYSIHVTKESTHPVKPLAQIAGNRYASTPVGKALSDACMGTIASFLSKYQDIIIEHQKVVKGNQKRLESLRELAGKENLEYPSVTLPPQPHTKEGVDAYNEVIARVRMWVNLNLWQKLKLSRDDAKPLLRLKGFPSFPLVERQANAEVDWWDMVCNVKKLINEKKEDGKVFWQNLAGYKRQEALRPYLSSEEDRKKGKKFARYQLGDLLLHLEKKHGEDWGKVYDEAWERIDKKVEGLSKHIKLEEERRSEDAQSKAALTDWLRAKASFVIEGLKEADKDEFCRCELKLQKWYGDLRGKPFAIEAENSILDISGFSKQYNCAFIWQKDGVKKLNLYLIINYFKGGKLRFKKIKPEAFEANRFYTVINKKSGEIVPMEVNFNFDDPNLIILPLAFGKRQGREFIWNDLLSLETGSLKLANGRVIEKTLYNRRTRQDEPALFVALTFERREVLDSSNIKPMNLIGVDRGENIPAVIALTDPEGCPLSRFKDSLGNPTHILRIGESYKEKQRTIQAKKEVEQRRAGGYSRKYASKAKNLADDMVRNTARDLLYYAVTQDAMLIFENLSRGFGRQGKRTFMAERQYTRMEDWLTAKLAYEGLPSKVYLSKTLAQYTSKTCSNCGFTITSADYDRVLEKLKKTATGWMTTINGKELKVEGQITYYNRYKRQNVVKDLSVELDRLSEESVNNDISSWTKGRSGEALSLLKKRFSHRPVQEKFVCLNCGFETHADEQAALNIARSWLFLRSQEYKKYQTNKTTGNTDKRAFVETWQSFYRKKLKEVWKPAV

SEQ ID NO: 36789 - protein, 979 aa, synthetic construct
  REGION 1..979: note = engineered CasX variant
QEIKRINKIRRRLVKDSNTKKAGKTGPMKTLLVRVMTPDLRERLENLRKKPENIPQPISNTSRANLNKLLTDYTEMKKAILHVYWEEFQKDPVGLMSRVAQPASKKIDQNKLKPEMDEKGNLTTAGFACSQCGQPLFVYKLEQVSEKGKAYTNYFGRCNVAEHEKLILLAQLKPEKDSDEAVTYSLGKFGQRALDFYSIHVTKESTHPVKPLAQIAGNRYASAPVGKALSDACMGTIASFLSKYQDIIIEHQKVVKGNQKRLESLRELAGKENLEYPSVTLPPQPHTKEGVDAYNEVIARVRMWVNLNLWQKLKLSRDDAKPLLRLKGFPSFPLVERQANAEVDWWDMVCNVKKLINEKKEDGKVFWQNLAGYKRQEALRPYLSSEEDRKKGKKFARYQLGDLLLHLEKKHGEDWGKVYDEAWERIDKKVEGLSKHIKLEEERRSEDAQSKAALTDWLRAKASFVIEGLKEADKDEFCRCELKLQKWYGDLRGKPFAIEAENSILDISGFSKQYNCAFIWQKDGVKKLNLYLIINYFKGGKLRFKKIKPEAFEANRFYTVINKKSGEIVPMEVNFNFDDPNLIILPLAFGKRQGREFIWNDLLSLETGSLKLANGRVIEKTLYNRRTRQDEPALFVALTFERREVLDSSNIKPMNLIGVDRGENIPAVIALTDPEGCPLSRFKDSLGNPTHILRIGESYKEKQRTIQAKKEVEQRRAGGYSRKYASKAKNLADDMVRNTARDLLYYAVTQDAMLIFENLSRGFGRQGKRTFMAERQYTRMEDWLTAKLAYEGLPSKVYLSKTLAQYTSKTCSNCGFTITSADYDRVLEKLKKTATGWMTTINGKELKVEGQITYYNRYKRQNVVKDLSVELDRLSEESVNNDISSWTKGRSGEALSLLKKRFSHRPVQEKFVCLNCGFETHADEQAALNIARSWLFLRSQEYKKYQTNKTTGNTDKRAFVETWQSFYRKKLKEVWKPAV

SEQ ID NO: 36790 - protein, 979 aa, synthetic construct
  REGION 1..979: note = engineered CasX variant
QEIKRINKIRRRLVKDSNTKKAGKTGPMKTLLVRVMTPDLRERLENLRKKPENIPQPISNTSRANLNKLLTDYTEMKKAILHVYWEEFQKDPVGLMSRVAQPASKKIDQNKLKPEMDEKGNLTTAGFACSQCGQPLFVYKLEQVSEKGKAYTNYFGRCNVAEHEKLILLAQLKPEKDSDEAVTYSLGKFGQRALDFYSIHVTKESTHPVKPLAQIAGNRYASVPVGKALSDACMGTIASFLSKYQDIIIEHQKVVKGNQKRLESLRELAGKENLEYPSVTLPPQPHTKEGVDAYNEVIARVRMWVNLNLWQKLKLSRDDAKPLLRLKGFPSFPLVERQANAEVDWWDMVCNVKKLINEKKEDGKVFWQNLAGYKRQEALRPYLSSEEDRKKGKKFARYQLGDLLLHLEKKHGEDWGKVYDEAWERIDKKVEGLSKHIKLEEERRSEDAQSKAALTDWLRAKASFVIEGLKEADKDEFCRCELKLQKWYGDLRGKPFAIEAENSILDISGFSKQYNCAFIWQKDGVKKLNLYLIINYFKGGKLRFKKIKPEAFEANRFYTVINKKSGEIVPMEVNFNFDDPNLIILPLAFGKRQGREFIWNDLLSLETGSLKLANGRVIEKTLYNRRTRQDEPALFVALTFERREVLDSSNIKPMNLIGVDRGENIPAVIALTDPEGCPLSRFKDSLGNPTHILRIGESYKEKQRTIQAKKEVEQRRAGGYSRKYASKAKNLADDMVRNTARDLLYYAVTQDAMLIFENLSRGFGRQGKRTFMAERQYTRMEDWLTAKLAYEGLPSKVYLSKTLAQYTSKTCSNCGFTITSADYDRVLEKLKKTATGWMTTINGKELKVEGQITYYNRYKRQNVVKDLSVELDRLSEESVNNDISSWTKGRSGEALSLLKKRFSHRPVQEKFVCLNCGFETHADEQAALNIARSWLFLRSQEYKKYQTNKTTGNTDKRAFVETWQSFYRKKLKEVWKPAV

SEQ ID NO: 36791 - protein, 979 aa, synthetic construct
  REGION 1..979: note = engineered CasX variant
QEIKRINKIRRRLVKDSNTKKAGKTGPMKTLLVRVMTPDLRERLENLRKKPENIPQPISNTSRANLNKLLTDYTEMKKAILHVYWEEFQKDPVGLMSRVAQPASKKIDQNKLKPEMDEKGNLTTAGFACSQCGQPLFVYKLEQVSEKGKAYTNYFGRCNVAEHEKLIKLAQLKPEKDSDEAVTYSLGKFGQRALDFYSIHVTKESTHPVKPLAQIAGNRYASGPVGKALSDACMGTIASFLSKYQDIIIEHQKVVKGNQKRLESLRELAGKENLEYPSVTLPPQPHTKEGVDAYNEVIARVRMWVNLNLWQKLKLSRDDAKPLLRLKGFPSFPLVERQANAEVDWWDMVCNVKKLINEKKEDGKVFWQNLAGYKRQEALRPYLSSEEDRKKGKKFARYQLGDLLLHLEKKHGEDWGKVYDEAWERIDKKVEGLSKHIKLEEERRSEDAQSKAALTDWLRAKASFVIEGLKEADKDEFCRCELKLQKWYGDLRGKPFAIEAENSILDISGFSKQYNCAFIWQKDGVKKLNLYLIINYFKGGKLRFKKIKPEAFEANRFYTVINKKSGEIVPMEVNFNFDDPNLIILPLAFGKRQGREFIWNDLLSLETGSLKLANGRVIEKTLYNRRTRQDEPALFVALTFERREVLDSSNIKPMNLIGVDRGENIPAVIALTDPEGCPLSRFKDSLGNPTHILRIGESYKEKQRTIQAKKEVEQRRAGGYSRKYASKAKNLADDMVRNTARDLLYYAVTQDAMLIFENLSRGFGRQGKRTFMAERQYTRMEDWLTAKLAYEGLPSKVYLSKTLAQYTSKTCSNCGFTITSADYDRVLEKLKKTATGWMTTINGKELKVEGQITYYNRYKRQNVVKDLSVELDRLSEESVNNDISSWTKGRSGEALSLLKKRFSHRPVQEKFVCLNCGFETHADEQAALNIARSWLFLRSQEYKKYQTNKTTGNTDKRAFVETWQSFYRKKLKEVWKPAV

SEQ ID NO: 36792 - protein, 978 aa, synthetic construct
  REGION 1..978: note = engineered CasX variant
QEIKRINKIRRRLVKDSNTKKAGKTGPMKTLLVRVMTPDLRERLENLRKKPENIPQPISNTSRANLNKLLTDYTEMKKAILHVYWEEFQKDPVGLMSRVAQPASKKIDQNKLKPEMDEKGNLTTAGFACSQCGQPLFVYKLEQVSEKGKAYTNYFGRCNVAEHEKLILLAQLKPEKDSDEAVTYSLGKFGQRALDFYSIHVTKESTHPVKPLAQIAGNRYASPVGKALSDACMGTIASFLSKYQDIIIEHQKVVKGNQKRLESLRELAGKENLEYPSVTLPPQPHTKEGVDAYNEVIARVRMWVNLNLWQKLKLSRDDAKPLLRLKGFPSFPLVERQANAEVDWWDMVCNVKKLINEKKEDGKVFWQNLAGYKRQEALRPYLSSEEDRKKGKKFARYQLGDLLLHLEKKHGEDWGKVYDEAWERIDKKVEGLSKHIKLEEERRSEDAQSKAALTDWLRAKASFVIEGLKEADKDEFCRCELKLQKWYGDLRGKPFAIEAENSILDISGFSKQYNCAFIWQKDGVKKLNLYLIINYFKGGKLRFKKIKPEAFEANRFYTVINKKSGEIVPMEVNFNFDDPNLIILPLAFGKRQGREFIWNDLLSLETGSLKLANGRVIEKTLYNRRTRQDEPALFVALTFERREVLDSSNIKPMNLIGVDRGENIPAVIALTDPEGCPLSRFKDSLGNPTHILRIGESYKEKQRTIQAKKEVEQRRAGGYSRKYASKAKNLADDMVRNTARDLLYYAVTQDAMLIFENLSRGFGRQGKRTFMAERQYTRMEDWLTAKLAYEGLPSKVYLSKTLAQYTSKTCSNCGFTITSADYDRVLEKLKKTATGWMTTINGKELKVEGQITYYNRYKRQNVVKDLSVELDRLSEESVNNDISSWTKGRSGEALSLLKKRFSHRPVQEKFVCLNCGFETHADEQAALNIARSWLFLRSQEYKKYQTNKTTGNTDKRAFVETWQSFYRKKLKEVWKPAV

SEQ ID NO: 36793 - protein, 980 aa, synthetic construct
  REGION 1..980: note = engineered CasX variant
QEIKRINKIRRRLVKDSNTKKAGKTGPMKTLLVRVMTPDLRERLENLRKKPENIPQPISNTSRANLNKLLTDYTEMKKAILHVYWEEFQKDPVGLMSRVAQPASKKIDQNKLKPEMDEKGNLTTAGFACSQCGQPLFVYKLEQVSEKGKAYTNYFGRCNVAEHEKLILLAQLKPEKDSDEAVTYSLGKFGQRALDFYSIHVTKESTHPVKPLAQIAGNRYASYPVGKALSDACMGTIASFLSKYQDIIIEHQKVVKGNQKRLESLRELAGKENLEYPSVTLPPQPHTKEGVDAYNEVIARVRMWVNLNLWQKLKLSRDDAKPLLRLKGFPSFPLVERQANAEVDWWDMVCNVKKLINEKKEDGKVFWQNLAGYKRQEALRPYLSSEEDRKKGKKFARYQLGDLLLHLEKKHGEDWGKVYDEAWERIDKKVEGLSKHIKLEEERRSEDAQSKAALTDWLRAKASFVIEGLKEADKDEFCRCELKLQKWYGDLRGKPFAIEAENSILDISGFSKQYNCAFIWQKDGVKKLNLYLIINYFKGGKLRFKKIKPEAFEANRFYTVINKKSGEIVPMEVNFNFDDPNLIILPLAFGKRQGREFIWNDLLSLETGSLKLANGRVIEKTLYNRRTRQDEPALFVALTFERREVLDSSNIKPMNLIGVDRGENIPAVIALTDPEGCPLSRFKDSLGNPTHILRIGESYKEKQRTIQAKKEVEQRRAGGYSRKYASKAKNLADDMVRNTARDLLYYAVTQDAMLIFENLSRGFGRQGKRTFMAERQYTRMEDWLTAKLAYEGPLPSKTYLSKTLAQYTSKTCSNCGFTITSADYDRVLEKLKKTATGWMTTINGKELKVEGQITYYNRYKRQNVVKDLSVELDRLSEESVNNDISSWTKGRSGEALSLLKKRFSHRPVQEKFVCLNCGFETHADEQAALNIARSWLFLRSQEYKKYQTNKTTGNTDKRAFVETWQSFYRKKLKEVWKPAV

SEQ ID NO: 36794 - protein, 980 aa, synthetic construct
  REGION 1..980: note = engineered CasX variant
QEIKRINKIRRRLVKDSNTKKAGKTGPMKTLLVRVMTPDLRERLENLRKKPENIPQPISNTSRANLNKLLTDYTEMKKAILHVYWEEFQKDPVGLMSRVAQPASKKIDQNKLKPEMDEKGNLTTAGFACSQCGQPLFVYKLEQVSEKGKAYTNYFGRCNVAEHEKLILLAQLKPEKDSDEAVTYSLGKFGQRALDFYSIHVTKESTHPVKPLAQIAGNRYASHPVGKALSDACMGTIASFLSKYQDIIIEHQKVVKGNQKRLESLRELAGKENLEYPSVTLPPQPHTKEGVDAYNEVIARVRMWVNLNLWQKLKLSRDDAKPLLRLKGFPSFPLVERQANAEVDWWDMVCNVKKLINEKKEDGKVFWQNLAGYKRQEALRPYLSSEEDRKKGKKFARYQLGDLLLHLEKKHGEDWGKVYDEAWERIDKKVEGLSKHIKLEEERRSEDAQSKAALTDWLRAKASFVIEGLKEADKDEFCRCELKLQKWYGDLRGKPFAIEAENSILDISGFSKQYNCAFIWQKDGVKKLNLYLIINYFKGGKLRFKKIKPEAFEANRFYTVINKKSGEIVPMEVNFNFDDPNLIILPLAFGKRQGREFIWNDLLSLETGSLKLANGRVIEKTLYNRRTRQDEPALFVALTFERREVLDSSNIKPMNLIGVDRGENIPAVIALTDPEGCPLSRFKDSLGNPTHILRIGESYKEKQRTIQAKKEVEQRRAGGYSRKYASKAKNLADDMVRNTARDLLYYAVTQDAMLIFENLSRGFGRQGKRTFMAERQYTRMEDWLTAKLAYEGPLPSKTYLSKTLAQYTSKTCSNCGFTITSADYDRVLEKLKKTATGWMTTINGKELKVEGQITYYNRYKRQNVVKDLSVELDRLSEESVNNDISSWTKGRSGEALSLLKKRFSHRPVQEKFVCLNCGFETHADEQAALNIARSWLFLRSQEYKKYQTNKTTGNTDKRAFVETWQSFYRKKLKEVWKPAV

SEQ ID NO: 36795 - protein, 980 aa, synthetic construct
  REGION 1..980: note = engineered CasX variant
QEIKRINKIRRRLVKDSNTKKAGKTGPMKTLLVRVMTPDLRERLENLRKKPENIPQPISNTSRANLNKLLTDYTEMKKAILHVYWEEFQKDPVGLMSRVAQPASKKIDQNKLKPEMDEKGNLTTAGFACSQCGQPLFVYKLEQVSEKGKAYTNYFGRCNVAEHEKLILLAQLKPEKDSDEAVTYSLGKFGQRALDFYSIHVTKESTHPVKPLAQIAGNRYASSPVGKALSDACMGTIASFLSKYQDIIIEHQKVVKGNQKRLESLRELAGKENLEYPSVTLPPQPHTKEGVDAYNEVIARVRMWVNLNLWQKLKLSRDDAKPLLRLKGFPSFPLVERQANAEVDWWDMVCNVKKLINEKKEDGKVFWQNLAGYKRQEALRPYLSSEEDRKKGKKFARYQLGDLLLHLEKKHGEDWGKVYDEAWERIDKKVEGLSKHIKLEEERRSEDAQSKAALTDWLRAKASFVIEGLKEADKDEFCRCELKLQKWYGDLRGKPFAIEAENSILDISGFSKQYNCAFIWQKDGVKKLNLYLIINYFKGGKLRFKKIKPEAFEANRFYTVINKKSGEIVPMEVNFNFDDPNLIILPLAFGKRQGREFIWNDLLSLETGSLKLANGRVIEKTLYNRRTRQDEPALFVALTFERREVLDSSNIKPMNLIGVDRGENIPAVIALTDPEGCPLSRFKDSLGNPTHILRIGESYKEKQRTIQAKKEVEQRRAGGYSRKYASKAKNLADDMVRNTARDLLYYAVTQDAMLIFENLSRGFGRQGKRTFMAERQYTRMEDWLTAKLAYEGPLPSKTYLSKTLAQYTSKTCSNCGFTITSADYDRVLEKLKKTATGWMTTINGKELKVEGQITYYNRYKRQNVVKDLSVELDRLSEESVNNDISSWTKGRSGEALSLLKKRFSHRPVQEKFVCLNCGFETHADEQAALNIARSWLFLRSQEYKKYQTNKTTGNTDKRAFVETWQSFYRKKLKEVWKPAV

SEQ ID NO: 36796 - protein, 980 aa, synthetic construct
  REGION 1..980: note = engineered CasX variant
QEIKRINKIRRRLVKDSNTKKAGKTGPMKTLLVRVMTPDLRERLENLRKKPENIPQPISNTSRANLNKLLTDYTEMKKAILHVYWEEFQKDPVGLMSRVAQPASKKIDQNKLKPEMDEKGNLTTAGFACSQCGQPLFVYKLEQVSEKGKAYTNYFGRCNVAEHEKLILLAQLKPEKDSDEAVTYSLGKFGQRALDFYSIHVTKESTHPVKPLAQIAGNRYASTPVGKALSDACMGTIASFLSKYQDIIIEHQKVVKGNQKRLESLRELAGKENLEYPSVTLPPQPHTKEGVDAYNEVIARVRMWVNLNLWQKLKLSRDDAKPLLRLKGFPSFPLVERQANAEVDWWDMVCNVKKLINEKKEDGKVFWQNLAGYKRQEALRPYLSSEEDRKKGKKFARYQLGDLLLHLEKKHGEDWGKVYDEAWERIDKKVEGLSKHIKLEEERRSEDAQSKAALTDWLRAKASFVIEGLKEADKDEFCRCELKLQKWYGDLRGKPFAIEAENSILDISGFSKQYNCAFIWQKDGVKKLNLYLIINYFKGGKLRFKKIKPEAFEANRFYTVINKKSGEIVPMEVNFNFDDPNLIILPLAFGKRQGREFIWNDLLSLETGSLKLANGRVIEKTLYNRRTRQDEPALFVALTFERREVLDSSNIKPMNLIGVDRGENIPAVIALTDPEGCPLSRFKDSLGNPTHILRIGESYKEKQRTIQAKKEVEQRRAGGYSRKYASKAKNLADDMVRNTARDLLYYAVTQDAMLIFENLSRGFGRQGKRTFMAERQYTRMEDWLTAKLAYEGPLPSKTYLSKTLAQYTSKTCSNCGFTITSADYDRVLEKLKKTATGWMTTINGKELKVEGQITYYNRYKRQNVVKDLSVELDRLSEESVNNDISSWTKGRSGEALSLLKKRFSHRPVQEKFVCLNCGFETHADEQAALNIARSWLFLRSQEYKKYQTNKTTGNTDKRAFVETWQSFYRKKLKEVWKPAV

SEQ ID NO: 36797 - protein, 980 aa, synthetic construct
  REGION 1..980: note = engineered CasX variant
QEIKRINKIRRRLVKDSNTKKAGKTGPMKTLLVRVMTPDLRERLENLRKKPENIPQPISNTSRANLNKLLTDYTEMKKAILHVYWEEFQKDPVGLMSRVAQPASKKIDQNKLKPEMDEKGNLTTAGFACSQCGQPLFVYKLEQVSEKGKAYTNYFGRCNVAEHEKLILLAQLKPEKDSDEAVTYSLGKFGQRALDFYSIHVTKESTHPVKPLAQIAGNRYASAPVGKALSDACMGTIASFLSKYQDIIIEHQKVVKGNQKRLESLRELAGKENLEYPSVTLPPQPHTKEGVDAYNEVIARVRMWVNLNLWQKLKLSRDDAKPLLRLKGFPSFPLVERQANAEVDWWDMVCNVKKLINEKKEDGKVFWQNLAGYKRQEALRPYLSSEEDRKKGKKFARYQLGDLLLHLEKKHGEDWGKVYDEAWERIDKKVEGLSKHIKLEEERRSEDAQSKAALTDWLRAKASFVIEGLKEADKDEFCRCELKLQKWYGDLRGKPFAIEAENSILDISGFSKQYNCAFIWQKDGVKKLNLYLIINYFKGGKLRFKKIKPEAFEANRFYTVINKKSGEIVPMEVNFNFDDPNLIILPLAFGKRQGREFIWNDLLSLETGSLKLANGRVIEKTLYNRRTRQDEPALFVALTFERREVLDSSNIKPMNLIGVDRGENIPAVIALTDPEGCPLSRFKDSLGNPTHILRIGESYKEKQRTIQAKKEVEQRRAGGYSRKYASKAKNLADDMVRNTARDLLYYAVTQDAMLIFENLSRGFGRQGKRTFMAERQYTRMEDWLTAKLAYEGPLPSKTYLSKTLAQYTSKTCSNCGFTITSADYDRVLEKLKKTATGWMTTINGKELKVEGQITYYNRYKRQNVVKDLSVELDRLSEESVNNDISSWTKGRSGEALSLLKKRFSHRPVQEKFVCLNCGFETHADEQAALNIARSWLFLRSQEYKKYQTNKTTGNTDKRAFVETWQSFYRKKLKEVWKPAV

SEQ ID NO: 36798 - protein, 980 aa, synthetic construct
  REGION 1..980: note = engineered CasX variant
QEIKRINKIRRRLVKDSNTKKAGKTGPMKTLLVRVMTPDLRERLENLRKKPENIPQPISNTSRANLNKLLTDYTEMKKAILHVYWEEFQKDPVGLMSRVAQPASKKIDQNKLKPEMDEKGNLTTAGFACSQCGQPLFVYKLEQVSEKGKAYTNYFGRCNVAEHEKLILLAQLKPEKDSDEAVTYSLGKFGQRALDFYSIHVTKESTHPVKPLAQIAGNRYASVPVGKALSDACMGTIASFLSKYQDIIIEHQKVVKGNQKRLESLRELAGKENLEYPSVTLPPQPHTKEGVDAYNEVIARVRMWVNLNLWQKLKLSRDDAKPLLRLKGFPSFPLVERQANAEVDWWDMVCNVKKLINEKKEDGKVFWQNLAGYKRQEALRPYLSSEEDRKKGKKFARYQLGDLLLHLEKKHGEDWGKVYDEAWERIDKKVEGLSKHIKLEEERRSEDAQSKAALTDWLRAKASFVIEGLKEADKDEFCRCELKLQKWYGDLRGKPFAIEAENSILDISGFSKQYNCAFIWQKDGVKKLNLYLIINYFKGGKLRFKKIKPEAFEANRFYTVINKKSGEIVPMEVNFNFDDPNLIILPLAFGKRQGREFIWNDLLSLETGSLKLANGRVIEKTLYNRRTRQDEPALFVALTFERREVLDSSNIKPMNLIGVDRGENIPAVIALTDPEGCPLSRFKDSLGNPTHILRIGESYKEKQRTIQAKKEVEQRRAGGYSRKYASKAKNLADDMVRNTARDLLYYAVTQDAMLIFENLSRGFGRQGKRTFMAERQYTRMEDWLTAKLAYEGPLPSKTYLSKTLAQYTSKTCSNCGFTITSADYDRVLEKLKKTATGWMTTINGKELKVEGQITYYNRYKRQNVVKDLSVELDRLSEESVNNDISSWTKGRSGEALSLLKKRFSHRPVQEKFVCLNCGFETHADEQAALNIARSWLFLRSQEYKKYQTNKTTGNTDKRAFVETWQSFYRKKLKEVWKPAV

SEQ ID NO: 36799 - protein, 980 aa, synthetic construct
  REGION 1..980: note = engineered CasX variant
QEIKRINKIRRRLVKDSNTKKAGKTGPMKTLLVRVMTPDLRERLENLRKKPENIPQPISNTSRANLNKLLTDYTEMKKAILHVYWEEFQKDPVGLMSRVAQPASKKIDQNKLKPEMDEKGNLTTAGFACSQCGQPLFVYKLEQVSEKGKAYTNYFGRCNVAEHEKLIKLAQLKPEKDSDEAVTYSLGKFGQRALDFYSIHVTKESTHPVKPLAQIAGNRYASGPVGKALSDACMGTIASFLSKYQDIIIEHQKVVKGNQKRLESLRELAGKENLEYPSVTLPPQPHTKEGVDAYNEVIARVRMWVNLNLWQKLKLSRDDAKPLLRLKGFPSFPLVERQANAEVDWWDMVCNVKKLINEKKEDGKVFWQNLAGYKRQEALRPYLSSEEDRKKGKKFARYQLGDLLLHLEKKHGEDWGKVYDEAWERIDKKVEGLSKHIKLEEERRSEDAQSKAALTDWLRAKASFVIEGLKEADKDEFCRCELKLQKWYGDLRGKPFAIEAENSILDISGFSKQYNCAFIWQKDGVKKLNLYLIINYFKGGKLRFKKIKPEAFEANRFYTVINKKSGEIVPMEVNFNFDDPNLIILPLAFGKRQGREFIWNDLLSLETGSLKLANGRVIEKTLYNRRTRQDEPALFVALTFERREVLDSSNIKPMNLIGVDRGENIPAVIALTDPEGCPLSRFKDSLGNPTHILRIGESYKEKQRTIQAKKEVEQRRAGGYSRKYASKAKNLADDMVRNTARDLLYYAVTQDAMLIFENLSRGFGRQGKRTFMAERQYTRMEDWLTAKLAYEGPLPSKTYLSKTLAQYTSKTCSNCGFTITSADYDRVLEKLKKTATGWMTTINGKELKVEGQITYYNRYKRQNVVKDLSVELDRLSEESVNNDISSWTKGRSGEALSLLKKRFSHRPVQEKFVCLNCGFETHADEQAALNIARSWLFLRSQEYKKYQTNKTTGNTDKRAFVETWQSFYRKKLKEVWKPAV

SEQ ID NO: 36800 - protein, 979 aa, synthetic construct
  REGION 1..979: note = engineered CasX variant
QEIKRINKIRRRLVKDSNTKKAGKTGPMKTLLVRVMTPDLRERLENLRKKPENIPQPISNTSRANLNKLLTDYTEMKKAILHVYWEEFQKDPVGLMSRVAQPASKKIDQNKLKPEMDEKGNLTTAGFACSQCGQPLFVYKLEQVSEKGKAYTNYFGRCNVAEHEKLILLAQLKPEKDSDEAVTYSLGKFGQRALDFYSIHVTKESTHPVKPLAQIAGNRYASPVGKALSDACMGTIASFLSKYQDIIIEHQKVVKGNQKRLESLRELAGKENLEYPSVTLPPQPHTKEGVDAYNEVIARVRMWVNLNLWQKLKLSRDDAKPLLRLKGFPSFPLVERQANAEVDWWDMVCNVKKLINEKKEDGKVFWQNLAGYKRQEALRPYLSSEEDRKKGKKFARYQLGDLLLHLEKKHGEDWGKVYDEAWERIDKKVEGLSKHIKLEEERRSEDAQSKAALTDWLRAKASFVIEGLKEADKDEFCRCELKLQKWYGDLRGKPFAIEAENSILDISGFSKQYNCAFIWQKDGVKKLNLYLIINYFKGGKLRFKKIKPEAFEANRFYTVINKKSGEIVPMEVNFNFDDPNLIILPLAFGKRQGREFIWNDLLSLETGSLKLANGRVIEKTLYNRRTRQDEPALFVALTFERREVLDSSNIKPMNLIGVDRGENIPAVIALTDPEGCPLSRFKDSLGNPTHILRIGESYKEKQRTIQAKKEVEQRRAGGYSRKYASKAKNLADDMVRNTARDLLYYAVTQDAMLIFENLSRGFGRQGKRTFMAERQYTRMEDWLTAKLAYEGPLPSKTYLSKTLAQYTSKTCSNCGFTITSADYDRVLEKLKKTATGWMTTINGKELKVEGQITYYNRYKRQNVVKDLSVELDRLSEESVNNDISSWTKGRSGEALSLLKKRFSHRPVQEKFVCLNCGFETHADEQAALNIARSWLFLRSQEYKKYQTNKTTGNTDKRAFVETWQSFYRKKLKEVWKPAV

SEQ ID NO: 36801 - protein, 980 aa, synthetic construct
  REGION 1..980: note = engineered CasX variant
QEIKRINKIRRRLVKDSNTKKAGKTGPMKTLLVRVMTPDLRERLENLRKKPENIPQPISNTSRANLNKLLTDYTEMKKAILHVYWEEFQKDPVGLMSRVAQPASKKIDQNKLKPEMDEKGNLTTAGFACSQCGQPLFVYKLEQVSEKGKAYTNYFGRCNVAEHEKLILLAQLKPEKDSDEAVTYSLGKFGQRALDFYSIHVTKESTHPVKPLAQIAGNRYASYPVGKALSDACMGTIASFLSKYQDIIIEHQKVVKGNQKRLESLRELAGKENLEYPSVTLPPQPHTKEGVDAYNEVIARVRMWVNLNLWQKLKLSRDDAKPLLRLKGFPSFPLVERQANAEVDWWDMVCNVKKLINEKKEDGKVFWQNLAGYKRQEALRPYLSSEEDVRKKGKKFARYQLGDLLLHLEKKHGEDWGKVYDEAWERIDKKVEGLSKHIKLEEERRSEDAQSKAALTDWLRAKASFVIEGLKEADKDEFCRCELKLQKWYGDLRGKPFAIEAENSILDISGFSKQYNCAFIWQKDGVKKLNLYLIINYFKGGKLRFKKIKPEAFEANRFYTVINKKSGEIVPMEVNFNFDDPNLIILPLAFGKRQGREFIWNDLLSLETGSLKLANGRVIEKTLYNRRTRQDEPALFVALTFERREVLDSSNIKPMNLIGVDRGENIPAVIALTDPEGCPLSRFKDSLGNPTHILRIGESYKEKQRTIQAKKEVEQRRAGGYSRKYASKAKNLADDMVRNTARDLLYYAVTQDAMLIFENLSRGFGRQGKRTFMAERQYTRMEDWLTAKLAYEGLPSKTYLSKTLAQYTSKTCSNCGFTITSADYDRVLEKLKKTATGWMTTINGKELKVEGQITYYNRYKRQNVVKDLSVELDRLSEESVNNDISSWTKGRSGEALSLLKKRFSHRPVQEKFVCLNCGFETHADEQAALNIARSWLFLRSQEYKKYQTNKTTGNTDKRAFVETWQSFYRKKLKEVWKPAV

SEQ ID NO: 36802 - protein, 980 aa, synthetic construct
  REGION 1..980: note = engineered CasX variant
QEIKRINKIRRRLVKDSNTKKAGKTGPMKTLLVRVMTPDLRERLENLRKKPENIPQPISNTSRANLNKLLTDYTEMKKAILHVYWEEFQKDPVGLMSRVAQPASKKIDQNKLKPEMDEKGNLTTAGFACSQCGQPLFVYKLEQVSEKGKAYTNYFGRCNVAEHEKLILLAQLKPEKDSDEAVTYSLGKFGQRALDFYSIHVTKESTHPVKPLAQIAGNRYASHPVGKALSDACMGTIASFLSKYQDIIIEHQKVVKGNQKRLESLRELAGKENLEYPSVTLPPQPHTKEGVDAYNEVIARVRMWVNLNLWQKLKLSRDDAKPLLRLKGFPSFPLVERQANAEVDWWDMVCNVKKLINEKKEDGKVFWQNLAGYKRQEALRPYLSSEEDVRKKGKKFARYQLGDLLLHLEKKHGEDWGKVYDEAWERIDKKVEGLSKHIKLEEERRSEDAQSKAALTDWLRAKASFVIEGLKEADKDEFCRCELKLQKWYGDLRGKPFAIEAENSILDISGFSKQYNCAFIWQKDGVKKLNLYLIINYFKGGKLRFKKIKPEAFEANRFYTVINKKSGEIVPMEVNFNFDDPNLIILPLAFGKRQGREFIWNDLLSLETGSLKLANGRVIEKTLYNRRTRQDEPALFVALTFERREVLDSSNIKPMNLIGVDRGENIPAVIALTDPEGCPLSRFKDSLGNPTHILRIGESYKEKQRTIQAKKEVEQRRAGGYSRKYASKAKNLADDMVRNTARDLLYYAVTQDAMLIFENLSRGFGRQGKRTFMAERQYTRMEDWLTAKLAYEGLPSKTYLSKTLAQYTSKTCSNCGFTITSADYDRVLEKLKKTATGWMTTINGKELKVEGQITYYNRYKRQNVVKDLSVELDRLSEESVNNDISSWTKGRSGEALSLLKKRFSHRPVQEKFVCLNCGFETHADEQAALNIARSWLFLRSQEYKKYQTNKTTGNTDKRAFVETWQSFYRKKLKEVWKPAV

SEQ ID NO: 36803 - protein, 980 aa, synthetic construct
  REGION 1..980: note = engineered CasX variant
QEIKRINKIRRRLVKDSNTKKAGKTGPMKTLLVRVMTPDLRERLENLRKKPENIPQPISNTSRANLNKLLTDYTEMKKAILHVYWEEFQKDPVGLMSRVAQPASKKIDQNKLKPEMDEKGNLTTAGFACSQCGQPLFVYKLEQVSEKGKAYTNYFGRCNVAEHEKLILLAQLKPEKDSDEAVTYSLGKFGQRALDFYSIHVTKESTHPVKPLAQIAGNRYASSPVGKALSDACMGTIASFLSKYQDIIIEHQKVVKGNQKRLESLRELAGKENLEYPSVTLPPQPHTKEGVDAYNEVIARVRMWVNLNLWQKLKLSRDDAKPLLRLKGFPSFPLVERQANAEVDWWDMVCNVKKLINEKKEDGKVFWQNLAGYKRQEALRPYLSSEEDVRKKGKKFARYQLGDLLLHLEKKHGEDWGKVYDEAWERIDKKVEGLSKHIKLEEERRSEDAQSKAALTDWLRAKASFVIEGLKEADKDEFCRCELKLQKWYGDLRGKPFAIEAENSILDISGFSKQYNCAFIWQKDGVKKLNLYLIINYFKGGKLRFKKIKPEAFEANRFYTVINKKSGEIVPMEVNFNFDDPNLIILPLAFGKRQGREFIWNDLLSLETGSLKLANGRVIEKTLYNRRTRQDEPALFVALTFERREVLDSSNIKPMNLIGVDRGENIPAVIALTDPEGCPLSRFKDSLGNPTHILRIGESYKEKQRTIQAKKEVEQRRAGGYSRKYASKAKNLADDMVRNTARDLLYYAVTQDAMLIFENLSRGFGRQGKRTFMAERQYTRMEDWLTAKLAYEGLPSKTYLSKTLAQYTSKTCSNCGFTITSADYDRVLEKLKKTATGWMTTINGKELKVEGQITYYNRYKRQNVVKDLSVELDRLSEESVNNDISSWTKGRSGEALSLLKKRFSHRPVQEKFVCLNCGFETHADEQAALNIARSWLFLRSQEYKKYQTNKTTGNTDKRAFVETWQSFYRKKLKEVWKPAV

SEQ ID NO: 36804 - protein, 980 aa, synthetic construct
  REGION 1..980: note = engineered CasX variant
QEIKRINKIRRRLVKDSNTKKAGKTGPMKTLLVRVMTPDLRERLENLRKKPENIPQPISNTSRANLNKLLTDYTEMKKAILHVYWEEFQKDPVGLMSRVAQPASKKIDQNKLKPEMDEKGNLTTAGFACSQCGQPLFVYKLEQVSEKGKAYTNYFGRCNVAEHEKLILLAQLKPEKDSDEAVTYSLGKFGQRALDFYSIHVTKESTHPVKPLAQIAGNRYASTPVGKALSDACMGTIASFLSKYQDIIIEHQKVVKGNQKRLESLRELAGKENLEYPSVTLPPQPHTKEGVDAYNEVIARVRMWVNLNLWQKLKLSRDDAKPLLRLKGFPSFPLVERQANAEVDWWDMVCNVKKLINEKKEDGKVFWQNLAGYKRQEALRPYLSSEEDVRKKGKKFARYQLGDLLLHLEKKHGEDWGKVYDEAWERIDKKVEGLSKHIKLEEERRSEDAQSKAALTDWLRAKASFVIEGLKEADKDEFCRCELKLQKWYGDLRGKPFAIEAENSILDISGFSKQYNCAFIWQKDGVKKLNLYLIINYFKGGKLRFKKIKPEAFEANRFYTVINKKSGEIVPMEVNFNFDDPNLIILPLAFGKRQGREFIWNDLLSLETGSLKLANGRVIEKTLYNRRTRQDEPALFVALTFERREVLDSSNIKPMNLIGVDRGENIPAVIALTDPEGCPLSRFKDSLGNPTHILRIGESYKEKQRTIQAKKEVEQRRAGGYSRKYASKAKNLADDMVRNTARDLLYYAVTQDAMLIFENLSRGFGRQGKRTFMAERQYTRMEDWLTAKLAYEGLPSKTYLSKTLAQYTSKTCSNCGFTITSADYDRVLEKLKKTATGWMTTINGKELKVEGQITYYNRYKRQNVVKDLSVELDRLSEESVNNDISSWTKGRSGEALSLLKKRFSHRPVQEKFVCLNCGFETHADEQAALNIARSWLFLRSQEYKKYQTNKTTGNTDKRAFVETWQSFYRKKLKEVWKPAV

SEQ ID NO: 36805 - protein, 980 aa, synthetic construct
  REGION 1..980: note = engineered CasX variant
QEIKRINKIRRRLVKDSNTKKAGKTGPMKTLLVRVMTPDLRERLENLRKKPENIPQPISNTSRANLNKLLTDYTEMKKAILHVYWEEFQKDPVGLMSRVAQPASKKIDQNKLKPEMDEKGNLTTAGFACSQCGQPLFVYKLEQVSEKGKAYTNYFGRCNVAEHEKLILLAQLKPEKDSDEAVTYSLGKFGQRALDFYSIHVTKESTHPVKPLAQIAGNRYASAPVGKALSDACMGTIASFLSKYQDIIIEHQKVVKGNQKRLESLRELAGKENLEYPSVTLPPQPHTKEGVDAYNEVIARVRMWVNLNLWQKLKLSRDDAKPLLRLKGFPSFPLVERQANAEVDWWDMVCNVKKLINEKKEDGKVFWQNLAGYKRQEALRPYLSSEEDVRKKGKKFARYQLGDLLLHLEKKHGEDWGKVYDEAWERIDKKVEGLSKHIKLEEERRSEDAQSKAALTDWLRAKASFVIEGLKEADKDEFCRCELKLQKWYGDLRGKPFAIEAENSILDISGFSKQYNCAFIWQKDGVKKLNLYLIINYFKGGKLRFKKIKPEAFEANRFYTVINKKSGEIVPMEVNFNFDDPNLIILPLAFGKRQGREFIWNDLLSLETGSLKLANGRVIEKTLYNRRTRQDEPALFVALTFERREVLDSSNIKPMNLIGVDRGENIPAVIALTDPEGCPLSRFKDSLGNPTHILRIGESYKEKQRTIQAKKEVEQRRAGGYSRKYASKAKNLADDMVRNTARDLLYYAVTQDAMLIFENLSRGFGRQGKRTFMAERQYTRMEDWLTAKLAYEGLPSKTYLSKTLAQYTSKTCSNCGFTITSADYDRVLEKLKKTATGWMTTINGKELKVEGQITYYNRYKRQNVVKDLSVELDRLSEESVNNDISSWTKGRSGEALSLLKKRFSHRPVQEKFVCLNCGFETHADEQAALNIARSWLFLRSQEYKKYQTNKTTGNTDKRAFVETWQSFYRKKLKEVWKPAV

SEQ ID NO: 36806 - protein, 980 aa, synthetic construct
  REGION 1..980: note = engineered CasX variant
QEIKRINKIRRRLVKDSNTKKAGKTGPMKTLLVRVMTPDLRERLENLRKKPENIPQPISNTSRANLNKLLTDYTEMKKAILHVYWEEFQKDPVGLMSRVAQPASKKIDQNKLKPEMDEKGNLTTAGFACSQCGQPLFVYKLEQVSEKGKAYTNYFGRCNVAEHEKLILLAQLKPEKDSDEAVTYSLGKFGQRALDFYSIHVTKESTHPVKPLAQIAGNRYASVPVGKALSDACMGTIASFLSKYQDIIIEHQKVVKGNQKRLESLRELAGKENLEYPSVTLPPQPHTKEGVDAYNEVIARVRMWVNLNLWQKLKLSRDDAKPLLRLKGFPSFPLVERQANAEVDWWDMVCNVKKLINEKKEDGKVFWQNLAGYKRQEALRPYLSSEEDVRKKGKKFARYQLGDLLLHLEKKHGEDWGKVYDEAWERIDKKVEGLSKHIKLEEERRSEDAQSKAALTDWLRAKASFVIEGLKEADKDEFCRCELKLQKWYGDLRGKPFAIEAENSILDISGFSKQYNCAFIWQKDGVKKLNLYLIINYFKGGKLRFKKIKPEAFEANRFYTVINKKSGEIVPMEVNFNFDDPNLIILPLAFGKRQGREFIWNDLLSLETGSLKLANGRVIEKTLYNRRTRQDEPALFVALTFERREVLDSSNIKPMNLIGVDRGENIPAVIALTDPEGCPLSRFKDSLGNPTHILRIGESYKEKQRTIQAKKEVEQRRAGGYSRKYASKAKNLADDMVRNTARDLLYYAVTQDAMLIFENLSRGFGRQGKRTFMAERQYTRMEDWLTAKLAYEGLPSKTYLSKTLAQYTSKTCSNCGFTITSADYDRVLEKLKKTATGWMTTINGKELKVEGQITYYNRYKRQNVVKDLSVELDRLSEESVNNDISSWTKGRSGEALSLLKKRFSHRPVQEKFVCLNCGFETHADEQAALNIARSWLFLRSQEYKKYQTNKTTGNTDKRAFVETWQSFYRKKLKEVWKPAV

SEQ ID NO: 36807 - protein, 980 aa, synthetic construct
  REGION 1..980: note = engineered CasX variant
QEIKRINKIRRRLVKDSNTKKAGKTGPMKTLLVRVMTPDLRERLENLRKKPENIPQPISNTSRANLNKLLTDYTEMKKAILHVYWEEFQKDPVGLMSRVAQPASKKIDQNKLKPEMDEKGNLTTAGFACSQCGQPLFVYKLEQVSEKGKAYTNYFGRCNVAEHEKLIKLAQLKPEKDSDEAVTYSLGKFGQRALDFYSIHVTKESTHPVKPLAQIAGNRYASGPVGKALSDACMGTIASFLSKYQDIIIEHQKVVKGNQKRLESLRELAGKENLEYPSVTLPPQPHTKEGVDAYNEVIARVRMWVNLNLWQKLKLSRDDAKPLLRLKGFPSFPLVERQANAEVDWWDMVCNVKKLINEKKEDGKVFWQNLAGYKRQEALRPYLSSEEDVRKKGKKFARYQLGDLLLHLEKKHGEDWGKVYDEAWERIDKKVEGLSKHIKLEEERRSEDAQSKAALTDWLRAKASFVIEGLKEADKDEFCRCELKLQKWYGDLRGKPFAIEAENSILDISGFSKQYNCAFIWQKDGVKKLNLYLIINYFKGGKLRFKKIKPEAFEANRFYTVINKKSGEIVPMEVNFNFDDPNLIILPLAFGKRQGREFIWNDLLSLETGSLKLANGRVIEKTLYNRRTRQDEPALFVALTFERREVLDSSNIKPMNLIGVDRGENIPAVIALTDPEGCPLSRFKDSLGNPTHILRIGESYKEKQRTIQAKKEVEQRRAGGYSRKYASKAKNLADDMVRNTARDLLYYAVTQDAMLIFENLSRGFGRQGKRTFMAERQYTRMEDWLTAKLAYEGLPSKTYLSKTLAQYTSKTCSNCGFTITSADYDRVLEKLKKTATGWMTTINGKELKVEGQITYYNRYKRQNVVKDLSVELDRLSEESVNNDISSWTKGRSGEALSLLKKRFSHRPVQEKFVCLNCGFETHADEQAALNIARSWLFLRSQEYKKYQTNKTTGNTDKRAFVETWQSFYRKKLKEVWKPAV

SEQ ID NO: 36808 - protein, 979 aa, synthetic construct
  REGION 1..979: note = engineered CasX variant
QEIKRINKIRRRLVKDSNTKKAGKTGPMKTLLVRVMTPDLRERLENLRKKPENIPQPISNTSRANLNKLLTDYTEMKKAILHVYWEEFQKDPVGLMSRVAQPASKKIDQNKLKPEMDEKGNLTTAGFACSQCGQPLFVYKLEQVSEKGKAYTNYFGRCNVAEHEKLILLAQLKPEKDSDEAVTYSLGKFGQRALDFYSIHVTKESTHPVKPLAQIAGNRYASPVGKALSDACMGTIASFLSKYQDIIIEHQKVVKGNQKRLESLRELAGKENLEYPSVTLPPQPHTKEGVDAYNEVIARVRMWVNLNLWQKLKLSRDDAKPLLRLKGFPSFPLVERQANAEVDWWDMVCNVKKLINEKKEDGKVFWQNLAGYKRQEALRPYLSSEEDVRKKGKKFARYQLGDLLLHLEKKHGEDWGKVYDEAWERIDKKVEGLSKHIKLEEERRSEDAQSKAALTDWLRAKASFVIEGLKEADKDEFCRCELKLQKWYGDLRGKPFAIEAENSILDISGFSKQYNCAFIWQKDGVKKLNLYLIINYFKGGKLRFKKIKPEAFEANRFYTVINKKSGEIVPMEVNFNFDDPNLIILPLAFGKRQGREFIWNDLLSLETGSLKLANGRVIEKTLYNRRTRQDEPALFVALTFERREVLDSSNIKPMNLIGVDRGENIPAVIALTDPEGCPLSRFKDSLGNPTHILRIGESYKEKQRTIQAKKEVEQRRAGGYSRKYASKAKNLADDMVRNTARDLLYYAVTQDAMLIFENLSRGFGRQGKRTFMAERQYTRMEDWLTAKLAYEGLPSKTYLSKTLAQYTSKTCSNCGFTITSADYDRVLEKLKKTATGWMTTINGKELKVEGQITYYNRYKRQNVVKDLSVELDRLSEESVNNDISSWTKGRSGEALSLLKKRFSHRPVQEKFVCLNCGFETHADEQAALNIARSWLFLRSQEYKKYQTNKTTGNTDKRAFVETWQSFYRKKLKEVWKPAV

SEQ ID NO: 36809 - protein, 979 aa, synthetic construct
  REGION 1..979: note = engineered CasX variant
QEIKRINKIRRRLVKDSNTKKAGKTGPMKTLLVRVMTPDLRERLENLRKKPENIPQPISNTSRANLNKLLTDYTEMKKAILHVYWEEFQKDPVGLMSRVAQPASKKIDQNKLKPEMDEKGNLTTAGFACSQCGQPLFVYKLEQVSEKGKAYTNYFGRCNVAEHEKLILLAQLKPEKDSDEAVTYSLGKFGQRALDFYSIHVTKESTHPVKPLAQIAGNRYASYPVGKALSDACMGTIASFLSKYQDIIIEHQKVVKGNQKRLESLRELAGKENLEYPSVTLPPQPHTKEGVDAYNEVIARVRMWVNLNLWQKLKLSRDDAKPLLRLKGFPSFPLVERQANAEVDWWDMVCNVKKLINEKKEDGKVFWQNLAGYKRQEALRPYLSSEEDRKKGKKFARYQLGDLLLHLEKKHGEDWGKVYDEAWERIDKKVEGLSKHIKLEEERRSEDAQSKAALTDWLRAKASFVIEGLKEADKDEFCRCELKLQKWYGDLRGKPFAIEAENSILDISGFSKQYNCAFIWQKDGVKKLNLYLIINYFKGGKLRFKKIKPEAFEANRFYTVINKKSGEIVPMEVNFNFDDPNLIILPLAFGKRQGREFIWNDLLSLETGSLKLANGRVIEKTLYNRRTRQDEPALFVALTFERREVLDSSNIKPMNLIGVDRGENIPAVIALTDPEGCPLSRFKDSLGNPTHILRIGESYKEKQRTIQAKKEVEQRRAGGYSRKYASKAKNLADDMVRNTARDLLYYAVTQDAMLIFENLSRGFGRQGKRTFMAERQYTRMEDWLTAKLAYEGLPSKTYLSKTLAQYTSKTCSNCGFTITSADYDRMLEKLKKTATGWMTTINGKELKVEGQITYYNRYKRQNVVKDLSVELDRLSEESVNNDISSWTKGRSGEALSLLKKRFSHRPVQEKFVCLNCGFETHADEQAALNIARSWLFLRSQEYKKYQTNKTTGNTDKRAFVETWQSFYRKKLKEVWKPAV

SEQ ID NO: 36810 - protein, 979 aa, synthetic construct
  REGION 1..979: note = engineered CasX variant
QEIKRINKIRRRLVKDSNTKKAGKTGPMKTLLVRVMTPDLRERLENLRKKPENIPQPISNTSRANLNKLLTDYTEMKKAILHVYWEEFQKDPVGLMSRVAQPASKKIDQNKLKPEMDEKGNLTTAGFACSQCGQPLFVYKLEQVSEKGKAYTNYFGRCNVAEHEKLILLAQLKPEKDSDEAVTYSLGKFGQRALDFYSIHVTKESTHPVKPLAQIAGNRYASHPVGKALSDACMGTIASFLSKYQDIIIEHQKVVKGNQKRLESLRELAGKENLEYPSVTLPPQPHTKEGVDAYNEVIARVRMWVNLNLWQKLKLSRDDAKPLLRLKGFPSFPLVERQANAEVDWWDMVCNVKKLINEKKEDGKVFWQNLAGYKRQEALRPYLSSEEDRKKGKKFARYQLGDLLLHLEKKHGEDWGKVYDEAWERIDKKVEGLSKHIKLEEERRSEDAQSKAALTDWLRAKASFVIEGLKEADKDEFCRCELKLQKWYGDLRGKPFAIEAENSILDISGFSKQYNCAFIWQKDGVKKLNLYLIINYFKGGKLRFKKIKPEAFEANRFYTVINKKSGEIVPMEVNFNFDDPNLIILPLAFGKRQGREFIWNDLLSLETGSLKLANGRVIEKTLYNRRTRQDEPALFVALTFERREVLDSSNIKPMNLIGVDRGENIPAVIALTDPEGCPLSRFKDSLGNPTHILRIGESYKEKQRTIQAKKEVEQRRAGGYSRKYASKAKNLADDMVRNTARDLLYYAVTQDAMLIFENLSRGFGRQGKRTFMAERQYTRMEDWLTAKLAYEGLPSKTYLSKTLAQYTSKTCSNCGFTITSADYDRMLEKLKKTATGWMTTINGKELKVEGQITYYNRYKRQNVVKDLSVELDRLSEESVNNDISSWTKGRSGEALSLLKKRFSHRPVQEKFVCLNCGFETHADEQAALNIARSWLFLRSQEYKKYQTNKTTGNTDKRAFVETWQSFYRKKLKEVWKPAV

SEQ ID NO: 36811 - protein, 979 aa, synthetic construct
  REGION 1..979: note = engineered CasX variant
QEIKRINKIRRRLVKDSNTKKAGKTGPMKTLLVRVMTPDLRERLENLRKKPENIPQPISNTSRANLNKLLTDYTEMKKAILHVYWEEFQKDPVGLMSRVAQPASKKIDQNKLKPEMDEKGNLTTAGFACSQCGQPLFVYKLEQVSEKGKAYTNYFGRCNVAEHEKLILLAQLKPEKDSDEAVTYSLGKFGQRALDFYSIHVTKESTHPVKPLAQIAGNRYASSPVGKALSDACMGTIASFLSKYQDIIIEHQKVVKGNQKRLESLRELAGKENLEYPSVTLPPQPHTKEGVDAYNEVIARVRMWVNLNLWQKLKLSRDDAKPLLRLKGFPSFPLVERQANAEVDWWDMVCNVKKLINEKKEDGKVFWQNLAGYKRQEALRPYLSSEEDRKKGKKFARYQLGDLLLHLEKKHGEDWGKVYDEAWERIDKKVEGLSKHIKLEEERRSEDAQSKAALTDWLRAKASFVIEGLKEADKDEFCRCELKLQKWYGDLRGKPFAIEAENSILDISGFSKQYNCAFIWQKDGVKKLNLYLIINYFKGGKLRFKKIKPEAFEANRFYTVINKKSGEIVPMEVNFNFDDPNLIILPLAFGKRQGREFIWNDLLSLETGSLKLANGRVIEKTLYNRRTRQDEPALFVALTFERREVLDSSNIKPMNLIGVDRGENIPAVIALTDPEGCPLSRFKDSLGNPTHILRIGESYKEKQRTIQAKKEVEQRRAGGYSRKYASKAKNLADDMVRNTARDLLYYAVTQDAMLIFENLSRGFGRQGKRTFMAERQYTRMEDWLTAKLAYEGLPSKTYLSKTLAQYTSKTCSNCGFTITSADYDRMLEKLKKTATGWMTTINGKELKVEGQITYYNRYKRQNVVKDLSVELDRLSEESVNNDISSWTKGRSGEALSLLKKRFSHRPVQEKFVCLNCGFETHADEQAALNIARSWLFLRSQEYKKYQTNKTTGNTDKRAFVETWQSFYRKKLKEVWKPAV

SEQ ID NO: 36812 - protein, 979 aa, synthetic construct
  REGION 1..979: note = engineered CasX variant
QEIKRINKIRRRLVKDSNTKKAGKTGPMKTLLVRVMTPDLRERLENLRKKPENIPQPISNTSRANLNKLLTDYTEMKKAILHVYWEEFQKDPVGLMSRVAQPASKKIDQNKLKPEMDEKGNLTTAGFACSQCGQPLFVYKLEQVSEKGKAYTNYFGRCNVAEHEKLILLAQLKPEKDSDEAVTYSLGKFGQRALDFYSIHVTKESTHPVKPLAQIAGNRYASTPVGKALSDACMGTIASFLSKYQDIIIEHQKVVKGNQKRLESLRELAGKENLEYPSVTLPPQPHTKEGVDAYNEVIARVRMWVNLNLWQKLKLSRDDAKPLLRLKGFPSFPLVERQANAEVDWWDMVCNVKKLINEKKEDGKVFWQNLAGYKRQEALRPYLSSEEDRKKGKKFARYQLGDLLLHLEKKHGEDWGKVYDEAWERIDKKVEGLSKHIKLEEERRSEDAQSKAALTDWLRAKASFVIEGLKEADKDEFCRCELKLQKWYGDLRGKPFAIEAENSILDISGFSKQYNCAFIWQKDGVKKLNLYLIINYFKGGKLRFKKIKPEAFEANRFYTVINKKSGEIVPMEVNFNFDDPNLIILPLAFGKRQGREFIWNDLLSLETGSLKLANGRVIEKTLYNRRTRQDEPALFVALTFERREVLDSSNIKPMNLIGVDRGENIPAVIALTDPEGCPLSRFKDSLGNPTHILRIGESYKEKQRTIQAKKEVEQRRAGGYSRKYASKAKNLADDMVRNTARDLLYYAVTQDAMLIFENLSRGFGRQGKRTFMAERQYTRMEDWLTAKLAYEGLPSKTYLSKTLAQYTSKTCSNCGFTITSADYDRMLEKLKKTATGWMTTINGKELKVEGQITYYNRYKRQNVVKDLSVELDRLSEESVNNDISSWTKGRSGEALSLLKKRFSHRPVQEKFVCLNCGFETHADEQAALNIARSWLFLRSQEYKKYQTNKTTGNTDKRAFVETWQSFYRKKLKEVWKPAV

SEQ ID NO: 36813 - protein, 979 aa, synthetic construct
  REGION 1..979: note = engineered CasX variant
QEIKRINKIRRRLVKDSNTKKAGKTGPMKTLLVRVMTPDLRERLENLRKKPENIPQPISNTSRANLNKLLTDYTEMKKAILHVYWEEFQKDPVGLMSRVAQPASKKIDQNKLKPEMDEKGNLTTAGFACSQCGQPLFVYKLEQVSEKGKAYTNYFGRCNVAEHEKLILLAQLKPEKDSDEAVTYSLGKFGQRALDFYSIHVTKESTHPVKPLAQIAGNRYASAPVGKALSDACMGTIASFLSKYQDIIIEHQKVVKGNQKRLESLRELAGKENLEYPSVTLPPQPHTKEGVDAYNEVIARVRMWVNLNLWQKLKLSRDDAKPLLRLKGFPSFPLVERQANAEVDWWDMVCNVKKLINEKKEDGKVFWQNLAGYKRQEALRPYLSSEEDRKKGKKFARYQLGDLLLHLEKKHGEDWGKVYDEAWERIDKKVEGLSKHIKLEEERRSEDAQSKAALTDWLRAKASFVIEGLKEADKDEFCRCELKLQKWYGDLRGKPFAIEAENSILDISGFSKQYNCAFIWQKDGVKKLNLYLIINYFKGGKLRFKKIKPEAFEANRFYTVINKKSGEIVPMEVNFNFDDPNLIILPLAFGKRQGREFIWNDLLSLETGSLKLANGRVIEKTLYNRRTRQDEPALFVALTFERREVLDSSNIKPMNLIGVDRGENIPAVIALTDPEGCPLSRFKDSLGNPTHILRIGESYKEKQRTIQAKKEVEQRRAGGYSRKYASKAKNLADDMVRNTARDLLYYAVTQDAMLIFENLSRGFGRQGKRTFMAERQYTRMEDWLTAKLAYEGLPSKTYLSKTLAQYTSKTCSNCGFTITSADYDRMLEKLKKTATGWMTTINGKELKVEGQITYYNRYKRQNVVKDLSVELDRLSEESVNNDISSWTKGRSGEALSLLKKRFSHRPVQEKFVCLNCGFETHADEQAALNIARSWLFLRSQEYKKYQTNKTTGNTDKRAFVETWQSFYRKKLKEVWKPAV

SEQ ID NO: 36814 - protein, 979 aa, synthetic construct
  REGION 1..979: note = engineered CasX variant
QEIKRINKIRRRLVKDSNTKKAGKTGPMKTLLVRVMTPDLRERLENLRKKPENIPQPISNTSRANLNKLLTDYTEMKKAILHVYWEEFQKDPVGLMSRVAQPASKKIDQNKLKPEMDEKGNLTTAGFACSQCGQPLFVYKLEQVSEKGKAYTNYFGRCNVAEHEKLILLAQLKPEKDSDEAVTYSLGKFGQRALDFYSIHVTKESTHPVKPLAQIAGNRYASVPVGKALSDACMGTIASFLSKYQDIIIEHQKVVKGNQKRLESLRELAGKENLEYPSVTLPPQPHTKEGVDAYNEVIARVRMWVNLNLWQKLKLSRDDAKPLLRLKGFPSFPLVERQANAEVDWWDMVCNVKKLINEKKEDGKVFWQNLAGYKRQEALRPYLSSEEDRKKGKKFARYQLGDLLLHLEKKHGEDWGKVYDEAWERIDKKVEGLSKHIKLEEERRSEDAQSKAALTDWLRAKASFVIEGLKEADKDEFCRCELKLQKWYGDLRGKPFAIEAENSILDISGFSKQYNCAFIWQKDGVKKLNLYLIINYFKGGKLRFKKIKPEAFEANRFYTVINKKSGEIVPMEVNFNFDDPNLIILPLAFGKRQGREFIWNDLLSLETGSLKLANGRVIEKTLYNRRTRQDEPALFVALTFERREVLDSSNIKPMNLIGVDRGENIPAVIALTDPEGCPLSRFKDSLGNPTHILRIGESYKEKQRTIQAKKEVEQRRAGGYSRKYASKAKNLADDMVRNTARDLLYYAVTQDAMLIFENLSRGFGRQGKRTFMAERQYTRMEDWLTAKLAYEGLPSKTYLSKTLAQYTSKTCSNCGFTITSADYDRMLEKLKKTATGWMTTINGKELKVEGQITYYNRYKRQNVVKDLSVELDRLSEESVNNDISSWTKGRSGEALSLLKKRFSHRPVQEKFVCLNCGFETHADEQAALNIARSWLFLRSQEYKKYQTNKTTGNTDKRAFVETWQSFYRKKLKEVWKPAV

SEQ ID NO: 36815 - protein, 979 aa, synthetic construct
  REGION 1..979: note = engineered CasX variant
QEIKRINKIRRRLVKDSNTKKAGKTGPMKTLLVRVMTPDLRERLENLRKKPENIPQPISNTSRANLNKLLTDYTEMKKAILHVYWEEFQKDPVGLMSRVAQPASKKIDQNKLKPEMDEKGNLTTAGFACSQCGQPLFVYKLEQVSEKGKAYTNYFGRCNVAEHEKLIKLAQLKPEKDSDEAVTYSLGKFGQRALDFYSIHVTKESTHPVKPLAQIAGNRYASGPVGKALSDACMGTIASFLSKYQDIIIEHQKVVKGNQKRLESLRELAGKENLEYPSVTLPPQPHTKEGVDAYNEVIARVRMWVNLNLWQKLKLSRDDAKPLLRLKGFPSFPLVERQANAEVDWWDMVCNVKKLINEKKEDGKVFWQNLAGYKRQEALRPYLSSEEDRKKGKKFARYQLGDLLLHLEKKHGEDWGKVYDEAWERIDKKVEGLSKHIKLEEERRSEDAQSKAALTDWLRAKASFVIEGLKEADKDEFCRCELKLQKWYGDLRGKPFAIEAENSILDISGFSKQYNCAFIWQKDGVKKLNLYLIINYFKGGKLRFKKIKPEAFEANRFYTVINKKSGEIVPMEVNFNFDDPNLIILPLAFGKRQGREFIWNDLLSLETGSLKLANGRVIEKTLYNRRTRQDEPALFVALTFERREVLDSSNIKPMNLIGVDRGENIPAVIALTDPEGCPLSRFKDSLGNPTHILRIGESYKEKQRTIQAKKEVEQRRAGGYSRKYASKAKNLADDMVRNTARDLLYYAVTQDAMLIFENLSRGFGRQGKRTFMAERQYTRMEDWLTAKLAYEGLPSKTYLSKTLAQYTSKTCSNCGFTITSADYDRMLEKLKKTATGWMTTINGKELKVEGQITYYNRYKRQNVVKDLSVELDRLSEESVNNDISSWTKGRSGEALSLLKKRFSHRPVQEKFVCLNCGFETHADEQAALNIARSWLFLRSQEYKKYQTNKTTGNTDKRAFVETWQSFYRKKLKEVWKPAV

SEQ ID NO: 36816 - protein, 978 aa, synthetic construct
  REGION 1..978: note = engineered CasX variant
QEIKRINKIRRRLVKDSNTKKAGKTGPMKTLLVRVMTPDLRERLENLRKKPENIPQPISNTSRANLNKLLTDYTEMKKAILHVYWEEFQKDPVGLMSRVAQPASKKIDQNKLKPEMDEKGNLTTAGFACSQCGQPLFVYKLEQVSEKGKAYTNYFGRCNVAEHEKLILLAQLKPEKDSDEAVTYSLGKFGQRALDFYSIHVTKESTHPVKPLAQIAGNRYASPVGKALSDACMGTIASFLSKYQDIIIEHQKVVKGNQKRLESLRELAGKENLEYPSVTLPPQPHTKEGVDAYNEVIARVRMWVNLNLWQKLKLSRDDAKPLLRLKGFPSFPLVERQANAEVDWWDMVCNVKKLINEKKEDGKVFWQNLAGYKRQEALRPYLSSEEDRKKGKKFARYQLGDLLLHLEKKHGEDWGKVYDEAWERIDKKVEGLSKHIKLEEERRSEDAQSKAALTDWLRAKASFVIEGLKEADKDEFCRCELKLQKWYGDLRGKPFAIEAENSILDISGFSKQYNCAFIWQKDGVKKLNLYLIINYFKGGKLRFKKIKPEAFEANRFYTVINKKSGEIVPMEVNFNFDDPNLIILPLAFGKRQGREFIWNDLLSLETGSLKLANGRVIEKTLYNRRTRQDEPALFVALTFERREVLDSSNIKPMNLIGVDRGENIPAVIALTDPEGCPLSRFKDSLGNPTHILRIGESYKEKQRTIQAKKEVEQRRAGGYSRKYASKAKNLADDMVRNTARDLLYYAVTQDAMLIFENLSRGFGRQGKRTFMAERQYTRMEDWLTAKLAYEGLPSKTYLSKTLAQYTSKTCSNCGFTITSADYDRMLEKLKKTATGWMTTINGKELKVEGQITYYNRYKRQNVVKDLSVELDRLSEESVNNDISSWTKGRSGEALSLLKKRFSHRPVQEKFVCLNCGFETHADEQAALNIARSWLFLRSQEYKKYQTNKTTGNTDKRAFVETWQSFYRKKLKEVWKPAV

SEQ ID NO: 36817 - protein, 979 aa, synthetic construct
  REGION 1..979: note = engineered CasX variant
QEIKRINKIRRRLVKDSNTKKAGKTGPMKTLLVRVMTPDLRERLENLRKKPENIPQPISNTSRANLNKLLTDYTEMKKAILHVYWEEFQKDPVGLMSRVAQPASKKIDQNKLKPEMDEKGNLTTAGFACSQCGQPLFVYKLEQVSEKGKAYTNYFGRCNVAEHEKLILLAQLKPEKDSDEAVTYSLGKFGQRALDFYSIHVTKESTHPVKPLAQIAGNRYASYPVGKALSDACMGTIASFLSKYQDIIIEHQKVVKGNQKRLESLRELAGKENLEYPSVTLPPQPHTKEGVDAYNEVIARVRMWVNLNLWQKLKLSRDDAKPLLRLKGFPSFPLVERQANAEVDWWDMVCNVKKLINEKKEDGKVFWQNLAGYKRQEALRPYLSSEEDRKKGKKFARYQLGDLLLHLEKKHGEDWGKVYDEAWERIDKKVEGLSKHIKLEEERRSEDAQSKAALTDWLRAKASFVIEGLKEADKDEFCRCELKLQKWYGDLRGKPFAIEAENSILDISGFSKQYNCAFIWQKDGVKKLNLYLIINYFKGGKLRFKKIKPEAFEANRFYTVINKKSGEIVPMEVNFNFDDPNLIILPLAFGKRQGREFIWNDLLSLETGSLKLANGRVIEKTLYNRRTRQDEPALFVALTFERREVLDSSNIKPMNLIGVDRGENIPAVIALTDPEGCPLSRFKDSLGNPTHILRIGESYKEKQRTIQAKKEVEQRRAGGYSRKYASKAKNLADDMVRNTARDLLYYAVTQDAMLIFENLSRGFGRQGKRTFMAERQYTRMEDWLTAKLAYEGLPSKTYLSKTLAQYTSKTCSNCGFTITSADYDRVLEKLKKTATGWMTTINGKELKVEGQITYYNRYKRQNVVKDLSVELDRLSEESVNNDISSWTKGRQGEALSLLKKRFSHRPVQEKFVCLNCGFETHADEQAALNIARSWLFLRSQEYKKYQTNKTTGNTDKRAFVETWQSFYRKKLKEVWKPAV

SEQ ID NO: 36818 - protein, 979 aa, synthetic construct
  REGION 1..979: note = engineered CasX variant
QEIKRINKIRRRLVKDSNTKKAGKTGPMKTLLVRVMTPDLRERLENLRKKPENIPQPISNTSRANLNKLLTDYTEMKKAILHVYWEEFQKDPVGLMSRVAQPASKKIDQNKLKPEMDEKGNLTTAGFACSQCGQPLFVYKLEQVSEKGKAYTNYFGRCNVAEHEKLILLAQLKPEKDSDEAVTYSLGKFGQRALDFYSIHVTKESTHPVKPLAQIAGNRYASHPVGKALSDACMGTIASFLSKYQDIIIEHQKVVKGNQKRLESLRELAGKENLEYPSVTLPPQPHTKEGVDAYNEVIARVRMWVNLNLWQKLKLSRDDAKPLLRLKGFPSFPLVERQANAEVDWWDMVCNVKKLINEKKEDGKVFWQNLAGYKRQEALRPYLSSEEDRKKGKKFARYQLGDLLLHLEKKHGEDWGKVYDEAWERIDKKVEGLSKHIKLEEERRSEDAQSKAALTDWLRAKASFVIEGLKEADKDEFCRCELKLQKWYGDLRGKPFAIEAENSILDISGFSKQYNCAFIWQKDGVKKLNLYLIINYFKGGKLRFKKIKPEAFEANRFYTVINKKSGEIVPMEVNFNFDDPNLIILPLAFGKRQGREFIWNDLLSLETGSLKLANGRVIEKTLYNRRTRQDEPALFVALTFERREVLDSSNIKPMNLIGVDRGENIPAVIALTDPEGCPLSRFKDSLGNPTHILRIGESYKEKQRTIQAKKEVEQRRAGGYSRKYASKAKNLADDMVRNTARDLLYYAVTQDAMLIFENLSRGFGRQGKRTFMAERQYTRMEDWLTAKLAYEGLPSKTYLSKTLAQYTSKTCSNCGFTITSADYDRVLEKLKKTATGWMTTINGKELKVEGQITYYNRYKRQNVVKDLSVELDRLSEESVNNDISSWTKGRQGEALSLLKKRFSHRPVQEKFVCLNCGFETHADEQAALNIARSWLFLRSQEYKKYQTNKTTGNTDKRAFVETWQSFYRKKLKEVWKPAV

SEQ ID NO: 36819 - protein, 979 aa, synthetic construct
  REGION 1..979: note = engineered CasX variant
QEIKRINKIRRRLVKDSNTKKAGKTGPMKTLLVRVMTPDLRERLENLRKKPENIPQPISNTSRANLNKLLTDYTEMKKAILHVYWEEFQKDPVGLMSRVAQPASKKIDQNKLKPEMDEKGNLTTAGFACSQCGQPLFVYKLEQVSEKGKAYTNYFGRCNVAEHEKLILLAQLKPEKDSDEAVTYSLGKFGQRALDFYSIHVTKESTHPVKPLAQIAGNRYASSPVGKALSDACMGTIASFLSKYQDIIIEHQKVVKGNQKRLESLRELAGKENLEYPSVTLPPQPHTKEGVDAYNEVIARVRMWVNLNLWQKLKLSRDDAKPLLRLKGFPSFPLVERQANAEVDWWDMVCNVKKLINEKKEDGKVFWQNLAGYKRQEALRPYLSSEEDRKKGKKFARYQLGDLLLHLEKKHGEDWGKVYDEAWERIDKKVEGLSKHIKLEEERRSEDAQSKAALTDWLRAKASFVIEGLKEADKDEFCRCELKLQKWYGDLRGKPFAIEAENSILDISGFSKQYNCAFIWQKDGVKKLNLYLIINYFKGGKLRFKKIKPEAFEANRFYTVINKKSGEIVPMEVNFNFDDPNLIILPLAFGKRQGREFIWNDLLSLETGSLKLANGRVIEKTLYNRRTRQDEPALFVALTFERREVLDSSNIKPMNLIGVDRGENIPAVIALTDPEGCPLSRFKDSLGNPTHILRIGESYKEKQRTIQAKKEVEQRRAGGYSRKYASKAKNLADDMVRNTARDLLYYAVTQDAMLIFENLSRGFGRQGKRTFMAERQYTRMEDWLTAKLAYEGLPSKTYLSKTLAQYTSKTCSNCGFTITSADYDRVLEKLKKTATGWMTTINGKELKVEGQITYYNRYKRQNVVKDLSVELDRLSEESVNNDISSWTKGRQGEALSLLKKRFSHRPVQEKFVCLNCGFETHADEQAALNIARSWLFLRSQEYKKYQTNKTTGNTDKRAFVETWQSFYRKKLKEVWKPAV

SEQ ID NO: 36820 - protein, 979 aa, synthetic construct
  REGION 1..979: note = engineered CasX variant
QEIKRINKIRRRLVKDSNTKKAGKTGPMKTLLVRVMTPDLRERLENLRKKPENIPQPISNTSRANLNKLLTDYTEMKKAILHVYWEEFQKDPVGLMSRVAQPASKKIDQNKLKPEMDEKGNLTTAGFACSQCGQPLFVYKLEQVSEKGKAYTNYFGRCNVAEHEKLILLAQLKPEKDSDEAVTYSLGKFGQRALDFYSIHVTKESTHPVKPLAQIAGNRYASTPVGKALSDACMGTIASFLSKYQDIIIEHQKVVKGNQKRLESLRELAGKENLEYPSVTLPPQPHTKEGVDAYNEVIARVRMWVNLNLWQKLKLSRDDAKPLLRLKGFPSFPLVERQANAEVDWWDMVCNVKKLINEKKEDGKVFWQNLAGYKRQEALRPYLSSEEDRKKGKKFARYQLGDLLLHLEKKHGEDWGKVYDEAWERIDKKVEGLSKHIKLEEERRSEDAQSKAALTDWLRAKASFVIEGLKEADKDEFCRCELKLQKWYGDLRGKPFAIEAENSILDISGFSKQYNCAFIWQKDGVKKLNLYLIINYFKGGKLRFKKIKPEAFEANRFYTVINKKSGEIVPMEVNFNFDDPNLIILPLAFGKRQGREFIWNDLLSLETGSLKLANGRVIEKTLYNRRTRQDEPALFVALTFERREVLDSSNIKPMNLIGVDRGENIPAVIALTDPEGCPLSRFKDSLGNPTHILRIGESYKEKQRTIQAKKEVEQRRAGGYSRKYASKAKNLADDMVRNTARDLLYYAVTQDAMLIFENLSRGFGRQGKRTFMAERQYTRMEDWLTAKLAYEGLPSKTYLSKTLAQYTSKTCSNCGFTITSADYDRVLEKLKKTATGWMTTINGKELKVEGQITYYNRYKRQNVVKDLSVELDRLSEESVNNDISSWTKGRQGEALSLLKKRFSHRPVQEKFVCLNCGFETHADEQAALNIARSWLFLRSQEYKKYQTNKTTGNTDKRAFVETWQSFYRKKLKEVWKPAV

SEQ ID NO: 36821 - protein, 979 aa, synthetic construct
  REGION 1..979: note = engineered CasX variant
QEIKRINKIRRRLVKDSNTKKAGKTGPMKTLLVRVMTPDLRERLENLRKKPENIPQPISNTSRANLNKLLTDYTEMKKAILHVYWEEFQKDPVGLMSRVAQPASKKIDQNKLKPEMDEKGNLTTAGFACSQCGQPLFVYKLEQVSEKGKAYTNYFGRCNVAEHEKLILLAQLKPEKDSDEAVTYSLGKFGQRALDFYSIHVTKESTHPVKPLAQIAGNRYASAPVGKALSDACMGTIASFLSKYQDIIIEHQKVVKGNQKRLESLRELAGKENLEYPSVTLPPQPHTKEGVDAYNEVIARVRMWVNLNLWQKLKLSRDDAKPLLRLKGFPSFPLVERQANAEVDWWDMVCNVKKLINEKKEDGKVFWQNLAGYKRQEALRPYLSSEEDRKKGKKFARYQLGDLLLHLEKKHGEDWGKVYDEAWERIDKKVEGLSKHIKLEEERRSEDAQSKAALTDWLRAKASFVIEGLKEADKDEFCRCELKLQKWYGDLRGKPFAIEAENSILDISGFSKQYNCAFIWQKDGVKKLNLYLIINYFKGGKLRFKKIKPEAFEANRFYTVINKKSGEIVPMEVNFNFDDPNLIILPLAFGKRQGREFIWNDLLSLETGSLKLANGRVIEKTLYNRRTRQDEPALFVALTFERREVLDSSNIKPMNLIGVDRGENIPAVIALTDPEGCPLSRFKDSLGNPTHILRIGESYKEKQRTIQAKKEVEQRRAGGYSRKYASKAKNLADDMVRNTARDLLYYAVTQDAMLIFENLSRGFGRQGKRTFMAERQYTRMEDWLTAKLAYEGLPSKTYLSKTLAQYTSKTCSNCGFTITSADYDRVLEKLKKTATGWMTTINGKELKVEGQITYYNRYKRQNVVKDLSVELDRLSEESVNNDISSWTKGRQGEALSLLKKRFSHRPVQEKFVCLNCGFETHADEQAALNIARSWLFLRSQEYKKYQTNKTTGNTDKRAFVETWQSFYRKKLKEVWKPAV

SEQ ID NO: 36822 - protein, 979 aa, synthetic construct
  REGION 1..979: note = engineered CasX variant
QEIKRINKIRRRLVKDSNTKKAGKTGPMKTLLVRVMTPDLRERLENLRKKPENIPQPISNTSRANLNKLLTDYTEMKKAILHVYWEEFQKDPVGLMSRVAQPASKKIDQNKLKPEMDEKGNLTTAGFACSQCGQPLFVYKLEQVSEKGKAYTNYFGRCNVAEHEKLILLAQLKPEKDSDEAVTYSLGKFGQRALDFYSIHVTKESTHPVKPLAQIAGNRYASVPVGKALSDACMGTIASFLSKYQDIIIEHQKVVKGNQKRLESLRELAGKENLEYPSVTLPPQPHTKEGVDAYNEVIARVRMWVNLNLWQKLKLSRDDAKPLLRLKGFPSFPLVERQANAEVDWWDMVCNVKKLINEKKEDGKVFWQNLAGYKRQEALRPYLSSEEDRKKGKKFARYQLGDLLLHLEKKHGEDWGKVYDEAWERIDKKVEGLSKHIKLEEERRSEDAQSKAALTDWLRAKASFVIEGLKEADKDEFCRCELKLQKWYGDLRGKPFAIEAENSILDISGFSKQYNCAFIWQKDGVKKLNLYLIINYFKGGKLRFKKIKPEAFEANRFYTVINKKSGEIVPMEVNFNFDDPNLIILPLAFGKRQGREFIWNDLLSLETGSLKLANGRVIEKTLYNRRTRQDEPALFVALTFERREVLDSSNIKPMNLIGVDRGENIPAVIALTDPEGCPLSRFKDSLGNPTHILRIGESYKEKQRTIQAKKEVEQRRAGGYSRKYASKAKNLADDMVRNTARDLLYYAVTQDAMLIFENLSRGFGRQGKRTFMAERQYTRMEDWLTAKLAYEGLPSKTYLSKTLAQYTSKTCSNCGFTITSADYDRVLEKLKKTATGWMTTINGKELKVEGQITYYNRYKRQNVVKDLSVELDRLSEESVNNDISSWTKGRQGEALSLLKKRFSHRPVQEKFVCLNCGFETHADEQAALNIARSWLFLRSQEYKKYQTNKTTGNTDKRAFVETWQSFYRKKLKEVWKPAV

SEQ ID NO: 36823 - protein, 979 aa, synthetic construct
  REGION 1..979: note = engineered CasX variant
QEIKRINKIRRRLVKDSNTKKAGKTGPMKTLLVRVMTPDLRERLENLRKKPENIPQPISNTSRANLNKLLTDYTEMKKAILHVYWEEFQKDPVGLMSRVAQPASKKIDQNKLKPEMDEKGNLTTAGFACSQCGQPLFVYKLEQVSEKGKAYTNYFGRCNVAEHEKLIKLAQLKPEKDSDEAVTYSLGKFGQRALDFYSIHVTKESTHPVKPLAQIAGNRYASGPVGKALSDACMGTIASFLSKYQDIIIEHQKVVKGNQKRLESLRELAGKENLEYPSVTLPPQPHTKEGVDAYNEVIARVRMWVNLNLWQKLKLSRDDAKPLLRLKGFPSFPLVERQANAEVDWWDMVCNVKKLINEKKEDGKVFWQNLAGYKRQEALRPYLSSEEDRKKGKKFARYQLGDLLLHLEKKHGEDWGKVYDEAWERIDKKVEGLSKHIKLEEERRSEDAQSKAALTDWLRAKASFVIEGLKEADKDEFCRCELKLQKWYGDLRGKPFAIEAENSILDISGFSKQYNCAFIWQKDGVKKLNLYLIINYFKGGKLRFKKIKPEAFEANRFYTVINKKSGEIVPMEVNFNFDDPNLIILPLAFGKRQGREFIWNDLLSLETGSLKLANGRVIEKTLYNRRTRQDEPALFVALTFERREVLDSSNIKPMNLIGVDRGENIPAVIALTDPEGCPLSRFKDSLGNPTHILRIGESYKEKQRTIQAKKEVEQRRAGGYSRKYASKAKNLADDMVRNTARDLLYYAVTQDAMLIFENLSRGFGRQGKRTFMAERQYTRMEDWLTAKLAYEGLPSKTYLSKTLAQYTSKTCSNCGFTITSADYDRVLEKLKKTATGWMTTINGKELKVEGQITYYNRYKRQNVVKDLSVELDRLSEESVNNDISSWTKGRQGEALSLLKKRFSHRPVQEKFVCLNCGFETHADEQAALNIARSWLFLRSQEYKKYQTNKTTGNTDKRAFVETWQSFYRKKLKEVWKPAV

SEQ ID NO: 36824 - protein, 978 aa, synthetic construct
  REGION 1..978: note = engineered CasX variant
QEIKRINKIRRRLVKDSNTKKAGKTGPMKTLLVRVMTPDLRERLENLRKKPENIPQPISNTSRANLNKLLTDYTEMKKAILHVYWEEFQKDPVGLMSRVAQPASKKIDQNKLKPEMDEKGNLTTAGFACSQCGQPLFVYKLEQVSEKGKAYTNYFGRCNVAEHEKLILLAQLKPEKDSDEAVTYSLGKFGQRALDFYSIHVTKESTHPVKPLAQIAGNRYASPVGKALSDACMGTIASFLSKYQDIIIEHQKVVKGNQKRLESLRELAGKENLEYPSVTLPPQPHTKEGVDAYNEVIARVRMWVNLNLWQKLKLSRDDAKPLLRLKGFPSFPLVERQANAEVDWWDMVCNVKKLINEKKEDGKVFWQNLAGYKRQEALRPYLSSEEDRKKGKKFARYQLGDLLLHLEKKHGEDWGKVYDEAWERIDKKVEGLSKHIKLEEERRSEDAQSKAALTDWLRAKASFVIEGLKEADKDEFCRCELKLQKWYGDLRGKPFAIEAENSILDISGFSKQYNCAFIWQKDGVKKLNLYLIINYFKGGKLRFKKIKPEAFEANRFYTVINKKSGEIVPMEVNFNFDDPNLIILPLAFGKRQGREFIWNDLLSLETGSLKLANGRVIEKTLYNRRTRQDEPALFVALTFERREVLDSSNIKPMNLIGVDRGENIPAVIALTDPEGCPLSRFKDSLGNPTHILRIGESYKEKQRTIQAKKEVEQRRAGGYSRKYASKAKNLADDMVRNTARDLLYYAVTQDAMLIFENLSRGFGRQGKRTFMAERQYTRMEDWLTAKLAYEGLPSKTYLSKTLAQYTSKTCSNCGFTITSADYDRVLEKLKKTATGWMTTINGKELKVEGQITYYNRYKRQNVVKDLSVELDRLSEESVNNDISSWTKGRQGEALSLLKKRFSHRPVQEKFVCLNCGFETHADEQAALNIARSWLFLRSQEYKKYQTNKTTGNTDKRAFVETWQSFYRKKLKEVWKPAV

SEQ ID NO: 36825 - protein, 979 aa, synthetic construct
  REGION 1..979: note = engineered CasX variant
QEIKRINKIRRRLVKDSNTKKAGKTGPMKTLLVRVMTPDLRERLENLRKKPENIPQPISNTSRANLNKLLTDYTEMKKAILHVYWEEFQKDPVGLMSRVAQPASKKIDQNKLKPEMDEKGNLTTAGFACSQCGQPLFVYKLEQVSEKGKAYTNYFGRCNVAEHEKLILLAQLKPEKDSDEAVTYSLGKFGQRALDFYSIHVTKESTHPVKPLAQIAGNRYASYPVGKALSDACMGTIASFLSKYQDIIIEHQKVVKGNQKRLESLRELAGKENLEYPSVTLPPQPHTKEGVDAYNEVIARVRMWVNLNLWQKLKLSRDDAKPLLRLKGFPSFPLVERQANAEVDWWDMVCNVKKLINEKKEDGKVFWQNLAGYKRQEALRPYLSSEEDRKKGKKFARYQLGDLLLHLEKKHGEDWGKVYDEAWERIDKKVEGLSKHIKLEEERRSEDAQSKAALTDWLRAKASFVIEGLKEADKDEFCRCELKLQKWYGDLRGKPFAIEAENSILDISGFSKQYNCAFIWQKDGVKKLNLYLIINYFKGGKLRFKKIKPEAFEANRFYTVINKKSGEIVPMEVNFNFDDPNLIILPLAFGKRQGREFIWNDLLSLETGSLKLANGRVIEKTLYNRRTRQDEPALFVALTFERREVLDSSNIKPMNLIGVDRGENIPAVIALTDPEGCPLSRFKDSLGNPTHILRIGESYKEKQRTIQAKKEVEQRRAGGYSRKYASKAKNLADDMVRNTARDLLYYAVTQDAMLIFENLSRGFGRQGKRTFMAERQYTRMEDWLTAKLAYEGLPSKTYLSKTLAQYTSKTCSNCGFTITSADYDRVLEKLKKTATGWMTTINGKELKVEGQITYYNRYKRQNVVKDLSVELDRLSEESVNNDISSWTKGRSGEALSLLKKRFSHRPVQEKFVCLNCEFETHADEQAALNIARSWLFLRSQEYKKYQTNKTTGNTDKRAFVETWQSFYRKKLKEVWKPAV

SEQ ID NO: 36826 - protein, 979 aa, synthetic construct
  REGION 1..979: note = engineered CasX variant
QEIKRINKIRRRLVKDSNTKKAGKTGPMKTLLVRVMTPDLRERLENLRKKPENIPQPISNTSRANLNKLLTDYTEMKKAILHVYWEEFQKDPVGLMSRVAQPASKKIDQNKLKPEMDEKGNLTTAGFACSQCGQPLFVYKLEQVSEKGKAYTNYFGRCNVAEHEKLILLAQLKPEKDSDEAVTYSLGKFGQRALDFYSIHVTKESTHPVKPLAQIAGNRYASHPVGKALSDACMGTIASFLSKYQDIIIEHQKVVKGNQKRLESLRELAGKENLEYPSVTLPPQPHTKEGVDAYNEVIARVRMWVNLNLWQKLKLSRDDAKPLLRLKGFPSFPLVERQANAEVDWWDMVCNVKKLINEKKEDGKVFWQNLAGYKRQEALRPYLSSEEDRKKGKKFARYQLGDLLLHLEKKHGEDWGKVYDEAWERIDKKVEGLSKHIKLEEERRSEDAQSKAALTDWLRAKASFVIEGLKEADKDEFCRCELKLQKWYGDLRGKPFAIEAENSILDISGFSKQYNCAFIWQKDGVKKLNLYLIINYFKGGKLRFKKIKPEAFEANRFYTVINKKSGEIVPMEVNFNFDDPNLIILPLAFGKRQGREFIWNDLLSLETGSLKLANGRVIEKTLYNRRTRQDEPALFVALTFERREVLDSSNIKPMNLIGVDRGENIPAVIALTDPEGCPLSRFKDSLGNPTHILRIGESYKEKQRTIQAKKEVEQRRAGGYSRKYASKAKNLADDMVRNTARDLLYYAVTQDAMLIFENLSRGFGRQGKRTFMAERQYTRMEDWLTAKLAYEGLPSKTYLSKTLAQYTSKTCSNCGFTITSADYDRVLEKLKKTATGWMTTINGKELKVEGQITYYNRYKRQNVVKDLSVELDRLSEESVNNDISSWTKGRSGEALSLLKKRFSHRPVQEKFVCLNCEFETHADEQAALNIARSWLFLRSQEYKKYQTNKTTGNTDKRAFVETWQSFYRKKLKEVWKPAV

SEQ ID NO: 36827 - protein, 979 aa, synthetic construct
  REGION 1..979: note = engineered CasX variant
QEIKRINKIRRRLVKDSNTKKAGKTGPMKTLLVRVMTPDLRERLENLRKKPENIPQPISNTSRANLNKLLTDYTEMKKAILHVYWEEFQKDPVGLMSRVAQPASKKIDQNKLKPEMDEKGNLTTAGFACSQCGQPLFVYKLEQVSEKGKAYTNYFGRCNVAEHEKLILLAQLKPEKDSDEAVTYSLGKFGQRALDFYSIHVTKESTHPVKPLAQIAGNRYASSPVGKALSDACMGTIASFLSKYQDIIIEHQKVVKGNQKRLESLRELAGKENLEYPSVTLPPQPHTKEGVDAYNEVIARVRMWVNLNLWQKLKLSRDDAKPLLRLKGFPSFPLVERQANAEVDWWDMVCNVKKLINEKKEDGKVFWQNLAGYKRQEALRPYLSSEEDRKKGKKFARYQLGDLLLHLEKKHGEDWGKVYDEAWERIDKKVEGLSKHIKLEEERRSEDAQSKAALTDWLRAKASFVIEGLKEADKDEFCRCELKLQKWYGDLRGKPFAIEAENSILDISGFSKQYNCAFIWQKDGVKKLNLYLIINYFKGGKLRFKKIKPEAFEANRFYTVINKKSGEIVPMEVNFNFDDPNLIILPLAFGKRQGREFIWNDLLSLETGSLKLANGRVIEKTLYNRRTRQDEPALFVALTFERREVLDSSNIKPMNLIGVDRGENIPAVIALTDPEGCPLSRFKDSLGNPTHILRIGESYKEKQRTIQAKKEVEQRRAGGYSRKYASKAKNLADDMVRNTARDLLYYAVTQDAMLIFENLSRGFGRQGKRTFMAERQYTRMEDWLTAKLAYEGLPSKTYLSKTLAQYTSKTCSNCGFTITSADYDRVLEKLKKTATGWMTTINGKELKVEGQITYYNRYKRQNVVKDLSVELDRLSEESVNNDISSWTKGRSGEALSLLKKRFSHRPVQEKFVCLNCEFETHADEQAALNIARSWLFLRSQEYKKYQTNKTTGNTDKRAFVETWQSFYRKKLKEVWKPAV

SEQ ID NO: 36828 - protein, 979 aa, synthetic construct
  REGION 1..979: note = engineered CasX variant
QEIKRINKIRRRLVKDSNTKKAGKTGPMKTLLVRVMTPDLRERLENLRKKPENIPQPISNTSRANLNKLLTDYTEMKKAILHVYWEEFQKDPVGLMSRVAQPASKKIDQNKLKPEMDEKGNLTTAGFACSQCGQPLFVYKLEQVSEKGKAYTNYFGRCNVAEHEKLILLAQLKPEKDSDEAVTYSLGKFGQRALDFYSIHVTKESTHPVKPLAQIAGNRYASTPVGKALSDACMGTIASFLSKYQDIIIEHQKVVKGNQKRLESLRELAGKENLEYPSVTLPPQPHTKEGVDAYNEVIARVRMWVNLNLWQKLKLSRDDAKPLLRLKGFPSFPLVERQANAEVDWWDMVCNVKKLINEKKEDGKVFWQNLAGYKRQEALRPYLSSEEDRKKGKKFARYQLGDLLLHLEKKHGEDWGKVYDEAWERIDKKVEGLSKHIKLEEERRSEDAQSKAALTDWLRAKASFVIEGLKEADKDEFCRCELKLQKWYGDLRGKPFAIEAENSILDISGFSKQYNCAFIWQKDGVKKLNLYLIINYFKGGKLRFKKIKPEAFEANRFYTVINKKSGEIVPMEVNFNFDDPNLIILPLAFGKRQGREFIWNDLLSLETGSLKLANGRVIEKTLYNRRTRQDEPALFVALTFERREVLDSSNIKPMNLIGVDRGENIPAVIALTDPEGCPLSRFKDSLGNPTHILRIGESYKEKQRTIQAKKEVEQRRAGGYSRKYASKAKNLADDMVRNTARDLLYYAVTQDAMLIFENLSRGFGRQGKRTFMAERQYTRMEDWLTAKLAYEGLPSKTYLSKTLAQYTSKTCSNCGFTITSADYDRVLEKLKKTATGWMTTINGKELKVEGQITYYNRYKRQNVVKDLSVELDRLSEESVNNDISSWTKGRSGEALSLLKKRFSHRPVQEKFVCLNCEFETHADEQAALNIARSWLFLRSQEYKKYQTNKTTGNTDKRAFVETWQSFYRKKLKEVWKPAV

SEQ ID NO: 36829 - protein, 979 aa, synthetic construct
  REGION 1..979: note = engineered CasX variant
QEIKRINKIRRRLVKDSNTKKAGKTGPMKTLLVRVMTPDLRERLENLRKKPENIPQPISNTSRANLNKLLTDYTEMKKAILHVYWEEFQKDPVGLMSRVAQPASKKIDQNKLKPEMDEKGNLTTAGFACSQCGQPLFVYKLEQVSEKGKAYTNYFGRCNVAEHEKLILLAQLKPEKDSDEAVTYSLGKFGQRALDFYSIHVTKESTHPVKPLAQIAGNRYASAPVGKALSDACMGTIASFLSKYQDIIIEHQKVVKGNQKRLESLRELAGKENLEYPSVTLPPQPHTKEGVDAYNEVIARVRMWVNLNLWQKLKLSRDDAKPLLRLKGFPSFPLVERQANAEVDWWDMVCNVKKLINEKKEDGKVFWQNLAGYKRQEALRPYLSSEEDRKKGKKFARYQLGDLLLHLEKKHGEDWGKVYDEAWERIDKKVEGLSKHIKLEEERRSEDAQSKAALTDWLRAKASFVIEGLKEADKDEFCRCELKLQKWYGDLRGKPFAIEAENSILDISGFSKQYNCAFIWQKDGVKKLNLYLIINYFKGGKLRFKKIKPEAFEANRFYTVINKKSGEIVPMEVNFNFDDPNLIILPLAFGKRQGREFIWNDLLSLETGSLKLANGRVIEKTLYNRRTRQDEPALFVALTFERREVLDSSNIKPMNLIGVDRGENIPAVIALTDPEGCPLSRFKDSLGNPTHILRIGESYKEKQRTIQAKKEVEQRRAGGYSRKYASKAKNLADDMVRNTARDLLYYAVTQDAMLIFENLSRGFGRQGKRTFMAERQYTRMEDWLTAKLAYEGLPSKTYLSKTLAQYTSKTCSNCGFTITSADYDRVLEKLKKTATGWMTTINGKELKVEGQITYYNRYKRQNVVKDLSVELDRLSEESVNNDISSWTKGRSGEALSLLKKRFSHRPVQEKFVCLNCEFETHADEQAALNIARSWLFLRSQEYKKYQTNKTTGNTDKRAFVETWQSFYRKKLKEVWKPAV

SEQ ID NO: 36830 - protein, 979 aa, synthetic construct
  REGION 1..979: note = engineered CasX variant
QEIKRINKIRRRLVKDSNTKKAGKTGPMKTLLVRVMTPDLRERLENLRKKPENIPQPISNTSRANLNKLLTDYTEMKKAILHVYWEEFQKDPVGLMSRVAQPASKKIDQNKLKPEMDEKGNLTTAGFACSQCGQPLFVYKLEQVSEKGKAYTNYFGRCNVAEHEKLILLAQLKPEKDSDEAVTYSLGKFGQRALDFYSIHVTKESTHPVKPLAQIAGNRYASVPVGKALSDACMGTIASFLSKYQDIIIEHQKVVKGNQKRLESLRELAGKENLEYPSVTLPPQPHTKEGVDAYNEVIARVRMWVNLNLWQKLKLSRDDAKPLLRLKGFPSFPLVERQANAEVDWWDMVCNVKKLINEKKEDGKVFWQNLAGYKRQEALRPYLSSEEDRKKGKKFARYQLGDLLLHLEKKHGEDWGKVYDEAWERIDKKVEGLSKHIKLEEERRSEDAQSKAALTDWLRAKASFVIEGLKEADKDEFCRCELKLQKWYGDLRGKPFAIEAENSILDISGFSKQYNCAFIWQKDGVKKLNLYLIINYFKGGKLRFKKIKPEAFEANRFYTVINKKSGEIVPMEVNFNFDDPNLIILPLAFGKRQGREFIWNDLLSLETGSLKLANGRVIEKTLYNRRTRQDEPALFVALTFERREVLDSSNIKPMNLIGVDRGENIPAVIALTDPEGCPLSRFKDSLGNPTHILRIGESYKEKQRTIQAKKEVEQRRAGGYSRKYASKAKNLADDMVRNTARDLLYYAVTQDAMLIFENLSRGFGRQGKRTFMAERQYTRMEDWLTAKLAYEGLPSKTYLSKTLAQYTSKTCSNCGFTITSADYDRVLEKLKKTATGWMTTINGKELKVEGQITYYNRYKRQNVVKDLSVELDRLSEESVNNDISSWTKGRSGEALSLLKKRFSHRPVQEKFVCLNCEFETHADEQAALNIARSWLFLRSQEYKKYQTNKTTGNTDKRAFVETWQSFYRKKLKEVWKPAV

SEQ ID NO: 36831 - protein, 979 aa, synthetic construct
  REGION 1..979: note = engineered CasX variant
QEIKRINKIRRRLVKDSNTKKAGKTGPMKTLLVRVMTPDLRERLENLRKKPENIPQPISNTSRANLNKLLTDYTEMKKAILHVYWEEFQKDPVGLMSRVAQPASKKIDQNKLKPEMDEKGNLTTAGFACSQCGQPLFVYKLEQVSEKGKAYTNYFGRCNVAEHEKLIKLAQLKPEKDSDEAVTYSLGKFGQRALDFYSIHVTKESTHPVKPLAQIAGNRYASGPVGKALSDACMGTIASFLSKYQDIIIEHQKVVKGNQKRLESLRELAGKENLEYPSVTLPPQPHTKEGVDAYNEVIARVRMWVNLNLWQKLKLSRDDAKPLLRLKGFPSFPLVERQANAEVDWWDMVCNVKKLINEKKEDGKVFWQNLAGYKRQEALRPYLSSEEDRKKGKKFARYQLGDLLLHLEKKHGEDWGKVYDEAWERIDKKVEGLSKHIKLEEERRSEDAQSKAALTDWLRAKASFVIEGLKEADKDEFCRCELKLQKWYGDLRGKPFAIEAENSILDISGFSKQYNCAFIWQKDGVKKLNLYLIINYFKGGKLRFKKIKPEAFEANRFYTVINKKSGEIVPMEVNFNFDDPNLIILPLAFGKRQGREFIWNDLLSLETGSLKLANGRVIEKTLYNRRTRQDEPALFVALTFERREVLDSSNIKPMNLIGVDRGENIPAVIALTDPEGCPLSRFKDSLGNPTHILRIGESYKEKQRTIQAKKEVEQRRAGGYSRKYASKAKNLADDMVRNTARDLLYYAVTQDAMLIFENLSRGFGRQGKRTFMAERQYTRMEDWLTAKLAYEGLPSKTYLSKTLAQYTSKTCSNCGFTITSADYDRVLEKLKKTATGWMTTINGKELKVEGQITYYNRYKRQNVVKDLSVELDRLSEESVNNDISSWTKGRSGEALSLLKKRFSHRPVQEKFVCLNCEFETHADEQAALNIARSWLFLRSQEYKKYQTNKTTGNTDKRAFVETWQSFYRKKLKEVWKPAV

SEQ ID NO: 36832 - protein, 978 aa, synthetic construct
  REGION 1..978: note = engineered CasX variant
QEIKRINKIRRRLVKDSNTKKAGKTGPMKTLLVRVMTPDLRERLENLRKKPENIPQPISNTSRANLNKLLTDYTEMKKAILHVYWEEFQKDPVGLMSRVAQPASKKIDQNKLKPEMDEKGNLTTAGFACSQCGQPLFVYKLEQVSEKGKAYTNYFGRCNVAEHEKLILLAQLKPEKDSDEAVTYSLGKFGQRALDFYSIHVTKESTHPVKPLAQIAGNRYASPVGKALSDACMGTIASFLSKYQDIIIEHQKVVKGNQKRLESLRELAGKENLEYPSVTLPPQPHTKEGVDAYNEVIARVRMWVNLNLWQKLKLSRDDAKPLLRLKGFPSFPLVERQANAEVDWWDMVCNVKKLINEKKEDGKVFWQNLAGYKRQEALRPYLSSEEDRKKGKKFARYQLGDLLLHLEKKHGEDWGKVYDEAWERIDKKVEGLSKHIKLEEERRSEDAQSKAALTDWLRAKASFVIEGLKEADKDEFCRCELKLQKWYGDLRGKPFAIEAENSILDISGFSKQYNCAFIWQKDGVKKLNLYLIINYFKGGKLRFKKIKPEAFEANRFYTVINKKSGEIVPMEVNFNFDDPNLIILPLAFGKRQGREFIWNDLLSLETGSLKLANGRVIEKTLYNRRTRQDEPALFVALTFERREVLDSSNIKPMNLIGVDRGENIPAVIALTDPEGCPLSRFKDSLGNPTHILRIGESYKEKQRTIQAKKEVEQRRAGGYSRKYASKAKNLADDMVRNTARDLLYYAVTQDAMLIFENLSRGFGRQGKRTFMAERQYTRMEDWLTAKLAYEGLPSKTYLSKTLAQYTSKTCSNCGFTITSADYDRVLEKLKKTATGWMTTINGKELKVEGQITYYNRYKRQNVVKDLSVELDRLSEESVNNDISSWTKGRSGEALSLLKKRFSHRPVQEKFVCLNCEFETHADEQAALNIARSWLFLRSQEYKKYQTNKTTGNTDKRAFVETWQSFYRKKLKEVWKPAV

SEQ ID NO: 36833 - protein, 980 aa, synthetic construct
  REGION 1..980: note = engineered CasX variant
QEIKRINKIRRRLVKDSNTKKAGKTGPMKTLLVRVMTPDLRERLENLRKKPENIPQPISNTSRANLNKLLTDYTEMKKAILHVYWEEFQKDPVGLMSRVAQPASKKIDQNKLKPEMDEKGNLTTAGFACSQCGQPLFVYKLEQVSEKGKAYTNYFGRCNVAEHEKLILLAQLKPEKDSDEAVTYSLGKFGQRALDFYSIHVTKESTHPVKPLAQIAGNRYASYPVGKALSDACMGTIASFLSKYQDIIIEHQKVVKGNQKRLESLRELAGKENLEYPSVTLPPQPHTKEGVDAYNEVIARVRMWVNLNLWQKLKLSRDDAKPLLRLKGFPSFPLVERQANAEVDWWDMVCNVKKLINEKKEDGKVFWQNLAGYKRQEALRPYLSSEEDRKKGKKFARYQLGDLLLHLEKKHGEDWGKVYDEAWERIDKKVEGLSKHIKLEEERRSEDAQSKAALTDWLRAKASFVIEGLKEADKDEFCRCELKLQKWYGDLRGKPFAIEAENSILDISGFSKQYNCAFIWQKDGVKKLNLYLIINYFKGGKLRFKKIKPEAFEANRFYTVINKKSGEIVPMEVNFNFDDPNLIILPLAFGKRQGREFIWNDLLSLETGSLKLANGRVIEKTLYNRRTRQDEPALFVALTFERREVLDSSNIKPMNLIGVDRGENIPAVIALTDPEGCPLSRFKDSLGNPTHILRIGESYKEKQRTIQAKKEVEQRRAGGYSRKYASKAKNLADDMVRNTARDLLYYAVTQDAMLIFENLSRGFGRQGKRTFMAERQYTRMEDWLTAKLAYEGLPSKTYLSKTLAQYTSKTCSNCGFTITSADYDRVLEKLKKTATGWMTTINGKELKVEGQITYYNRYKRQNVVKDLSVELDRLSEESVNNDISSWTKGRSGEALSLLKKRFSHRPVQEKFVCLNCGFETHADEQAALNIARSWLFLRSQEYKKYQTNKTSTGNTDKRAFVETWQSFYRKKLKEVWKPAV

SEQ ID NO: 36834 - protein, 980 aa, synthetic construct
  REGION 1..980: note = engineered CasX variant
QEIKRINKIRRRLVKDSNTKKAGKTGPMKTLLVRVMTPDLRERLENLRKKPENIPQPISNTSRANLNKLLTDYTEMKKAILHVYWEEFQKDPVGLMSRVAQPASKKIDQNKLKPEMDEKGNLTTAGFACSQCGQPLFVYKLEQVSEKGKAYTNYFGRCNVAEHEKLILLAQLKPEKDSDEAVTYSLGKFGQRALDFYSIHVTKESTHPVKPLAQIAGNRYASHPVGKALSDACMGTIASFLSKYQDIIIEHQKVVKGNQKRLESLRELAGKENLEYPSVTLPPQPHTKEGVDAYNEVIARVRMWVNLNLWQKLKLSRDDAKPLLRLKGFPSFPLVERQANAEVDWWDMVCNVKKLINEKKEDGKVFWQNLAGYKRQEALRPYLSSEEDRKKGKKFARYQLGDLLLHLEKKHGEDWGKVYDEAWERIDKKVEGLSKHIKLEEERRSEDAQSKAALTDWLRAKASFVIEGLKEADKDEFCRCELKLQKWYGDLRGKPFAIEAENSILDISGFSKQYNCAFIWQKDGVKKLNLYLIINYFKGGKLRFKKIKPEAFEANRFYTVINKKSGEIVPMEVNFNFDDPNLIILPLAFGKRQGREFIWNDLLSLETGSLKLANGRVIEKTLYNRRTRQDEPALFVALTFERREVLDSSNIKPMNLIGVDRGENIPAVIALTDPEGCPLSRFKDSLGNPTHILRIGESYKEKQRTIQAKKEVEQRRAGGYSRKYASKAKNLADDMVRNTARDLLYYAVTQDAMLIFENLSRGFGRQGKRTFMAERQYTRMEDWLTAKLAYEGLPSKTYLSKTLAQYTSKTCSNCGFTITSADYDRVLEKLKKTATGWMTTINGKELKVEGQITYYNRYKRQNVVKDLSVELDRLSEESVNNDISSWTKGRSGEALSLLKKRFSHRPVQEKFVCLNCGFETHADEQAALNIARSWLFLRSQEYKKYQTNKTSTGNTDKRAFVETWQSFYRKKLKEVWKPAV

SEQ ID NO: 36835 - protein, 980 aa, synthetic construct
  REGION 1..980: note = engineered CasX variant
QEIKRINKIRRRLVKDSNTKKAGKTGPMKTLLVRVMTPDLRERLENLRKKPENIPQPISNTSRANLNKLLTDYTEMKKAILHVYWEEFQKDPVGLMSRVAQPASKKIDQNKLKPEMDEKGNLTTAGFACSQCGQPLFVYKLEQVSEKGKAYTNYFGRCNVAEHEKLILLAQLKPEKDSDEAVTYSLGKFGQRALDFYSIHVTKESTHPVKPLAQIAGNRYASSPVGKALSDACMGTIASFLSKYQDIIIEHQKVVKGNQKRLESLRELAGKENLEYPSVTLPPQPHTKEGVDAYNEVIARVRMWVNLNLWQKLKLSRDDAKPLLRLKGFPSFPLVERQANAEVDWWDMVCNVKKLINEKKEDGKVFWQNLAGYKRQEALRPYLSSEEDRKKGKKFARYQLGDLLLHLEKKHGEDWGKVYDEAWERIDKKVEGLSKHIKLEEERRSEDAQSKAALTDWLRAKASFVIEGLKEADKDEFCRCELKLQKWYGDLRGKPFAIEAENSILDISGFSKQYNCAFIWQKDGVKKLNLYLIINYFKGGKLRFKKIKPEAFEANRFYTVINKKSGEIVPMEVNFNFDDPNLIILPLAFGKRQGREFIWNDLLSLETGSLKLANGRVIEKTLYNRRTRQDEPALFVALTFERREVLDSSNIKPMNLIGVDRGENIPAVIALTDPEGCPLSRFKDSLGNPTHILRIGESYKEKQRTIQAKKEVEQRRAGGYSRKYASKAKNLADDMVRNTARDLLYYAVTQDAMLIFENLSRGFGRQGKRTFMAERQYTRMEDWLTAKLAYEGLPSKTYLSKTLAQYTSKTCSNCGFTITSADYDRVLEKLKKTATGWMTTINGKELKVEGQITYYNRYKRQNVVKDLSVELDRLSEESVNNDISSWTKGRSGEALSLLKKRFSHRPVQEKFVCLNCGFETHADEQAALNIARSWLFLRSQEYKKYQTNKTSTGNTDKRAFVETWQSFYRKKLKEVWKPAV

SEQ ID NO: 36836 - protein, 980 aa, synthetic construct
  REGION 1..980: note = engineered CasX variant
QEIKRINKIRRRLVKDSNTKKAGKTGPMKTLLVRVMTPDLRERLENLRKKPENIPQPISNTSRANLNKLLTDYTEMKKAILHVYWEEFQKDPVGLMSRVAQPASKKIDQNKLKPEMDEKGNLTTAGFACSQCGQPLFVYKLEQVSEKGKAYTNYFGRCNVAEHEKLILLAQLKPEKDSDEAVTYSLGKFGQRALDFYSIHVTKESTHPVKPLAQIAGNRYASTPVGKALSDACMGTIASFLSKYQDIIIEHQKVVKGNQKRLESLRELAGKENLEYPSVTLPPQPHTKEGVDAYNEVIARVRMWVNLNLWQKLKLSRDDAKPLLRLKGFPSFPLVERQANAEVDWWDMVCNVKKLINEKKEDGKVFWQNLAGYKRQEALRPYLSSEEDRKKGKKFARYQLGDLLLHLEKKHGEDWGKVYDEAWERIDKKVEGLSKHIKLEEERRSEDAQSKAALTDWLRAKASFVIEGLKEADKDEFCRCELKLQKWYGDLRGKPFAIEAENSILDISGFSKQYNCAFIWQKDGVKKLNLYLIINYFKGGKLRFKKIKPEAFEANRFYTVINKKSGEIVPMEVNFNFDDPNLIILPLAFGKRQGREFIWNDLLSLETGSLKLANGRVIEKTLYNRRTRQDEPALFVALTFERREVLDSSNIKPMNLIGVDRGENIPAVIALTDPEGCPLSRFKDSLGNPTHILRIGESYKEKQRTIQAKKEVEQRRAGGYSRKYASKAKNLADDMVRNTARDLLYYAVTQDAMLIFENLSRGFGRQGKRTFMAERQYTRMEDWLTAKLAYEGLPSKTYLSKTLAQYTSKTCSNCGFTITSADYDRVLEKLKKTATGWMTTINGKELKVEGQITYYNRYKRQNVVKDLSVELDRLSEESVNNDISSWTKGRSGEALSLLKKRFSHRPVQEKFVCLNCGFETHADEQAALNIARSWLFLRSQEYKKYQTNKTSTGNTDKRAFVETWQSFYRKKLKEVWKPAV

SEQ ID NO: 36837 - protein, 980 aa, synthetic construct
  REGION 1..980: note = engineered CasX variant
QEIKRINKIRRRLVKDSNTKKAGKTGPMKTLLVRVMTPDLRERLENLRKKPENIPQPISNTSRANLNKLLTDYTEMKKAILHVYWEEFQKDPVGLMSRVAQPASKKIDQNKLKPEMDEKGNLTTAGFACSQCGQPLFVYKLEQVSEKGKAYTNYFGRCNVAEHEKLILLAQLKPEKDSDEAVTYSLGKFGQRALDFYSIHVTKESTHPVKPLAQIAGNRYASAPVGKALSDACMGTIASFLSKYQDIIIEHQKVVKGNQKRLESLRELAGKENLEYPSVTLPPQPHTKEGVDAYNEVIARVRMWVNLNLWQKLKLSRDDAKPLLRLKGFPSFPLVERQANAEVDWWDMVCNVKKLINEKKEDGKVFWQNLAGYKRQEALRPYLSSEEDRKKGKKFARYQLGDLLLHLEKKHGEDWGKVYDEAWERIDKKVEGLSKHIKLEEERRSEDAQSKAALTDWLRAKASFVIEGLKEADKDEFCRCELKLQKWYGDLRGKPFAIEAENSILDISGFSKQYNCAFIWQKDGVKKLNLYLIINYFKGGKLRFKKIKPEAFEANRFYTVINKKSGEIVPMEVNFNFDDPNLIILPLAFGKRQGREFIWNDLLSLETGSLKLANGRVIEKTLYNRRTRQDEPALFVALTFERREVLDSSNIKPMNLIGVDRGENIPAVIALTDPEGCPLSRFKDSLGNPTHILRIGESYKEKQRTIQAKKEVEQRRAGGYSRKYASKAKNLADDMVRNTARDLLYYAVTQDAMLIFENLSRGFGRQGKRTFMAERQYTRMEDWLTAKLAYEGLPSKTYLSKTLAQYTSKTCSNCGFTITSADYDRVLEKLKKTATGWMTTINGKELKVEGQITYYNRYKRQNVVKDLSVELDRLSEESVNNDISSWTKGRSGEALSLLKKRFSHRPVQEKFVCLNCGFETHADEQAALNIARSWLFLRSQEYKKYQTNKTSTGNTDKRAFVETWQSFYRKKLKEVWKPAV

SEQ ID NO: 36838 - protein, 980 aa, synthetic construct
  REGION 1..980: note = engineered CasX variant
QEIKRINKIRRRLVKDSNTKKAGKTGPMKTLLVRVMTPDLRERLENLRKKPENIPQPISNTSRANLNKLLTDYTEMKKAILHVYWEEFQKDPVGLMSRVAQPASKKIDQNKLKPEMDEKGNLTTAGFACSQCGQPLFVYKLEQVSEKGKAYTNYFGRCNVAEHEKLILLAQLKPEKDSDEAVTYSLGKFGQRALDFYSIHVTKESTHPVKPLAQIAGNRYASVPVGKALSDACMGTIASFLSKYQDIIIEHQKVVKGNQKRLESLRELAGKENLEYPSVTLPPQPHTKEGVDAYNEVIARVRMWVNLNLWQKLKLSRDDAKPLLRLKGFPSFPLVERQANAEVDWWDMVCNVKKLINEKKEDGKVFWQNLAGYKRQEALRPYLSSEEDRKKGKKFARYQLGDLLLHLEKKHGEDWGKVYDEAWERIDKKVEGLSKHIKLEEERRSEDAQSKAALTDWLRAKASFVIEGLKEADKDEFCRCELKLQKWYGDLRGKPFAIEAENSILDISGFSKQYNCAFIWQKDGVKKLNLYLIINYFKGGKLRFKKIKPEAFEANRFYTVINKKSGEIVPMEVNFNFDDPNLIILPLAFGKRQGREFIWNDLLSLETGSLKLANGRVIEKTLYNRRTRQDEPALFVALTFERREVLDSSNIKPMNLIGVDRGENIPAVIALTDPEGCPLSRFKDSLGNPTHILRIGESYKEKQRTIQAKKEVEQRRAGGYSRKYASKAKNLADDMVRNTARDLLYYAVTQDAMLIFENLSRGFGRQGKRTFMAERQYTRMEDWLTAKLAYEGLPSKTYLSKTLAQYTSKTCSNCGFTITSADYDRVLEKLKKTATGWMTTINGKELKVEGQITYYNRYKRQNVVKDLSVELDRLSEESVNNDISSWTKGRSGEALSLLKKRFSHRPVQEKFVCLNCGFETHADEQAALNIARSWLFLRSQEYKKYQTNKTSTGNTDKRAFVETWQSFYRKKLKEVWKPAV

SEQ ID NO: 36839 - protein, 980 aa, synthetic construct
  REGION 1..980: note = engineered CasX variant
QEIKRINKIRRRLVKDSNTKKAGKTGPMKTLLVRVMTPDLRERLENLRKKPENIPQPISNTSRANLNKLLTDYTEMKKAILHVYWEEFQKDPVGLMSRVAQPASKKIDQNKLKPEMDEKGNLTTAGFACSQCGQPLFVYKLEQVSEKGKAYTNYFGRCNVAEHEKLIKLAQLKPEKDSDEAVTYSLGKFGQRALDFYSIHVTKESTHPVKPLAQIAGNRYASGPVGKALSDACMGTIASFLSKYQDIIIEHQKVVKGNQKRLESLRELAGKENLEYPSVTLPPQPHTKEGVDAYNEVIARVRMWVNLNLWQKLKLSRDDAKPLLRLKGFPSFPLVERQANAEVDWWDMVCNVKKLINEKKEDGKVFWQNLAGYKRQEALRPYLSSEEDRKKGKKFARYQLGDLLLHLEKKHGEDWGKVYDEAWERIDKKVEGLSKHIKLEEERRSEDAQSKAALTDWLRAKASFVIEGLKEADKDEFCRCELKLQKWYGDLRGKPFAIEAENSILDISGFSKQYNCAFIWQKDGVKKLNLYLIINYFKGGKLRFKKIKPEAFEANRFYTVINKKSGEIVPMEVNFNFDDPNLIILPLAFGKRQGREFIWNDLLSLETGSLKLANGRVIEKTLYNRRTRQDEPALFVALTFERREVLDSSNIKPMNLIGVDRGENIPAVIALTDPEGCPLSRFKDSLGNPTHILRIGESYKEKQRTIQAKKEVEQRRAGGYSRKYASKAKNLADDMVRNTARDLLYYAVTQDAMLIFENLSRGFGRQGKRTFMAERQYTRMEDWLTAKLAYEGLPSKTYLSKTLAQYTSKTCSNCGFTITSADYDRVLEKLKKTATGWMTTINGKELKVEGQITYYNRYKRQNVVKDLSVELDRLSEESVNNDISSWTKGRSGEALSLLKKRFSHRPVQEKFVCLNCGFETHADEQAALNIARSWLFLRSQEYKKYQTNKTSTGNTDKRAFVETWQSFYRKKLKEVWKPAV

SEQ ID NO: 36840 - protein, 979 aa, synthetic construct
  REGION 1..979: note = engineered CasX variant
QEIKRINKIRRRLVKDSNTKKAGKTGPMKTLLVRVMTPDLRERLENLRKKPENIPQPISNTSRANLNKLLTDYTEMKKAILHVYWEEFQKDPVGLMSRVAQPASKKIDQNKLKPEMDEKGNLTTAGFACSQCGQPLFVYKLEQVSEKGKAYTNYFGRCNVAEHEKLILLAQLKPEKDSDEAVTYSLGKFGQRALDFYSIHVTKESTHPVKPLAQIAGNRYASPVGKALSDACMGTIASFLSKYQDIIIEHQKVVKGNQKRLESLRELAGKENLEYPSVTLPPQPHTKEGVDAYNEVIARVRMWVNLNLWQKLKLSRDDAKPLLRLKGFPSFPLVERQANAEVDWWDMVCNVKKLINEKKEDGKVFWQNLAGYKRQEALRPYLSSEEDRKKGKKFARYQLGDLLLHLEKKHGEDWGKVYDEAWERIDKKVEGLSKHIKLEEERRSEDAQSKAALTDWLRAKASFVIEGLKEADKDEFCRCELKLQKWYGDLRGKPFAIEAENSILDISGFSKQYNCAFIWQKDGVKKLNLYLIINYFKGGKLRFKKIKPEAFEANRFYTVINKKSGEIVPMEVNFNFDDPNLIILPLAFGKRQGREFIWNDLLSLETGSLKLANGRVIEKTLYNRRTRQDEPALFVALTFERREVLDSSNIKPMNLIGVDRGENIPAVIALTDPEGCPLSRFKDSLGNPTHILRIGESYKEKQRTIQAKKEVEQRRAGGYSRKYASKAKNLADDMVRNTARDLLYYAVTQDAMLIFENLSRGFGRQGKRTFMAERQYTRMEDWLTAKLAYEGLPSKTYLSKTLAQYTSKTCSNCGFTITSADYDRVLEKLKKTATGWMTTINGKELKVEGQITYYNRYKRQNVVKDLSVELDRLSEESVNNDISSWTKGRSGEALSLLKKRFSHRPVQEKFVCLNCGFETHADEQAALNIARSWLFLRSQEYKKYQTNKTSTGNTDKRAFVETWQSFYRKKLKEVWKPAV

SEQ ID NO: 36841 - protein, 980 aa, synthetic construct
  REGION 1..980: note = engineered CasX variant
QEIKRINKIRRRLVKDSNTKKAGKTGPMKTLLVRVMTPDLRERLENLRKKPENIPQPISNTSRANLNKLLTDYTEMKKAILHVYWEEFQKDPVGLMSRVAQPASKKIDQNKLKPEMDEKGNLTTAGFACSQCGQPLFVYKLEQVSEKGKAYTNYFGRCNVAEHEKLILLAQLKPEKDSDEAVTYSLGKFGQRALDFYSIHVTKESTHPVKPLAQIAGNRYASYPVGKALSDACMGTIASFLSKYQDIIIEHQKVVKGNQKRLESLRELAGKENLEYPSVTLPPQPHTKEGVDAYNEVIARVRMWVNLNLWQKLKLSRDDAKPLLRLKGFPSFPLVERQANAEVDWWDMVCNVKKLINEKKEDGKVFWQNLAGYKRQEALRPYLSSEEDRKKGKKFARYQLGDLLLHLEKKHGEDWGKVYDEAWERIDKKVEGLSKHIKLEEERRSEDAQSKAALTDWLRAKASFVIEGLKEADKDEFCRCELKLQKWYGDLRGKPFAIEAENSILDISGFSKQYNCAFIWQKDGVKKLNLYLIINYFKGGKLRFKKIKPEAFEANRFYTVINKKSGEIVPMEVNFNFDDPNLIILPLAFGKRQGREFIWNDLLSLETGSLKLANGRVIEKTLYNRRTRQDEPALFVALTFERREVLDSSNIKPMNLIGVDRGENIPAVIALTDPEGCPLSRFKDSLGNPTHILRIGESYKEKQRTIQAKKEVEQRRAGGYSRKYASKAKNLADDMVRNTARDLLYYAVTQDAMLIFENLSRGFGRQGKRTFMAERQYTRMEDWLTAKLAYEGLPSKTYLSKTLAQYTSKTCSNCGFTITSADYDRVLEKLKKTATGWMTTINGKELKVEGQITYYNRYKRQNVVKDLSVELDRLSEESVNNDISSWTKGRSGEALSLLKKRFSHRPVQEKFVCLNCGFETHADEQAALNIARSWLFLRSQEYKKYQTNKTTGKNTDKRAFVETWQSFYRKKLKEVWKPAV

SEQ ID NO: 36842 - protein, 980 aa, synthetic construct
  REGION 1..980: note = engineered CasX variant
QEIKRINKIRRRLVKDSNTKKAGKTGPMKTLLVRVMTPDLRERLENLRKKPENIPQPISNTSRANLNKLLTDYTEMKKAILHVYWEEFQKDPVGLMSRVAQPASKKIDQNKLKPEMDEKGNLTTAGFACSQCGQPLFVYKLEQVSEKGKAYTNYFGRCNVAEHEKLILLAQLKPEKDSDEAVTYSLGKFGQRALDFYSIHVTKESTHPVKPLAQIAGNRYASHPVGKALSDACMGTIASFLSKYQDIIIEHQKVVKGNQKRLESLRELAGKENLEYPSVTLPPQPHTKEGVDAYNEVIARVRMWVNLNLWQKLKLSRDDAKPLLRLKGFPSFPLVERQANAEVDWWDMVCNVKKLINEKKEDGKVFWQNLAGYKRQEALRPYLSSEEDRKKGKKFARYQLGDLLLHLEKKHGEDWGKVYDEAWERIDKKVEGLSKHIKLEEERRSEDAQSKAALTDWLRAKASFVIEGLKEADKDEFCRCELKLQKWYGDLRGKPFAIEAENSILDISGFSKQYNCAFIWQKDGVKKLNLYLIINYFKGGKLRFKKIKPEAFEANRFYTVINKKSGEIVPMEVNFNFDDPNLIILPLAFGKRQGREFIWNDLLSLETGSLKLANGRVIEKTLYNRRTRQDEPALFVALTFERREVLDSSNIKPMNLIGVDRGENIPAVIALTDPEGCPLSRFKDSLGNPTHILRIGESYKEKQRTIQAKKEVEQRRAGGYSRKYASKAKNLADDMVRNTARDLLYYAVTQDAMLIFENLSRGFGRQGKRTFMAERQYTRMEDWLTAKLAYEGLPSKTYLSKTLAQYTSKTCSNCGFTITSADYDRVLEKLKKTATGWMTTINGKELKVEGQITYYNRYKRQNVVKDLSVELDRLSEESVNNDISSWTKGRSGEALSLLKKRFSHRPVQEKFVCLNCGFETHADEQAALNIARSWLFLRSQEYKKYQTNKTTGKNTDKRAFVETWQSFYRKKLKEVWKPAV

SEQ ID NO: 36843 - protein, 980 aa, synthetic construct
  REGION 1..980: note = engineered CasX variant
QEIKRINKIRRRLVKDSNTKKAGKTGPMKTLLVRVMTPDLRERLENLRKKPENIPQPISNTSRANLNKLLTDYTEMKKAILHVYWEEFQKDPVGLMSRVAQPASKKIDQNKLKPEMDEKGNLTTAGFACSQCGQPLFVYKLEQVSEKGKAYTNYFGRCNVAEHEKLILLAQLKPEKDSDEAVTYSLGKFGQRALDFYSIHVTKESTHPVKPLAQIAGNRYASSPVGKALSDACMGTIASFLSKYQDIIIEHQKVVKGNQKRLESLRELAGKENLEYPSVTLPPQPHTKEGVDAYNEVIARVRMWVNLNLWQKLKLSRDDAKPLLRLKGFPSFPLVERQANAEVDWWDMVCNVKKLINEKKEDGKVFWQNLAGYKRQEALRPYLSSEEDRKKGKKFARYQLGDLLLHLEKKHGEDWGKVYDEAWERIDKKVEGLSKHIKLEEERRSEDAQSKAALTDWLRAKASFVIEGLKEADKDEFCRCELKLQKWYGDLRGKPFAIEAENSILDISGFSKQYNCAFIWQKDGVKKLNLYLIINYFKGGKLRFKKIKPEAFEANRFYTVINKKSGEIVPMEVNFNFDDPNLIILPLAFGKRQGREFIWNDLLSLETGSLKLANGRVIEKTLYNRRTRQDEPALFVALTFERREVLDSSNIKPMNLIGVDRGENIPAVIALTDPEGCPLSRFKDSLGNPTHILRIGESYKEKQRTIQAKKEVEQRRAGGYSRKYASKAKNLADDMVRNTARDLLYYAVTQDAMLIFENLSRGFGRQGKRTFMAERQYTRMEDWLTAKLAYEGLPSKTYLSKTLAQYTSKTCSNCGFTITSADYDRVLEKLKKTATGWMTTINGKELKVEGQITYYNRYKRQNVVKDLSVELDRLSEESVNNDISSWTKGRSGEALSLLKKRFSHRPVQEKFVCLNCGFETHADEQAALNIARSWLFLRSQEYKKYQTNKTTGKNTDKRAFVETWQSFYRKKLKEVWKPAV

SEQ ID NO: 36844 - protein, 980 aa, synthetic construct
  REGION 1..980: note = engineered CasX variant
QEIKRINKIRRRLVKDSNTKKAGKTGPMKTLLVRVMTPDLRERLENLRKKPENIPQPISNTSRANLNKLLTDYTEMKKAILHVYWEEFQKDPVGLMSRVAQPASKKIDQNKLKPEMDEKGNLTTAGFACSQCGQPLFVYKLEQVSEKGKAYTNYFGRCNVAEHEKLILLAQLKPEKDSDEAVTYSLGKFGQRALDFYSIHVTKESTHPVKPLAQIAGNRYASTPVGKALSDACMGTIASFLSKYQDIIIEHQKVVKGNQKRLESLRELAGKENLEYPSVTLPPQPHTKEGVDAYNEVIARVRMWVNLNLWQKLKLSRDDAKPLLRLKGFPSFPLVERQANAEVDWWDMVCNVKKLINEKKEDGKVFWQNLAGYKRQEALRPYLSSEEDRKKGKKFARYQLGDLLLHLEKKHGEDWGKVYDEAWERIDKKVEGLSKHIKLEEERRSEDAQSKAALTDWLRAKASFVIEGLKEADKDEFCRCELKLQKWYGDLRGKPFAIEAENSILDISGFSKQYNCAFIWQKDGVKKLNLYLIINYFKGGKLRFKKIKPEAFEANRFYTVINKKSGEIVPMEVNFNFDDPNLIILPLAFGKRQGREFIWNDLLSLETGSLKLANGRVIEKTLYNRRTRQDEPALFVALTFERREVLDSSNIKPMNLIGVDRGENIPAVIALTDPEGCPLSRFKDSLGNPTHILRIGESYKEKQRTIQAKKEVEQRRAGGYSRKYASKAKNLADDMVRNTARDLLYYAVTQDAMLIFENLSRGFGRQGKRTFMAERQYTRMEDWLTAKLAYEGLPSKTYLSKTLAQYTSKTCSNCGFTITSADYDRVLEKLKKTATGWMTTINGKELKVEGQITYYNRYKRQNVVKDLSVELDRLSEESVNNDISSWTKGRSGEALSLLKKRFSHRPVQEKFVCLNCGFETHADEQAALNIARSWLFLRSQEYKKYQTNKTTGKNTDKRAFVETWQSFYRKKLKEVWKPAV

SEQ ID NO: 36845 - protein, 980 aa, synthetic construct
  REGION 1..980: note = engineered CasX variant
QEIKRINKIRRRLVKDSNTKKAGKTGPMKTLLVRVMTPDLRERLENLRKKPENIPQPISNTSRANLNKLLTDYTEMKKAILHVYWEEFQKDPVGLMSRVAQPASKKIDQNKLKPEMDEKGNLTTAGFACSQCGQPLFVYKLEQVSEKGKAYTNYFGRCNVAEHEKLILLAQLKPEKDSDEAVTYSLGKFGQRALDFYSIHVTKESTHPVKPLAQIAGNRYASAPVGKALSDACMGTIASFLSKYQDIIIEHQKVVKGNQKRLESLRELAGKENLEYPSVTLPPQPHTKEGVDAYNEVIARVRMWVNLNLWQKLKLSRDDAKPLLRLKGFPSFPLVERQANAEVDWWDMVCNVKKLINEKKEDGKVFWQNLAGYKRQEALRPYLSSEEDRKKGKKFARYQLGDLLLHLEKKHGEDWGKVYDEAWERIDKKVEGLSKHIKLEEERRSEDAQSKAALTDWLRAKASFVIEGLKEADKDEFCRCELKLQKWYGDLRGKPFAIEAENSILDISGFSKQYNCAFIWQKDGVKKLNLYLIINYFKGGKLRFKKIKPEAFEANRFYTVINKKSGEIVPMEVNFNFDDPNLIILPLAFGKRQGREFIWNDLLSLETGSLKLANGRVIEKTLYNRRTRQDEPALFVALTFERREVLDSSNIKPMNLIGVDRGENIPAVIALTDPEGCPLSRFKDSLGNPTHILRIGESYKEKQRTIQAKKEVEQRRAGGYSRKYASKAKNLADDMVRNTARDLLYYAVTQDAMLIFENLSRGFGRQGKRTFMAERQYTRMEDWLTAKLAYEGLPSKTYLSKTLAQYTSKTCSNCGFTITSADYDRVLEKLKKTATGWMTTINGKELKVEGQITYYNRYKRQNVVKDLSVELDRLSEESVNNDISSWTKGRSGEALSLLKKRFSHRPVQEKFVCLNCGFETHADEQAALNIARSWLFLRSQEYKKYQTNKTTGKNTDKRAFVETWQSFYRKKLKEVWKPAV

SEQ ID NO: 36846 - protein, 980 aa, synthetic construct
  REGION 1..980: note = engineered CasX variant
QEIKRINKIRRRLVKDSNTKKAGKTGPMKTLLVRVMTPDLRERLENLRKKPENIPQPISNTSRANLNKLLTDYTEMKKAILHVYWEEFQKDPVGLMSRVAQPASKKIDQNKLKPEMDEKGNLTTAGFACSQCGQPLFVYKLEQVSEKGKAYTNYFGRCNVAEHEKLILLAQLKPEKDSDEAVTYSLGKFGQRALDFYSIHVTKESTHPVKPLAQIAGNRYASVPVGKALSDACMGTIASFLSKYQDIIIEHQKVVKGNQKRLESLRELAGKENLEYPSVTLPPQPHTKEGVDAYNEVIARVRMWVNLNLWQKLKLSRDDAKPLLRLKGFPSFPLVERQANAEVDWWDMVCNVKKLINEKKEDGKVFWQNLAGYKRQEALRPYLSSEEDRKKGKKFARYQLGDLLLHLEKKHGEDWGKVYDEAWERIDKKVEGLSKHIKLEEERRSEDAQSKAALTDWLRAKASFVIEGLKEADKDEFCRCELKLQKWYGDLRGKPFAIEAENSILDISGFSKQYNCAFIWQKDGVKKLNLYLIINYFKGGKLRFKKIKPEAFEANRFYTVINKKSGEIVPMEVNFNFDDPNLIILPLAFGKRQGREFIWNDLLSLETGSLKLANGRVIEKTLYNRRTRQDEPALFVALTFERREVLDSSNIKPMNLIGVDRGENIPAVIALTDPEGCPLSRFKDSLGNPTHILRIGESYKEKQRTIQAKKEVEQRRAGGYSRKYASKAKNLADDMVRNTARDLLYYAVTQDAMLIFENLSRGFGRQGKRTFMAERQYTRMEDWLTAKLAYEGLPSKTYLSKTLAQYTSKTCSNCGFTITSADYDRVLEKLKKTATGWMTTINGKELKVEGQITYYNRYKRQNVVKDLSVELDRLSEESVNNDISSWTKGRSGEALSLLKKRFSHRPVQEKFVCLNCGFETHADEQAALNIARSWLFLRSQEYKKYQTNKTTGKNTDKRAFVETWQSFYRKKLKEVWKPAV

SEQ ID NO: 36847 - protein, 980 aa, synthetic construct
  REGION 1..980: note = engineered CasX variant
QEIKRINKIRRRLVKDSNTKKAGKTGPMKTLLVRVMTPDLRERLENLRKKPENIPQPISNTSRANLNKLLTDYTEMKKAILHVYWEEFQKDPVGLMSRVAQPASKKIDQNKLKPEMDEKGNLTTAGFACSQCGQPLFVYKLEQVSEKGKAYTNYFGRCNVAEHEKLIKLAQLKPEKDSDEAVTYSLGKFGQRALDFYSIHVTKESTHPVKPLAQIAGNRYASGPVGKALSDACMGTIASFLSKYQDIIIEHQKVVKGNQKRLESLRELAGKENLEYPSVTLPPQPHTKEGVDAYNEVIARVRMWVNLNLWQKLKLSRDDAKPLLRLKGFPSFPLVERQANAEVDWWDMVCNVKKLINEKKEDGKVFWQNLAGYKRQEALRPYLSSEEDRKKGKKFARYQLGDLLLHLEKKHGEDWGKVYDEAWERIDKKVEGLSKHIKLEEERRSEDAQSKAALTDWLRAKASFVIEGLKEADKDEFCRCELKLQKWYGDLRGKPFAIEAENSILDISGFSKQYNCAFIWQKDGVKKLNLYLIINYFKGGKLRFKKIKPEAFEANRFYTVINKKSGEIVPMEVNFNFDDPNLIILPLAFGKRQGREFIWNDLLSLETGSLKLANGRVIEKTLYNRRTRQDEPALFVALTFERREVLDSSNIKPMNLIGVDRGENIPAVIALTDPEGCPLSRFKDSLGNPTHILRIGESYKEKQRTIQAKKEVEQRRAGGYSRKYASKAKNLADDMVRNTARDLLYYAVTQDAMLIFENLSRGFGRQGKRTFMAERQYTRMEDWLTAKLAYEGLPSKTYLSKTLAQYTSKTCSNCGFTITSADYDRVLEKLKKTATGWMTTINGKELKVEGQITYYNRYKRQNVVKDLSVELDRLSEESVNNDISSWTKGRSGEALSLLKKRFSHRPVQEKFVCLNCGFETHADEQAALNIARSWLFLRSQEYKKYQTNKTTGKNTDKRAFVETWQSFYRKKLKEVWKPAV

SEQ ID NO: 36848 - protein, 979 aa, synthetic construct
  REGION 1..979: note = engineered CasX variant
QEIKRINKIRRRLVKDSNTKKAGKTGPMKTLLVRVMTPDLRERLENLRKKPENIPQPISNTSRANLNKLLTDYTEMKKAILHVYWEEFQKDPVGLMSRVAQPASKKIDQNKLKPEMDEKGNLTTAGFACSQCGQPLFVYKLEQVSEKGKAYTNYFGRCNVAEHEKLILLAQLKPEKDSDEAVTYSLGKFGQRALDFYSIHVTKESTHPVKPLAQIAGNRYASPVGKALSDACMGTIASFLSKYQDIIIEHQKVVKGNQKRLESLRELAGKENLEYPSVTLPPQPHTKEGVDAYNEVIARVRMWVNLNLWQKLKLSRDDAKPLLRLKGFPSFPLVERQANAEVDWWDMVCNVKKLINEKKEDGKVFWQNLAGYKRQEALRPYLSSEEDRKKGKKFARYQLGDLLLHLEKKHGEDWGKVYDEAWERIDKKVEGLSKHIKLEEERRSEDAQSKAALTDWLRAKASFVIEGLKEADKDEFCRCELKLQKWYGDLRGKPFAIEAENSILDISGFSKQYNCAFIWQKDGVKKLNLYLIINYFKGGKLRFKKIKPEAFEANRFYTVINKKSGEIVPMEVNFNFDDPNLIILPLAFGKRQGREFIWNDLLSLETGSLKLANGRVIEKTLYNRRTRQDEPALFVALTFERREVLDSSNIKPMNLIGVDRGENIPAVIALTDPEGCPLSRFKDSLGNPTHILRIGESYKEKQRTIQAKKEVEQRRAGGYSRKYASKAKNLADDMVRNTARDLLYYAVTQDAMLIFENLSRGFGRQGKRTFMAERQYTRMEDWLTAKLAYEGLPSKTYLSKTLAQYTSKTCSNCGFTITSADYDRVLEKLKKTATGWMTTINGKELKVEGQITYYNRYKRQNVVKDLSVELDRLSEESVNNDISSWTKGRSGEALSLLKKRFSHRPVQEKFVCLNCGFETHADEQAALNIARSWLFLRSQEYKKYQTNKTTGKNTDKRAFVETWQSFYRKKLKEVWKPAV

SEQ ID NO: 36849 - protein, 979 aa, synthetic construct
  REGION 1..979: note = engineered CasX variant
QEIKRINKIRRRLVKDSNTKKAGKTGPMKTLLVRVMTPDLRERLENLRKKPENIPQPISNTSRANLNKLLTDYTEMKKAILHVYWEEFQKDPVGLMSRVAQPASKKIDQNKLKPEMDEKGNLTTAGFACSQCGQPLFVYKLEQVSEKGKAYTNYFGRCNVAEHEKLILLAQLKPEKDSDEAVTYSLGKFGQRALDFYSIHVTKESTHPVKPLAQIAGNRYASYPVGKALSDACMGTIASFLSKYQDIIIEHQKVVKGNQKRLESLRELAGKENLEYPSVTLPPQPHTKEGVDAYNEVIARVRMWVNLNLWQKLKLSRDDAKPLLRLKKFPSFPLVERQANAEVDWWDMVCNVKKLINEKKEDGKVFWQNLAGYKRQEALRPYLSSEEDRKKGKKFARYQLGDLLLHLEKKHGEDWGKVYDEAWERIDKKVEGLSKHIKLEEERRSEDAQSKAALTDWLRAKASFVIEGLKEADKDEFCRCELKLQKWYGDLRGKPFAIEAENSILDISGFSKQYNCAFIWQKDGVKKLNLYLIINYFKGGKLRFKKIKPEAFEANRFYTVINKKSGEIVPMEVNFNFDDPNLIILPLAFGKRQGREFIWNDLLSLETGSLKLANGRVIEKTLYNRRTRQDEPALFVALTFERREVLDSSNIKPMNLIGVDRGENIPAVIALTDPEGCPLSRFKDSLGNPTHILRIGESYKEKQRTIQAKKEVEQRRAGGYSRKYASKAKNLADDMVRNTARDLLYYAVTQDAMLIFENLSRGFGRQGKRTFMAERQYTRMEDWLTAKLAYEGLPSKTYLSKTLAQYTSKTCSNCGFTITSADYDRVLEKLKKTATGWMTTINGKELKVEGQITYYNRYKRQNVVKDLSVELDRLSEESVNNDISSWTKGRSGEALSLLKKRFSHRPVQEKFVCLNCGFETHADEQAALNIARSWLFLRSQEYKKYQTNKTTGNTDKRAFVETWQSFYRKKLKEVWKPAV

SEQ ID NO: 36850 - protein, 979 aa, synthetic construct
  REGION 1..979: note = engineered CasX variant
QEIKRINKIRRRLVKDSNTKKAGKTGPMKTLLVRVMTPDLRERLENLRKKPENIPQPISNTSRANLNKLLTDYTEMKKAILHVYWEEFQKDPVGLMSRVAQPASKKIDQNKLKPEMDEKGNLTTAGFACSQCGQPLFVYKLEQVSEKGKAYTNYFGRCNVAEHEKLILLAQLKPEKDSDEAVTYSLGKFGQRALDFYSIHVTKESTHPVKPLAQIAGNRYASHPVGKALSDACMGTIASFLSKYQDIIIEHQKVVKGNQKRLESLRELAGKENLEYPSVTLPPQPHTKEGVDAYNEVIARVRMWVNLNLWQKLKLSRDDAKPLLRLKKFPSFPLVERQANAEVDWWDMVCNVKKLINEKKEDGKVFWQNLAGYKRQEALRPYLSSEEDRKKGKKFARYQLGDLLLHLEKKHGEDWGKVYDEAWERIDKKVEGLSKHIKLEEERRSEDAQSKAALTDWLRAKASFVIEGLKEADKDEFCRCELKLQKWYGDLRGKPFAIEAENSILDISGFSKQYNCAFIWQKDGVKKLNLYLIINYFKGGKLRFKKIKPEAFEANRFYTVINKKSGEIVPMEVNFNFDDPNLIILPLAFGKRQGREFIWNDLLSLETGSLKLANGRVIEKTLYNRRTRQDEPALFVALTFERREVLDSSNIKPMNLIGVDRGENIPAVIALTDPEGCPLSRFKDSLGNPTHILRIGESYKEKQRTIQAKKEVEQRRAGGYSRKYASKAKNLADDMVRNTARDLLYYAVTQDAMLIFENLSRGFGRQGKRTFMAERQYTRMEDWLTAKLAYEGLPSKTYLSKTLAQYTSKTCSNCGFTITSADYDRVLEKLKKTATGWMTTINGKELKVEGQITYYNRYKRQNVVKDLSVELDRLSEESVNNDISSWTKGRSGEALSLLKKRFSHRPVQEKFVCLNCGFETHADEQAALNIARSWLFLRSQEYKKYQTNKTTGNTDKRAFVETWQSFYRKKLKEVWKPAV

SEQ ID NO: 36851 - protein, 979 aa, synthetic construct
  REGION 1..979: note = engineered CasX variant
QEIKRINKIRRRLVKDSNTKKAGKTGPMKTLLVRVMTPDLRERLENLRKKPENIPQPISNTSRANLNKLLTDYTEMKKAILHVYWEEFQKDPVGLMSRVAQPASKKIDQNKLKPEMDEKGNLTTAGFACSQCGQPLFVYKLEQVSEKGKAYTNYFGRCNVAEHEKLILLAQLKPEKDSDEAVTYSLGKFGQRALDFYSIHVTKESTHPVKPLAQIAGNRYASSPVGKALSDACMGTIASFLSKYQDIIIEHQKVVKGNQKRLESLRELAGKENLEYPSVTLPPQPHTKEGVDAYNEVIARVRMWVNLNLWQKLKLSRDDAKPLLRLKKFPSFPLVERQANAEVDWWDMVCNVKKLINEKKEDGKVFWQNLAGYKRQEALRPYLSSEEDRKKGKKFARYQLGDLLLHLEKKHGEDWGKVYDEAWERIDKKVEGLSKHIKLEEERRSEDAQSKAALTDWLRAKASFVIEGLKEADKDEFCRCELKLQKWYGDLRGKPFAIEAENSILDISGFSKQYNCAFIWQKDGVKKLNLYLIINYFKGGKLRFKKIKPEAFEANRFYTVINKKSGEIVPMEVNFNFDDPNLIILPLAFGKRQGREFIWNDLLSLETGSLKLANGRVIEKTLYNRRTRQDEPALFVALTFERREVLDSSNIKPMNLIGVDRGENIPAVIALTDPEGCPLSRFKDSLGNPTHILRIGESYKEKQRTIQAKKEVEQRRAGGYSRKYASKAKNLADDMVRNTARDLLYYAVTQDAMLIFENLSRGFGRQGKRTFMAERQYTRMEDWLTAKLAYEGLPSKTYLSKTLAQYTSKTCSNCGFTITSADYDRVLEKLKKTATGWMTTINGKELKVEGQITYYNRYKRQNVVKDLSVELDRLSEESVNNDISSWTKGRSGEALSLLKKRFSHRPVQEKFVCLNCGFETHADEQAALNIARSWLFLRSQEYKKYQTNKTTGNTDKRAFVETWQSFYRKKLKEVWKPAV

SEQ ID NO: 36852 - protein, 979 aa, synthetic construct
  REGION 1..979: note = engineered CasX variant
QEIKRINKIRRRLVKDSNTKKAGKTGPMKTLLVRVMTPDLRERLENLRKKPENIPQPISNTSRANLNKLLTDYTEMKKAILHVYWEEFQKDPVGLMSRVAQPASKKIDQNKLKPEMDEKGNLTTAGFACSQCGQPLFVYKLEQVSEKGKAYTNYFGRCNVAEHEKLILLAQLKPEKDSDEAVTYSLGKFGQRALDFYSIHVTKESTHPVKPLAQIAGNRYASTPVGKALSDACMGTIASFLSKYQDIIIEHQKVVKGNQKRLESLRELAGKENLEYPSVTLPPQPHTKEGVDAYNEVIARVRMWVNLNLWQKLKLSRDDAKPLLRLKKFPSFPLVERQANAEVDWWDMVCNVKKLINEKKEDGKVFWQNLAGYKRQEALRPYLSSEEDRKKGKKFARYQLGDLLLHLEKKHGEDWGKVYDEAWERIDKKVEGLSKHIKLEEERRSEDAQSKAALTDWLRAKASFVIEGLKEADKDEFCRCELKLQKWYGDLRGKPFAIEAENSILDISGFSKQYNCAFIWQKDGVKKLNLYLIINYFKGGKLRFKKIKPEAFEANRFYTVINKKSGEIVPMEVNFNFDDPNLIILPLAFGKRQGREFIWNDLLSLETGSLKLANGRVIEKTLYNRRTRQDEPALFVALTFERREVLDSSNIKPMNLIGVDRGENIPAVIALTDPEGCPLSRFKDSLGNPTHILRIGESYKEKQRTIQAKKEVEQRRAGGYSRKYASKAKNLADDMVRNTARDLLYYAVTQDAMLIFENLSRGFGRQGKRTFMAERQYTRMEDWLTAKLAYEGLPSKTYLSKTLAQYTSKTCSNCGFTITSADYDRVLEKLKKTATGWMTTINGKELKVEGQITYYNRYKRQNVVKDLSVELDRLSEESVNNDISSWTKGRSGEALSLLKKRFSHRPVQEKFVCLNCGFETHADEQAALNIARSWLFLRSQEYKKYQTNKTTGNTDKRAFVETWQSFYRKKLKEVWKPAV

SEQ ID NO: 36853 - protein, 979 aa, synthetic construct
  REGION 1..979: note = engineered CasX variant
QEIKRINKIRRRLVKDSNTKKAGKTGPMKTLLVRVMTPDLRERLENLRKKPENIPQPISNTSRANLNKLLTDYTEMKKAILHVYWEEFQKDPVGLMSRVAQPASKKIDQNKLKPEMDEKGNLTTAGFACSQCGQPLFVYKLEQVSEKGKAYTNYFGRCNVAEHEKLILLAQLKPEKDSDEAVTYSLGKFGQRALDFYSIHVTKESTHPVKPLAQIAGNRYASAPVGKALSDACMGTIASFLSKYQDIIIEHQKVVKGNQKRLESLRELAGKENLEYPSVTLPPQPHTKEGVDAYNEVIARVRMWVNLNLWQKLKLSRDDAKPLLRLKKFPSFPLVERQANAEVDWWDMVCNVKKLINEKKEDGKVFWQNLAGYKRQEALRPYLSSEEDRKKGKKFARYQLGDLLLHLEKKHGEDWGKVYDEAWERIDKKVEGLSKHIKLEEERRSEDAQSKAALTDWLRAKASFVIEGLKEADKDEFCRCELKLQKWYGDLRGKPFAIEAENSILDISGFSKQYNCAFIWQKDGVKKLNLYLIINYFKGGKLRFKKIKPEAFEANRFYTVINKKSGEIVPMEVNFNFDDPNLIILPLAFGKRQGREFIWNDLLSLETGSLKLANGRVIEKTLYNRRTRQDEPALFVALTFERREVLDSSNIKPMNLIGVDRGENIPAVIALTDPEGCPLSRFKDSLGNPTHILRIGESYKEKQRTIQAKKEVEQRRAGGYSRKYASKAKNLADDMVRNTARDLLYYAVTQDAMLIFENLSRGFGRQGKRTFMAERQYTRMEDWLTAKLAYEGLPSKTYLSKTLAQYTSKTCSNCGFTITSADYDRVLEKLKKTATGWMTTINGKELKVEGQITYYNRYKRQNVVKDLSVELDRLSEESVNNDISSWTKGRSGEALSLLKKRFSHRPVQEKFVCLNCGFETHADEQAALNIARSWLFLRSQEYKKYQTNKTTGNTDKRAFVETWQSFYRKKLKEVWKPAV

SEQ ID NO: 36854 - protein, 979 aa, synthetic construct
  REGION 1..979: note = engineered CasX variant
QEIKRINKIRRRLVKDSNTKKAGKTGPMKTLLVRVMTPDLRERLENLRKKPENIPQPISNTSRANLNKLLTDYTEMKKAILHVYWEEFQKDPVGLMSRVAQPASKKIDQNKLKPEMDEKGNLTTAGFACSQCGQPLFVYKLEQVSEKGKAYTNYFGRCNVAEHEKLILLAQLKPEKDSDEAVTYSLGKFGQRALDFYSIHVTKESTHPVKPLAQIAGNRYASVPVGKALSDACMGTIASFLSKYQDIIIEHQKVVKGNQKRLESLRELAGKENLEYPSVTLPPQPHTKEGVDAYNEVIARVRMWVNLNLWQKLKLSRDDAKPLLRLKKFPSFPLVERQANAEVDWWDMVCNVKKLINEKKEDGKVFWQNLAGYKRQEALRPYLSSEEDRKKGKKFARYQLGDLLLHLEKKHGEDWGKVYDEAWERIDKKVEGLSKHIKLEEERRSEDAQSKAALTDWLRAKASFVIEGLKEADKDEFCRCELKLQKWYGDLRGKPFAIEAENSILDISGFSKQYNCAFIWQKDGVKKLNLYLIINYFKGGKLRFKKIKPEAFEANRFYTVINKKSGEIVPMEVNFNFDDPNLIILPLAFGKRQGREFIWNDLLSLETGSLKLANGRVIEKTLYNRRTRQDEPALFVALTFERREVLDSSNIKPMNLIGVDRGENIPAVIALTDPEGCPLSRFKDSLGNPTHILRIGESYKEKQRTIQAKKEVEQRRAGGYSRKYASKAKNLADDMVRNTARDLLYYAVTQDAMLIFENLSRGFGRQGKRTFMAERQYTRMEDWLTAKLAYEGLPSKTYLSKTLAQYTSKTCSNCGFTITSADYDRVLEKLKKTATGWMTTINGKELKVEGQITYYNRYKRQNVVKDLSVELDRLSEESVNNDISSWTKGRSGEALSLLKKRFSHRPVQEKFVCLNCGFETHADEQAALNIARSWLFLRSQEYKKYQTNKTTGNTDKRAFVETWQSFYRKKLKEVWKPAV

SEQ ID NO: 36855 - protein, 979 aa, synthetic construct
  REGION 1..979: note = engineered CasX variant
QEIKRINKIRRRLVKDSNTKKAGKTGPMKTLLVRVMTPDLRERLENLRKKPENIPQPISNTSRANLNKLLTDYTEMKKAILHVYWEEFQKDPVGLMSRVAQPASKKIDQNKLKPEMDEKGNLTTAGFACSQCGQPLFVYKLEQVSEKGKAYTNYFGRCNVAEHEKLIKLAQLKPEKDSDEAVTYSLGKFGQRALDFYSIHVTKESTHPVKPLAQIAGNRYASGPVGKALSDACMGTIASFLSKYQDIIIEHQKVVKGNQKRLESLRELAGKENLEYPSVTLPPQPHTKEGVDAYNEVIARVRMWVNLNLWQKLKLSRDDAKPLLRLKKFPSFPLVERQANAEVDWWDMVCNVKKLINEKKEDGKVFWQNLAGYKRQEALRPYLSSEEDRKKGKKFARYQLGDLLLHLEKKHGEDWGKVYDEAWERIDKKVEGLSKHIKLEEERRSEDAQSKAALTDWLRAKASFVIEGLKEADKDEFCRCELKLQKWYGDLRGKPFAIEAENSILDISGFSKQYNCAFIWQKDGVKKLNLYLIINYFKGGKLRFKKIKPEAFEANRFYTVINKKSGEIVPMEVNFNFDDPNLIILPLAFGKRQGREFIWNDLLSLETGSLKLANGRVIEKTLYNRRTRQDEPALFVALTFERREVLDSSNIKPMNLIGVDRGENIPAVIALTDPEGCPLSRFKDSLGNPTHILRIGESYKEKQRTIQAKKEVEQRRAGGYSRKYASKAKNLADDMVRNTARDLLYYAVTQDAMLIFENLSRGFGRQGKRTFMAERQYTRMEDWLTAKLAYEGLPSKTYLSKTLAQYTSKTCSNCGFTITSADYDRVLEKLKKTATGWMTTINGKELKVEGQITYYNRYKRQNVVKDLSVELDRLSEESVNNDISSWTKGRSGEALSLLKKRFSHRPVQEKFVCLNCGFETHADEQAALNIARSWLFLRSQEYKKYQTNKTTGNTDKRAFVETWQSFYRKKLKEVWKPAV

SEQ ID NO: 36856 - protein, 978 aa, synthetic construct
  REGION 1..978: note = engineered CasX variant
QEIKRINKIRRRLVKDSNTKKAGKTGPMKTLLVRVMTPDLRERLENLRKKPENIPQPISNTSRANLNKLLTDYTEMKKAILHVYWEEFQKDPVGLMSRVAQPASKKIDQNKLKPEMDEKGNLTTAGFACSQCGQPLFVYKLEQVSEKGKAYTNYFGRCNVAEHEKLILLAQLKPEKDSDEAVTYSLGKFGQRALDFYSIHVTKESTHPVKPLAQIAGNRYASPVGKALSDACMGTIASFLSKYQDIIIEHQKVVKGNQKRLESLRELAGKENLEYPSVTLPPQPHTKEGVDAYNEVIARVRMWVNLNLWQKLKLSRDDAKPLLRLKKFPSFPLVERQANAEVDWWDMVCNVKKLINEKKEDGKVFWQNLAGYKRQEALRPYLSSEEDRKKGKKFARYQLGDLLLHLEKKHGEDWGKVYDEAWERIDKKVEGLSKHIKLEEERRSEDAQSKAALTDWLRAKASFVIEGLKEADKDEFCRCELKLQKWYGDLRGKPFAIEAENSILDISGFSKQYNCAFIWQKDGVKKLNLYLIINYFKGGKLRFKKIKPEAFEANRFYTVINKKSGEIVPMEVNFNFDDPNLIILPLAFGKRQGREFIWNDLLSLETGSLKLANGRVIEKTLYNRRTRQDEPALFVALTFERREVLDSSNIKPMNLIGVDRGENIPAVIALTDPEGCPLSRFKDSLGNPTHILRIGESYKEKQRTIQAKKEVEQRRAGGYSRKYASKAKNLADDMVRNTARDLLYYAVTQDAMLIFENLSRGFGRQGKRTFMAERQYTRMEDWLTAKLAYEGLPSKTYLSKTLAQYTSKTCSNCGFTITSADYDRVLEKLKKTATGWMTTINGKELKVEGQITYYNRYKRQNVVKDLSVELDRLSEESVNNDISSWTKGRSGEALSLLKKRFSHRPVQEKFVCLNCGFETHADEQAALNIARSWLFLRSQEYKKYQTNKTTGNTDKRAFVETWQSFYRKKLKEVWKPAV

SEQ ID NO: 36857 - protein, 979 aa, synthetic construct
  REGION 1..979: note = engineered CasX variant
QEIKRINKIRRRLVKDSNTKKAGKTGPMKTLLVRVMTPDLRERLENLRKKPENIPQPISNTSRANLNKLLTDYTEMKKAILHVYWEEFQKDPVGLMSRVAQPASKKIDQNKLKPEMDEKGNLTTAGFACSQCGQPLFVYKLEQVSEKGKAYTNYFGRCNVAEHEKLILLAQLKPEKDSDEAVTYSLGKFGQRALDFYSIHVTKESTHPVKPLAQIAGNRYASYPVGKALSDACMGTIASFLSKYQDIIIEHQKVVKGNQKRLESLRELAGKENLEYPSVTLPPQPHTKEGVDAYNEVIARVRMWVNLNLWQKLKLSRDDAKPLLRLKGFPSFPLVERQANAEVDWWDMVCNVKKLINEKKEDGKVFWQNLAGYKRQEALRPYLSSEEDRKKGKKFARYQLGDLLLHLEKKHGEDWGKVYDEAWERIDKKVEGLSKHIKLEEERRSEDAQSKAALTDWLRAKASFVIEGLKEADKDEFCRCELKLQKWYGDLRGKPFAIEAENSILDISGFSKQYNCAFIWQKDGVKKLNLYLIINYFKGGKLRFKKIKPEAFEANRFYTVINKKSGEIVPMEVNFNFDDPNLIILPLAFGKRQGREFIWNDLLSLETGSLKLANGRVIEKTLYNRRTRQDEPALFVALTFERREVLDSSNIKPMNLIGVDRGENIPAVIALTDPEGCPLSRFKDSLGNPTHILRIGERYKEKQRTIQAKKEVEQRRAGGYSRKYASKAKNLADDMVRNTARDLLYYAVTQDAMLIFENLSRGFGRQGKRTFMAERQYTRMEDWLTAKLAYEGLPSKTYLSKTLAQYTSKTCSNCGFTITSADYDRVLEKLKKTATGWMTTINGKELKVEGQITYYNRYKRQNVVKDLSVELDRLSEESVNNDISSWTKGRSGEALSLLKKRFSHRPVQEKFVCLNCGFETHADEQAALNIARSWLFLRSQEYKKYQTNKTTGNTDKRAFVETWQSFYRKKLKEVWKPAV

SEQ ID NO: 36858 - protein, 979 aa, synthetic construct
  REGION 1..979: note = engineered CasX variant
QEIKRINKIRRRLVKDSNTKKAGKTGPMKTLLVRVMTPDLRERLENLRKKPENIPQPISNTSRANLNKLLTDYTEMKKAILHVYWEEFQKDPVGLMSRVAQPASKKIDQNKLKPEMDEKGNLTTAGFACSQCGQPLFVYKLEQVSEKGKAYTNYFGRCNVAEHEKLILLAQLKPEKDSDEAVTYSLGKFGQRALDFYSIHVTKESTHPVKPLAQIAGNRYASHPVGKALSDACMGTIASFLSKYQDIIIEHQKVVKGNQKRLESLRELAGKENLEYPSVTLPPQPHTKEGVDAYNEVIARVRMWVNLNLWQKLKLSRDDAKPLLRLKGFPSFPLVERQANAEVDWWDMVCNVKKLINEKKEDGKVFWQNLAGYKRQEALRPYLSSEEDRKKGKKFARYQLGDLLLHLEKKHGEDWGKVYDEAWERIDKKVEGLSKHIKLEEERRSEDAQSKAALTDWLRAKASFVIEGLKEADKDEFCRCELKLQKWYGDLRGKPFAIEAENSILDISGFSKQYNCAFIWQKDGVKKLNLYLIINYFKGGKLRFKKIKPEAFEANRFYTVINKKSGEIVPMEVNFNFDDPNLIILPLAFGKRQGREFIWNDLLSLETGSLKLANGRVIEKTLYNRRTRQDEPALFVALTFERREVLDSSNIKPMNLIGVDRGENIPAVIALTDPEGCPLSRFKDSLGNPTHILRIGERYKEKQRTIQAKKEVEQRRAGGYSRKYASKAKNLADDMVRNTARDLLYYAVTQDAMLIFENLSRGFGRQGKRTFMAERQYTRMEDWLTAKLAYEGLPSKTYLSKTLAQYTSKTCSNCGFTITSADYDRVLEKLKKTATGWMTTINGKELKVEGQITYYNRYKRQNVVKDLSVELDRLSEESVNNDISSWTKGRSGEALSLLKKRFSHRPVQEKFVCLNCGFETHADEQAALNIARSWLFLRSQEYKKYQTNKTTGNTDKRAFVETWQSFYRKKLKEVWKPAV

SEQ ID NO: 36859 - protein, 979 aa, synthetic construct
  REGION 1..979: note = engineered CasX variant
QEIKRINKIRRRLVKDSNTKKAGKTGPMKTLLVRVMTPDLRERLENLRKKPENIPQPISNTSRANLNKLLTDYTEMKKAILHVYWEEFQKDPVGLMSRVAQPASKKIDQNKLKPEMDEKGNLTTAGFACSQCGQPLFVYKLEQVSEKGKAYTNYFGRCNVAEHEKLILLAQLKPEKDSDEAVTYSLGKFGQRALDFYSIHVTKESTHPVKPLAQIAGNRYASSPVGKALSDACMGTIASFLSKYQDIIIEHQKVVKGNQKRLESLRELAGKENLEYPSVTLPPQPHTKEGVDAYNEVIARVRMWVNLNLWQKLKLSRDDAKPLLRLKGFPSFPLVERQANAEVDWWDMVCNVKKLINEKKEDGKVFWQNLAGYKRQEALRPYLSSEEDRKKGKKFARYQLGDLLLHLEKKHGEDWGKVYDEAWERIDKKVEGLSKHIKLEEERRSEDAQSKAALTDWLRAKASFVIEGLKEADKDEFCRCELKLQKWYGDLRGKPFAIEAENSILDISGFSKQYNCAFIWQKDGVKKLNLYLIINYFKGGKLRFKKIKPEAFEANRFYTVINKKSGEIVPMEVNFNFDDPNLIILPLAFGKRQGREFIWNDLLSLETGSLKLANGRVIEKTLYNRRTRQDEPALFVALTFERREVLDSSNIKPMNLIGVDRGENIPAVIALTDPEGCPLSRFKDSLGNPTHILRIGERYKEKQRTIQAKKEVEQRRAGGYSRKYASKAKNLADDMVRNTARDLLYYAVTQDAMLIFENLSRGFGRQGKRTFMAERQYTRMEDWLTAKLAYEGLPSKTYLSKTLAQYTSKTCSNCGFTITSADYDRVLEKLKKTATGWMTTINGKELKVEGQITYYNRYKRQNVVKDLSVELDRLSEESVNNDISSWTKGRSGEALSLLKKRFSHRPVQEKFVCLNCGFETHADEQAALNIARSWLFLRSQEYKKYQTNKTTGNTDKRAFVETWQSFYRKKLKEVWKPAV

SEQ ID NO: 36860 - protein, 979 aa, synthetic construct
  REGION 1..979: note = engineered CasX variant
QEIKRINKIRRRLVKDSNTKKAGKTGPMKTLLVRVMTPDLRERLENLRKKPENIPQPISNTSRANLNKLLTDYTEMKKAILHVYWEEFQKDPVGLMSRVAQPASKKIDQNKLKPEMDEKGNLTTAGFACSQCGQPLFVYKLEQVSEKGKAYTNYFGRCNVAEHEKLILLAQLKPEKDSDEAVTYSLGKFGQRALDFYSIHVTKESTHPVKPLAQIAGNRYASTPVGKALSDACMGTIASFLSKYQDIIIEHQKVVKGNQKRLESLRELAGKENLEYPSVTLPPQPHTKEGVDAYNEVIARVRMWVNLNLWQKLKLSRDDAKPLLRLKGFPSFPLVERQANAEVDWWDMVCNVKKLINEKKEDGKVFWQNLAGYKRQEALRPYLSSEEDRKKGKKFARYQLGDLLLHLEKKHGEDWGKVYDEAWERIDKKVEGLSKHIKLEEERRSEDAQSKAALTDWLRAKASFVIEGLKEADKDEFCRCELKLQKWYGDLRGKPFAIEAENSILDISGFSKQYNCAFIWQKDGVKKLNLYLIINYFKGGKLRFKKIKPEAFEANRFYTVINKKSGEIVPMEVNFNFDDPNLIILPLAFGKRQGREFIWNDLLSLETGSLKLANGRVIEKTLYNRRTRQDEPALFVALTFERREVLDSSNIKPMNLIGVDRGENIPAVIALTDPEGCPLSRFKDSLGNPTHILRIGERYKEKQRTIQAKKEVEQRRAGGYSRKYASKAKNLADDMVRNTARDLLYYAVTQDAMLIFENLSRGFGRQGKRTFMAERQYTRMEDWLTAKLAYEGLPSKTYLSKTLAQYTSKTCSNCGFTITSADYDRVLEKLKKTATGWMTTINGKELKVEGQITYYNRYKRQNVVKDLSVELDRLSEESVNNDISSWTKGRSGEALSLLKKRFSHRPVQEKFVCLNCGFETHADEQAALNIARSWLFLRSQEYKKYQTNKTTGNTDKRAFVETWQSFYRKKLKEVWKPAV

SEQ ID NO: 36861 - protein, 979 aa, synthetic construct
  REGION 1..979: note = engineered CasX variant
QEIKRINKIRRRLVKDSNTKKAGKTGPMKTLLVRVMTPDLRERLENLRKKPENIPQPISNTSRANLNKLLTDYTEMKKAILHVYWEEFQKDPVGLMSRVAQPASKKIDQNKLKPEMDEKGNLTTAGFACSQCGQPLFVYKLEQVSEKGKAYTNYFGRCNVAEHEKLILLAQLKPEKDSDEAVTYSLGKFGQRALDFYSIHVTKESTHPVKPLAQIAGNRYASAPVGKALSDACMGTIASFLSKYQDIIIEHQKVVKGNQKRLESLRELAGKENLEYPSVTLPPQPHTKEGVDAYNEVIARVRMWVNLNLWQKLKLSRDDAKPLLRLKGFPSFPLVERQANAEVDWWDMVCNVKKLINEKKEDGKVFWQNLAGYKRQEALRPYLSSEEDRKKGKKFARYQLGDLLLHLEKKHGEDWGKVYDEAWERIDKKVEGLSKHIKLEEERRSEDAQSKAALTDWLRAKASFVIEGLKEADKDEFCRCELKLQKWYGDLRGKPFAIEAENSILDISGFSKQYNCAFIWQKDGVKKLNLYLIINYFKGGKLRFKKIKPEAFEANRFYTVINKKSGEIVPMEVNFNFDDPNLIILPLAFGKRQGREFIWNDLLSLETGSLKLANGRVIEKTLYNRRTRQDEPALFVALTFERREVLDSSNIKPMNLIGVDRGENIPAVIALTDPEGCPLSRFKDSLGNPTHILRIGERYKEKQRTIQAKKEVEQRRAGGYSRKYASKAKNLADDMVRNTARDLLYYAVTQDAMLIFENLSRGFGRQGKRTFMAERQYTRMEDWLTAKLAYEGLPSKTYLSKTLAQYTSKTCSNCGFTITSADYDRVLEKLKKTATGWMTTINGKELKVEGQITYYNRYKRQNVVKDLSVELDRLSEESVNNDISSWTKGRSGEALSLLKKRFSHRPVQEKFVCLNCGFETHADEQAALNIARSWLFLRSQEYKKYQTNKTTGNTDKRAFVETWQSFYRKKLKEVWKPAV

SEQ ID NO: 36862 - protein, 979 aa, synthetic construct
  REGION 1..979: note = engineered CasX variant
QEIKRINKIRRRLVKDSNTKKAGKTGPMKTLLVRVMTPDLRERLENLRKKPENIPQPISNTSRANLNKLLTDYTEMKKAILHVYWEEFQKDPVGLMSRVAQPASKKIDQNKLKPEMDEKGNLTTAGFACSQCGQPLFVYKLEQVSEKGKAYTNYFGRCNVAEHEKLILLAQLKPEKDSDEAVTYSLGKFGQRALDFYSIHVTKESTHPVKPLAQIAGNRYASVPVGKALSDACMGTIASFLSKYQDIIIEHQKVVKGNQKRLESLRELAGKENLEYPSVTLPPQPHTKEGVDAYNEVIARVRMWVNLNLWQKLKLSRDDAKPLLRLKGFPSFPLVERQANAEVDWWDMVCNVKKLINEKKEDGKVFWQNLAGYKRQEALRPYLSSEEDRKKGKKFARYQLGDLLLHLEKKHGEDWGKVYDEAWERIDKKVEGLSKHIKLEEERRSEDAQSKAALTDWLRAKASFVIEGLKEADKDEFCRCELKLQKWYGDLRGKPFAIEAENSILDISGFSKQYNCAFIWQKDGVKKLNLYLIINYFKGGKLRFKKIKPEAFEANRFYTVINKKSGEIVPMEVNFNFDDPNLIILPLAFGKRQGREFIWNDLLSLETGSLKLANGRVIEKTLYNRRTRQDEPALFVALTFERREVLDSSNIKPMNLIGVDRGENIPAVIALTDPEGCPLSRFKDSLGNPTHILRIGERYKEKQRTIQAKKEVEQRRAGGYSRKYASKAKNLADDMVRNTARDLLYYAVTQDAMLIFENLSRGFGRQGKRTFMAERQYTRMEDWLTAKLAYEGLPSKTYLSKTLAQYTSKTCSNCGFTITSADYDRVLEKLKKTATGWMTTINGKELKVEGQITYYNRYKRQNVVKDLSVELDRLSEESVNNDISSWTKGRSGEALSLLKKRFSHRPVQEKFVCLNCGFETHADEQAALNIARSWLFLRSQEYKKYQTNKTTGNTDKRAFVETWQSFYRKKLKEVWKPAV

SEQ ID NO: 36863 - protein, 979 aa, synthetic construct
  REGION 1..979: note = engineered CasX variant
QEIKRINKIRRRLVKDSNTKKAGKTGPMKTLLVRVMTPDLRERLENLRKKPENIPQPISNTSRANLNKLLTDYTEMKKAILHVYWEEFQKDPVGLMSRVAQPASKKIDQNKLKPEMDEKGNLTTAGFACSQCGQPLFVYKLEQVSEKGKAYTNYFGRCNVAEHEKLIKLAQLKPEKDSDEAVTYSLGKFGQRALDFYSIHVTKESTHPVKPLAQIAGNRYASGPVGKALSDACMGTIASFLSKYQDIIIEHQKVVKGNQKRLESLRELAGKENLEYPSVTLPPQPHTKEGVDAYNEVIARVRMWVNLNLWQKLKLSRDDAKPLLRLKGFPSFPLVERQANAEVDWWDMVCNVKKLINEKKEDGKVFWQNLAGYKRQEALRPYLSSEEDRKKGKKFARYQLGDLLLHLEKKHGEDWGKVYDEAWERIDKKVEGLSKHIKLEEERRSEDAQSKAALTDWLRAKASFVIEGLKEADKDEFCRCELKLQKWYGDLRGKPFAIEAENSILDISGFSKQYNCAFIWQKDGVKKLNLYLIINYFKGGKLRFKKIKPEAFEANRFYTVINKKSGEIVPMEVNFNFDDPNLIILPLAFGKRQGREFIWNDLLSLETGSLKLANGRVIEKTLYNRRTRQDEPALFVALTFERREVLDSSNIKPMNLIGVDRGENIPAVIALTDPEGCPLSRFKDSLGNPTHILRIGERYKEKQRTIQAKKEVEQRRAGGYSRKYASKAKNLADDMVRNTARDLLYYAVTQDAMLIFENLSRGFGRQGKRTFMAERQYTRMEDWLTAKLAYEGLPSKTYLSKTLAQYTSKTCSNCGFTITSADYDRVLEKLKKTATGWMTTINGKELKVEGQITYYNRYKRQNVVKDLSVELDRLSEESVNNDISSWTKGRSGEALSLLKKRFSHRPVQEKFVCLNCGFETHADEQAALNIARSWLFLRSQEYKKYQTNKTTGNTDKRAFVETWQSFYRKKLKEVWKPAV

SEQ ID NO: 36864 - protein, 978 aa, synthetic construct
  REGION 1..978: note = engineered CasX variant
QEIKRINKIRRRLVKDSNTKKAGKTGPMKTLLVRVMTPDLRERLENLRKKPENIPQPISNTSRANLNKLLTDYTEMKKAILHVYWEEFQKDPVGLMSRVAQPASKKIDQNKLKPEMDEKGNLTTAGFACSQCGQPLFVYKLEQVSEKGKAYTNYFGRCNVAEHEKLILLAQLKPEKDSDEAVTYSLGKFGQRALDFYSIHVTKESTHPVKPLAQIAGNRYASPVGKALSDACMGTIASFLSKYQDIIIEHQKVVKGNQKRLESLRELAGKENLEYPSVTLPPQPHTKEGVDAYNEVIARVRMWVNLNLWQKLKLSRDDAKPLLRLKGFPSFPLVERQANAEVDWWDMVCNVKKLINEKKEDGKVFWQNLAGYKRQEALRPYLSSEEDRKKGKKFARYQLGDLLLHLEKKHGEDWGKVYDEAWERIDKKVEGLSKHIKLEEERRSEDAQSKAALTDWLRAKASFVIEGLKEADKDEFCRCELKLQKWYGDLRGKPFAIEAENSILDISGFSKQYNCAFIWQKDGVKKLNLYLIINYFKGGKLRFKKIKPEAFEANRFYTVINKKSGEIVPMEVNFNFDDPNLIILPLAFGKRQGREFIWNDLLSLETGSLKLANGRVIEKTLYNRRTRQDEPALFVALTFERREVLDSSNIKPMNLIGVDRGENIPAVIALTDPEGCPLSRFKDSLGNPTHILRIGERYKEKQRTIQAKKEVEQRRAGGYSRKYASKAKNLADDMVRNTARDLLYYAVTQDAMLIFENLSRGFGRQGKRTFMAERQYTRMEDWLTAKLAYEGLPSKTYLSKTLAQYTSKTCSNCGFTITSADYDRVLEKLKKTATGWMTTINGKELKVEGQITYYNRYKRQNVVKDLSVELDRLSEESVNNDISSWTKGRSGEALSLLKKRFSHRPVQEKFVCLNCGFETHADEQAALNIARSWLFLRSQEYKKYQTNKTTGNTDKRAFVETWQSFYRKKLKEVWKPAV

SEQ ID NO: 36865 - protein, 979 aa, synthetic construct
  REGION 1..979: note = engineered CasX variant
QEIKRINKIRRRLVKDSNTKKAGKTGPMKTLLVRVMTPDLRERLENLRKKPENIPQPISNTSRANLNKLLTDYTEMKKAILHVYWEEFQKDPVGLMSRVAQPASKKIDQNKLKPEMDEKGNLTTAGFACSQCGQPLFVYKLEQVSEKGKAYTNYFGRCNVAEHEKLILLAQLKPEKDSDEAVTYSLGKFGQRALDFYSIHVTKESTHPVKPLAQIAGNRYASYPVGKALSDACMGTIASFLSKYQDIIIEHQKVVKGNQKRLESLRELAGKENLEYPSVTLPPQPHTKEGVDAYNEVIARVRMWVNLNLWQKLKLSRDDAKPLLRLKGFPSFPLVERQANAEVDWWDMVCNVKKLINEKKEDGKVFWQNLAGYKRQEALRPYLSSEEDRKKGKKFARYQLGDLLLHLEKKHGEDWGKVYDEAWERIDKKVEGLSKHIKLEEERRSEDAQSKAALTDWLRAKASFVIEGLKEADKDEFCRCELKLQKWYGDLRGKPFAIEAENSILDISGFSKQYNCAFIWQKDGVKKLNLYLIINYFKGGKLRFKKIKPEAFEANRFYTVINKKSGEIVPMEVNFNFDDPNLIILPLAFGKRQGREFIWNDLLSLETGSLQLANGRVIEKTLYNRRTRQDEPALFVALTFERREVLDSSNIKPMNLIGVDRGENIPAVIALTDPEGCPLSRFKDSLGNPTHILRIGESYKEKQRTIQAKKEVEQRRAGGYSRKYASKAKNLADDMVRNTARDLLYYAVTQDAMLIFENLSRGFGRQGKRTFMAERQYTRMEDWLTAKLAYEGLPSKTYLSKTLAQYTSKTCSNCGFTITSADYDRVLEKLKKTATGWMTTINGKELKVEGQITYYNRYKRQNVVKDLSVELDRLSEESVNNDISSWTKGRSGEALSLLKKRFSHRPVQEKFVCLNCGFETHADEQAALNIARSWLFLRSQEYKKYQTNKTTGNTDKRAFVETWQSFYRKKLKEVWKPAV

SEQ ID NO: 36866 - protein, 979 aa, synthetic construct
  REGION 1..979: note = engineered CasX variant
QEIKRINKIRRRLVKDSNTKKAGKTGPMKTLLVRVMTPDLRERLENLRKKPENIPQPISNTSRANLNKLLTDYTEMKKAILHVYWEEFQKDPVGLMSRVAQPASKKIDQNKLKPEMDEKGNLTTAGFACSQCGQPLFVYKLEQVSEKGKAYTNYFGRCNVAEHEKLILLAQLKPEKDSDEAVTYSLGKFGQRALDFYSIHVTKESTHPVKPLAQIAGNRYASHPVGKALSDACMGTIASFLSKYQDIIIEHQKVVKGNQKRLESLRELAGKENLEYPSVTLPPQPHTKEGVDAYNEVIARVRMWVNLNLWQKLKLSRDDAKPLLRLKGFPSFPLVERQANAEVDWWDMVCNVKKLINEKKEDGKVFWQNLAGYKRQEALRPYLSSEEDRKKGKKFARYQLGDLLLHLEKKHGEDWGKVYDEAWERIDKKVEGLSKHIKLEEERRSEDAQSKAALTDWLRAKASFVIEGLKEADKDEFCRCELKLQKWYGDLRGKPFAIEAENSILDISGFSKQYNCAFIWQKDGVKKLNLYLIINYFKGGKLRFKKIKPEAFEANRFYTVINKKSGEIVPMEVNFNFDDPNLIILPLAFGKRQGREFIWNDLLSLETGSLQLANGRVIEKTLYNRRTRQDEPALFVALTFERREVLDSSNIKPMNLIGVDRGENIPAVIALTDPEGCPLSRFKDSLGNPTHILRIGESYKEKQRTIQAKKEVEQRRAGGYSRKYASKAKNLADDMVRNTARDLLYYAVTQDAMLIFENLSRGFGRQGKRTFMAERQYTRMEDWLTAKLAYEGLPSKTYLSKTLAQYTSKTCSNCGFTITSADYDRVLEKLKKTATGWMTTINGKELKVEGQITYYNRYKRQNVVKDLSVELDRLSEESVNNDISSWTKGRSGEALSLLKKRFSHRPVQEKFVCLNCGFETHADEQAALNIARSWLFLRSQEYKKYQTNKTTGNTDKRAFVETWQSFYRKKLKEVWKPAV

SEQ ID NO: 36867 - protein, 979 aa, synthetic construct
  REGION 1..979: note = engineered CasX variant
QEIKRINKIRRRLVKDSNTKKAGKTGPMKTLLVRVMTPDLRERLENLRKKPENIPQPISNTSRANLNKLLTDYTEMKKAILHVYWEEFQKDPVGLMSRVAQPASKKIDQNKLKPEMDEKGNLTTAGFACSQCGQPLFVYKLEQVSEKGKAYTNYFGRCNVAEHEKLILLAQLKPEKDSDEAVTYSLGKFGQRALDFYSIHVTKESTHPVKPLAQIAGNRYASSPVGKALSDACMGTIASFLSKYQDIIIEHQKVVKGNQKRLESLRELAGKENLEYPSVTLPPQPHTKEGVDAYNEVIARVRMWVNLNLWQKLKLSRDDAKPLLRLKGFPSFPLVERQANAEVDWWDMVCNVKKLINEKKEDGKVFWQNLAGYKRQEALRPYLSSEEDRKKGKKFARYQLGDLLLHLEKKHGEDWGKVYDEAWERIDKKVEGLSKHIKLEEERRSEDAQSKAALTDWLRAKASFVIEGLKEADKDEFCRCELKLQKWYGDLRGKPFAIEAENSILDISGFSKQYNCAFIWQKDGVKKLNLYLIINYFKGGKLRFKKIKPEAFEANRFYTVINKKSGEIVPMEVNFNFDDPNLIILPLAFGKRQGREFIWNDLLSLETGSLQLANGRVIEKTLYNRRTRQDEPALFVALTFERREVLDSSNIKPMNLIGVDRGENIPAVIALTDPEGCPLSRFKDSLGNPTHILRIGESYKEKQRTIQAKKEVEQRRAGGYSRKYASKAKNLADDMVRNTARDLLYYAVTQDAMLIFENLSRGFGRQGKRTFMAERQYTRMEDWLTAKLAYEGLPSKTYLSKTLAQYTSKTCSNCGFTITSADYDRVLEKLKKTATGWMTTINGKELKVEGQITYYNRYKRQNVVKDLSVELDRLSEESVNNDISSWTKGRSGEALSLLKKRFSHRPVQEKFVCLNCGFETHADEQAALNIARSWLFLRSQEYKKYQTNKTTGNTDKRAFVETWQSFYRKKLKEVWKPAV

SEQ ID NO: 36868 - protein, 979 aa, synthetic construct
  REGION 1..979: note = engineered CasX variant
QEIKRINKIRRRLVKDSNTKKAGKTGPMKTLLVRVMTPDLRERLENLRKKPENIPQPISNTSRANLNKLLTDYTEMKKAILHVYWEEFQKDPVGLMSRVAQPASKKIDQNKLKPEMDEKGNLTTAGFACSQCGQPLFVYKLEQVSEKGKAYTNYFGRCNVAEHEKLILLAQLKPEKDSDEAVTYSLGKFGQRALDFYSIHVTKESTHPVKPLAQIAGNRYASTPVGKALSDACMGTIASFLSKYQDIIIEHQKVVKGNQKRLESLRELAGKENLEYPSVTLPPQPHTKEGVDAYNEVIARVRMWVNLNLWQKLKLSRDDAKPLLRLKGFPSFPLVERQANAEVDWWDMVCNVKKLINEKKEDGKVFWQNLAGYKRQEALRPYLSSEEDRKKGKKFARYQLGDLLLHLEKKHGEDWGKVYDEAWERIDKKVEGLSKHIKLEEERRSEDAQSKAALTDWLRAKASFVIEGLKEADKDEFCRCELKLQKWYGDLRGKPFAIEAENSILDISGFSKQYNCAFIWQKDGVKKLNLYLIINYFKGGKLRFKKIKPEAFEANRFYTVINKKSGEIVPMEVNFNFDDPNLIILPLAFGKRQGREFIWNDLLSLETGSLQLANGRVIEKTLYNRRTRQDEPALFVALTFERREVLDSSNIKPMNLIGVDRGENIPAVIALTDPEGCPLSRFKDSLGNPTHILRIGESYKEKQRTIQAKKEVEQRRAGGYSRKYASKAKNLADDMVRNTARDLLYYAVTQDAMLIFENLSRGFGRQGKRTFMAERQYTRMEDWLTAKLAYEGLPSKTYLSKTLAQYTSKTCSNCGFTITSADYDRVLEKLKKTATGWMTTINGKELKVEGQITYYNRYKRQNVVKDLSVELDRLSEESVNNDISSWTKGRSGEALSLLKKRFSHRPVQEKFVCLNCGFETHADEQAALNIARSWLFLRSQEYKKYQTNKTTGNTDKRAFVETWQSFYRKKLKEVWKPAV

SEQ ID NO: 36869 - protein, 979 aa, synthetic construct
  REGION 1..979: note = engineered CasX variant
QEIKRINKIRRRLVKDSNTKKAGKTGPMKTLLVRVMTPDLRERLENLRKKPENIPQPISNTSRANLNKLLTDYTEMKKAILHVYWEEFQKDPVGLMSRVAQPASKKIDQNKLKPEMDEKGNLTTAGFACSQCGQPLFVYKLEQVSEKGKAYTNYFGRCNVAEHEKLILLAQLKPEKDSDEAVTYSLGKFGQRALDFYSIHVTKESTHPVKPLAQIAGNRYASAPVGKALSDACMGTIASFLSKYQDIIIEHQKVVKGNQKRLESLRELAGKENLEYPSVTLPPQPHTKEGVDAYNEVIARVRMWVNLNLWQKLKLSRDDAKPLLRLKGFPSFPLVERQANAEVDWWDMVCNVKKLINEKKEDGKVFWQNLAGYKRQEALRPYLSSEEDRKKGKKFARYQLGDLLLHLEKKHGEDWGKVYDEAWERIDKKVEGLSKHIKLEEERRSEDAQSKAALTDWLRAKASFVIEGLKEADKDEFCRCELKLQKWYGDLRGKPFAIEAENSILDISGFSKQYNCAFIWQKDGVKKLNLYLIINYFKGGKLRFKKIKPEAFEANRFYTVINKKSGEIVPMEVNFNFDDPNLIILPLAFGKRQGREFIWNDLLSLETGSLQLANGRVIEKTLYNRRTRQDEPALFVALTFERREVLDSSNIKPMNLIGVDRGENIPAVIALTDPEGCPLSRFKDSLGNPTHILRIGESYKEKQRTIQAKKEVEQRRAGGYSRKYASKAKNLADDMVRNTARDLLYYAVTQDAMLIFENLSRGFGRQGKRTFMAERQYTRMEDWLTAKLAYEGLPSKTYLSKTLAQYTSKTCSNCGFTITSADYDRVLEKLKKTATGWMTTINGKELKVEGQITYYNRYKRQNVVKDLSVELDRLSEESVNNDISSWTKGRSGEALSLLKKRFSHRPVQEKFVCLNCGFETHADEQAALNIARSWLFLRSQEYKKYQTNKTTGNTDKRAFVETWQSFYRKKLKEVWKPAV

SEQ ID NO: 36870 - protein, 979 aa, synthetic construct
  REGION 1..979: note = engineered CasX variant
QEIKRINKIRRRLVKDSNTKKAGKTGPMKTLLVRVMTPDLRERLENLRKKPENIPQPISNTSRANLNKLLTDYTEMKKAILHVYWEEFQKDPVGLMSRVAQPASKKIDQNKLKPEMDEKGNLTTAGFACSQCGQPLFVYKLEQVSEKGKAYTNYFGRCNVAEHEKLILLAQLKPEKDSDEAVTYSLGKFGQRALDFYSIHVTKESTHPVKPLAQIAGNRYASVPVGKALSDACMGTIASFLSKYQDIIIEHQKVVKGNQKRLESLRELAGKENLEYPSVTLPPQPHTKEGVDAYNEVIARVRMWVNLNLWQKLKLSRDDAKPLLRLKGFPSFPLVERQANAEVDWWDMVCNVKKLINEKKEDGKVFWQNLAGYKRQEALRPYLSSEEDRKKGKKFARYQLGDLLLHLEKKHGEDWGKVYDEAWERIDKKVEGLSKHIKLEEERRSEDAQSKAALTDWLRAKASFVIEGLKEADKDEFCRCELKLQKWYGDLRGKPFAIEAENSILDISGFSKQYNCAFIWQKDGVKKLNLYLIINYFKGGKLRFKKIKPEAFEANRFYTVINKKSGEIVPMEVNFNFDDPNLIILPLAFGKRQGREFIWNDLLSLETGSLQLANGRVIEKTLYNRRTRQDEPALFVALTFERREVLDSSNIKPMNLIGVDRGENIPAVIALTDPEGCPLSRFKDSLGNPTHILRIGESYKEKQRTIQAKKEVEQRRAGGYSRKYASKAKNLADDMVRNTARDLLYYAVTQDAMLIFENLSRGFGRQGKRTFMAERQYTRMEDWLTAKLAYEGLPSKTYLSKTLAQYTSKTCSNCGFTITSADYDRVLEKLKKTATGWMTTINGKELKVEGQITYYNRYKRQNVVKDLSVELDRLSEESVNNDISSWTKGRSGEALSLLKKRFSHRPVQEKFVCLNCGFETHADEQAALNIARSWLFLRSQEYKKYQTNKTTGNTDKRAFVETWQSFYRKKLKEVWKPAV

SEQ ID NO: 36871 - protein, 979 aa, synthetic construct
  REGION 1..979: note = engineered CasX variant
QEIKRINKIRRRLVKDSNTKKAGKTGPMKTLLVRVMTPDLRERLENLRKKPENIPQPISNTSRANLNKLLTDYTEMKKAILHVYWEEFQKDPVGLMSRVAQPASKKIDQNKLKPEMDEKGNLTTAGFACSQCGQPLFVYKLEQVSEKGKAYTNYFGRCNVAEHEKLIKLAQLKPEKDSDEAVTYSLGKFGQRALDFYSIHVTKESTHPVKPLAQIAGNRYASGPVGKALSDACMGTIASFLSKYQDIIIEHQKVVKGNQKRLESLRELAGKENLEYPSVTLPPQPHTKEGVDAYNEVIARVRMWVNLNLWQKLKLSRDDAKPLLRLKGFPSFPLVERQANAEVDWWDMVCNVKKLINEKKEDGKVFWQNLAGYKRQEALRPYLSSEEDRKKGKKFARYQLGDLLLHLEKKHGEDWGKVYDEAWERIDKKVEGLSKHIKLEEERRSEDAQSKAALTDWLRAKASFVIEGLKEADKDEFCRCELKLQKWYGDLRGKPFAIEAENSILDISGFSKQYNCAFIWQKDGVKKLNLYLIINYFKGGKLRFKKIKPEAFEANRFYTVINKKSGEIVPMEVNFNFDDPNLIILPLAFGKRQGREFIWNDLLSLETGSLQLANGRVIEKTLYNRRTRQDEPALFVALTFERREVLDSSNIKPMNLIGVDRGENIPAVIALTDPEGCPLSRFKDSLGNPTHILRIGESYKEKQRTIQAKKEVEQRRAGGYSRKYASKAKNLADDMVRNTARDLLYYAVTQDAMLIFENLSRGFGRQGKRTFMAERQYTRMEDWLTAKLAYEGLPSKTYLSKTLAQYTSKTCSNCGFTITSADYDRVLEKLKKTATGWMTTINGKELKVEGQITYYNRYKRQNVVKDLSVELDRLSEESVNNDISSWTKGRSGEALSLLKKRFSHRPVQEKFVCLNCGFETHADEQAALNIARSWLFLRSQEYKKYQTNKTTGNTDKRAFVETWQSFYRKKLKEVWKPAV

SEQ ID NO: 36872 - protein, 978 aa, synthetic construct
  REGION 1..978: note = engineered CasX variant
QEIKRINKIRRRLVKDSNTKKAGKTGPMKTLLVRVMTPDLRERLENLRKKPENIPQPISNTSRANLNKLLTDYTEMKKAILHVYWEEFQKDPVGLMSRVAQPASKKIDQNKLKPEMDEKGNLTTAGFACSQCGQPLFVYKLEQVSEKGKAYTNYFGRCNVAEHEKLILLAQLKPEKDSDEAVTYSLGKFGQRALDFYSIHVTKESTHPVKPLAQIAGNRYASPVGKALSDACMGTIASFLSKYQDIIIEHQKVVKGNQKRLESLRELAGKENLEYPSVTLPPQPHTKEGVDAYNEVIARVRMWVNLNLWQKLKLSRDDAKPLLRLKGFPSFPLVERQANAEVDWWDMVCNVKKLINEKKEDGKVFWQNLAGYKRQEALRPYLSSEEDRKKGKKFARYQLGDLLLHLEKKHGEDWGKVYDEAWERIDKKVEGLSKHIKLEEERRSEDAQSKAALTDWLRAKASFVIEGLKEADKDEFCRCELKLQKWYGDLRGKPFAIEAENSILDISGFSKQYNCAFIWQKDGVKKLNLYLIINYFKGGKLRFKKIKPEAFEANRFYTVINKKSGEIVPMEVNFNFDDPNLIILPLAFGKRQGREFIWNDLLSLETGSLQLANGRVIEKTLYNRRTRQDEPALFVALTFERREVLDSSNIKPMNLIGVDRGENIPAVIALTDPEGCPLSRFKDSLGNPTHILRIGESYKEKQRTIQAKKEVEQRRAGGYSRKYASKAKNLADDMVRNTARDLLYYAVTQDAMLIFENLSRGFGRQGKRTFMAERQYTRMEDWLTAKLAYEGLPSKTYLSKTLAQYTSKTCSNCGFTITSADYDRVLEKLKKTATGWMTTINGKELKVEGQITYYNRYKRQNVVKDLSVELDRLSEESVNNDISSWTKGRSGEALSLLKKRFSHRPVQEKFVCLNCGFETHADEQAALNIARSWLFLRSQEYKKYQTNKTTGNTDKRAFVETWQSFYRKKLKEVWKPAV

SEQ ID NO: 36873 - protein, 979 aa, synthetic construct
  REGION 1..979: note = engineered CasX variant
QEIKRINKIRRRLVKDSNTKKAGKTGPMKTLLVRVMTPDLRERLENLRKKPENIPQPISNTSRANLNKLLTDYTEMKKAILHVYWEEFQKDPVGLMSRVAQPASKKIDQNKLKPEMDEKGNLTTAGFACSQCGQPLFVYKLEQVSEKGKAYTNYFGRCNVAEHEKLILLAQLKPEKDSDEAVTYSLGKFGQRALDFYSIHVTKESTHPVKPLAQIAGNRYASYPVGKALSDACMGTIASFLSKYQDIIIEHQKVVKGNQKRLESLRELAGKENLEYPSVTLPPQPHTKEGVDAYNEVIARVRMWVNLNLWQKLKLSRDDAKPLLRLKGFPSFPLVERQANEVDWWDMVCNVKKLINEKKEDGKVFWQNLAGYKRQEALRPYLSSEEDRKKGKKFARTQLGDLLLHLEKKHEGEDWGKVYDEAWERIDKKVEGLSKHIKLEEERRSEDAQSKAALTDWLRAKASFVIEGLKEADKDEFCRCELKLQKWYGDLRGKPFAIEAENSILDISGFSKQYNCAFIWQKDGVKKLNLYLIINYFKGGKLRFKKIKPEAFEANRFYTVINKKSGEIVPMEVNFNFDDPNLIILPLAFGKRQGREFIWNDLLSLETGSLKLANGRVIEKTLYNRRTRQDEPALFVALTFERREVLDSSNIKPMNLIGVDRGENIPAVIALTDPEGCPLSRFKDSLGNPTHILRIGESYKEKQRTIQAKKEVEQRRAGGYSRKYASKAKNLADDMVRNTARDLLYYAVTQDAMLIFENLSRGFGRQGKRTFMAERQYTRMEDWLTAKLAYEGLPSKTYLSKTLAQYTSKTCSNCGFTITSADYDRVLEKLKKTATGWMTTINGKELKVEGQITYYNRYKRQNVVKDLSVELDRLSEESVNNDISSWTKGRSGEALSLLKKRFSHRPVQEKFVCLNCGFETHADEQAALNIARSWLFLRSQEYKKYQTNKTTGNTDKRAFVETWQSFYRKKLKEVWKPAV

SEQ ID NO: 36874 - protein, 979 aa, synthetic construct
  REGION 1..979: note = engineered CasX variant
QEIKRINKIRRRLVKDSNTKKAGKTGPMKTLLVRVMTPDLRERLENLRKKPENIPQPISNTSRANLNKLLTDYTEMKKAILHVYWEEFQKDPVGLMSRVAQPASKKIDQNKLKPEMDEKGNLTTAGFACSQCGQPLFVYKLEQVSEKGKAYTNYFGRCNVAEHEKLILLAQLKPEKDSDEAVTYSLGKFGQRALDFYSIHVTKESTHPVKPLAQIAGNRYASHPVGKALSDACMGTIASFLSKYQDIIIEHQKVVKGNQKRLESLRELAGKENLEYPSVTLPPQPHTKEGVDAYNEVIARVRMWVNLNLWQKLKLSRDDAKPLLRLKGFPSFPLVERQANEVDWWDMVCNVKKLINEKKEDGKVFWQNLAGYKRQEALRPYLSSEEDRKKGKKFARTQLGDLLLHLEKKHEGEDWGKVYDEAWERIDKKVEGLSKHIKLEEERRSEDAQSKAALTDWLRAKASFVIEGLKEADKDEFCRCELKLQKWYGDLRGKPFAIEAENSILDISGFSKQYNCAFIWQKDGVKKLNLYLIINYFKGGKLRFKKIKPEAFEANRFYTVINKKSGEIVPMEVNFNFDDPNLIILPLAFGKRQGREFIWNDLLSLETGSLKLANGRVIEKTLYNRRTRQDEPALFVALTFERREVLDSSNIKPMNLIGVDRGENIPAVIALTDPEGCPLSRFKDSLGNPTHILRIGESYKEKQRTIQAKKEVEQRRAGGYSRKYASKAKNLADDMVRNTARDLLYYAVTQDAMLIFENLSRGFGRQGKRTFMAERQYTRMEDWLTAKLAYEGLPSKTYLSKTLAQYTSKTCSNCGFTITSADYDRVLEKLKKTATGWMTTINGKELKVEGQITYYNRYKRQNVVKDLSVELDRLSEESVNNDISSWTKGRSGEALSLLKKRFSHRPVQEKFVCLNCGFETHADEQAALNIARSWLFLRSQEYKKYQTNKTTGNTDKRAFVETWQSFYRKKLKEVWKPAV

SEQ ID NO: 36875 - protein, 979 aa, synthetic construct
  REGION 1..979: note = engineered CasX variant
QEIKRINKIRRRLVKDSNTKKAGKTGPMKTLLVRVMTPDLRERLENLRKKPENIPQPISNTSRANLNKLLTDYTEMKKAILHVYWEEFQKDPVGLMSRVAQPASKKIDQNKLKPEMDEKGNLTTAGFACSQCGQPLFVYKLEQVSEKGKAYTNYFGRCNVAEHEKLILLAQLKPEKDSDEAVTYSLGKFGQRALDFYSIHVTKESTHPVKPLAQIAGNRYASSPVGKALSDACMGTIASFLSKYQDIIIEHQKVVKGNQKRLESLRELAGKENLEYPSVTLPPQPHTKEGVDAYNEVIARVRMWVNLNLWQKLKLSRDDAKPLLRLKGFPSFPLVERQANEVDWWDMVCNVKKLINEKKEDGKVFWQNLAGYKRQEALRPYLSSEEDRKKGKKFARTQLGDLLLHLEKKHEGEDWGKVYDEAWERIDKKVEGLSKHIKLEEERRSEDAQSKAALTDWLRAKASFVIEGLKEADKDEFCRCELKLQKWYGDLRGKPFAIEAENSILDISGFSKQYNCAFIWQKDGVKKLNLYLIINYFKGGKLRFKKIKPEAFEANRFYTVINKKSGEIVPMEVNFNFDDPNLIILPLAFGKRQGREFIWNDLLSLETGSLKLANGRVIEKTLYNRRTRQDEPALFVALTFERREVLDSSNIKPMNLIGVDRGENIPAVIALTDPEGCPLSRFKDSLGNPTHILRIGESYKEKQRTIQAKKEVEQRRAGGYSRKYASKAKNLADDMVRNTARDLLYYAVTQDAMLIFENLSRGFGRQGKRTFMAERQYTRMEDWLTAKLAYEGLPSKTYLSKTLAQYTSKTCSNCGFTITSADYDRVLEKLKKTATGWMTTINGKELKVEGQITYYNRYKRQNVVKDLSVELDRLSEESVNNDISSWTKGRSGEALSLLKKRFSHRPVQEKFVCLNCGFETHADEQAALNIARSWLFLRSQEYKKYQTNKTTGNTDKRAFVETWQSFYRKKLKEVWKPAV

SEQ ID NO: 36876 - protein, 979 aa, synthetic construct
  REGION 1..979: note = engineered CasX variant
QEIKRINKIRRRLVKDSNTKKAGKTGPMKTLLVRVMTPDLRERLENLRKKPENIPQPISNTSRANLNKLLTDYTEMKKAILHVYWEEFQKDPVGLMSRVAQPASKKIDQNKLKPEMDEKGNLTTAGFACSQCGQPLFVYKLEQVSEKGKAYTNYFGRCNVAEHEKLILLAQLKPEKDSDEAVTYSLGKFGQRALDFYSIHVTKESTHPVKPLAQIAGNRYASTPVGKALSDACMGTIASFLSKYQDIIIEHQKVVKGNQKRLESLRELAGKENLEYPSVTLPPQPHTKEGVDAYNEVIARVRMWVNLNLWQKLKLSRDDAKPLLRLKGFPSFPLVERQANEVDWWDMVCNVKKLINEKKEDGKVFWQNLAGYKRQEALRPYLSSEEDRKKGKKFARTQLGDLLLHLEKKHEGEDWGKVYDEAWERIDKKVEGLSKHIKLEEERRSEDAQSKAALTDWLRAKASFVIEGLKEADKDEFCRCELKLQKWYGDLRGKPFAIEAENSILDISGFSKQYNCAFIWQKDGVKKLNLYLIINYFKGGKLRFKKIKPEAFEANRFYTVINKKSGEIVPMEVNFNFDDPNLIILPLAFGKRQGREFIWNDLLSLETGSLKLANGRVIEKTLYNRRTRQDEPALFVALTFERREVLDSSNIKPMNLIGVDRGENIPAVIALTDPEGCPLSRFKDSLGNPTHILRIGESYKEKQRTIQAKKEVEQRRAGGYSRKYASKAKNLADDMVRNTARDLLYYAVTQDAMLIFENLSRGFGRQGKRTFMAERQYTRMEDWLTAKLAYEGLPSKTYLSKTLAQYTSKTCSNCGFTITSADYDRVLEKLKKTATGWMTTINGKELKVEGQITYYNRYKRQNVVKDLSVELDRLSEESVNNDISSWTKGRSGEALSLLKKRFSHRPVQEKFVCLNCGFETHADEQAALNIARSWLFLRSQEYKKYQTNKTTGNTDKRAFVETWQSFYRKKLKEVWKPAV

SEQ ID NO: 36877 - protein, 979 aa, synthetic construct
  REGION 1..979: note = engineered CasX variant
QEIKRINKIRRRLVKDSNTKKAGKTGPMKTLLVRVMTPDLRERLENLRKKPENIPQPISNTSRANLNKLLTDYTEMKKAILHVYWEEFQKDPVGLMSRVAQPASKKIDQNKLKPEMDEKGNLTTAGFACSQCGQPLFVYKLEQVSEKGKAYTNYFGRCNVAEHEKLILLAQLKPEKDSDEAVTYSLGKFGQRALDFYSIHVTKESTHPVKPLAQIAGNRYASAPVGKALSDACMGTIASFLSKYQDIIIEHQKVVKGNQKRLESLRELAGKENLEYPSVTLPPQPHTKEGVDAYNEVIARVRMWVNLNLWQKLKLSRDDAKPLLRLKGFPSFPLVERQANEVDWWDMVCNVKKLINEKKEDGKVFWQNLAGYKRQEALRPYLSSEEDRKKGKKFARTQLGDLLLHLEKKHEGEDWGKVYDEAWERIDKKVEGLSKHIKLEEERRSEDAQSKAALTDWLRAKASFVIEGLKEADKDEFCRCELKLQKWYGDLRGKPFAIEAENSILDISGFSKQYNCAFIWQKDGVKKLNLYLIINYFKGGKLRFKKIKPEAFEANRFYTVINKKSGEIVPMEVNFNFDDPNLIILPLAFGKRQGREFIWNDLLSLETGSLKLANGRVIEKTLYNRRTRQDEPALFVALTFERREVLDSSNIKPMNLIGVDRGENIPAVIALTDPEGCPLSRFKDSLGNPTHILRIGESYKEKQRTIQAKKEVEQRRAGGYSRKYASKAKNLADDMVRNTARDLLYYAVTQDAMLIFENLSRGFGRQGKRTFMAERQYTRMEDWLTAKLAYEGLPSKTYLSKTLAQYTSKTCSNCGFTITSADYDRVLEKLKKTATGWMTTINGKELKVEGQITYYNRYKRQNVVKDLSVELDRLSEESVNNDISSWTKGRSGEALSLLKKRFSHRPVQEKFVCLNCGFETHADEQAALNIARSWLFLRSQEYKKYQTNKTTGNTDKRAFVETWQSFYRKKLKEVWKPAV

SEQ ID NO: 36878 - protein, 979 aa, synthetic construct
  REGION 1..979: note = engineered CasX variant
QEIKRINKIRRRLVKDSNTKKAGKTGPMKTLLVRVMTPDLRERLENLRKKPENIPQPISNTSRANLNKLLTDYTEMKKAILHVYWEEFQKDPVGLMSRVAQPASKKIDQNKLKPEMDEKGNLTTAGFACSQCGQPLFVYKLEQVSEKGKAYTNYFGRCNVAEHEKLILLAQLKPEKDSDEAVTYSLGKFGQRALDFYSIHVTKESTHPVKPLAQIAGNRYASVPVGKALSDACMGTIASFLSKYQDIIIEHQKVVKGNQKRLESLRELAGKENLEYPSVTLPPQPHTKEGVDAYNEVIARVRMWVNLNLWQKLKLSRDDAKPLLRLKGFPSFPLVERQANEVDWWDMVCNVKKLINEKKEDGKVFWQNLAGYKRQEALRPYLSSEEDRKKGKKFARTQLGDLLLHLEKKHEGEDWGKVYDEAWERIDKKVEGLSKHIKLEEERRSEDAQSKAALTDWLRAKASFVIEGLKEADKDEFCRCELKLQKWYGDLRGKPFAIEAENSILDISGFSKQYNCAFIWQKDGVKKLNLYLIINYFKGGKLRFKKIKPEAFEANRFYTVINKKSGEIVPMEVNFNFDDPNLIILPLAFGKRQGREFIWNDLLSLETGSLKLANGRVIEKTLYNRRTRQDEPALFVALTFERREVLDSSNIKPMNLIGVDRGENIPAVIALTDPEGCPLSRFKDSLGNPTHILRIGESYKEKQRTIQAKKEVEQRRAGGYSRKYASKAKNLADDMVRNTARDLLYYAVTQDAMLIFENLSRGFGRQGKRTFMAERQYTRMEDWLTAKLAYEGLPSKTYLSKTLAQYTSKTCSNCGFTITSADYDRVLEKLKKTATGWMTTINGKELKVEGQITYYNRYKRQNVVKDLSVELDRLSEESVNNDISSWTKGRSGEALSLLKKRFSHRPVQEKFVCLNCGFETHADEQAALNIARSWLFLRSQEYKKYQTNKTTGNTDKRAFVETWQSFYRKKLKEVWKPAV

SEQ ID NO: 36879 - protein, 979 aa, synthetic construct
  REGION 1..979: note = engineered CasX variant
QEIKRINKIRRRLVKDSNTKKAGKTGPMKTLLVRVMTPDLRERLENLRKKPENIPQPISNTSRANLNKLLTDYTEMKKAILHVYWEEFQKDPVGLMSRVAQPASKKIDQNKLKPEMDEKGNLTTAGFACSQCGQPLFVYKLEQVSEKGKAYTNYFGRCNVAEHEKLIKLAQLKPEKDSDEAVTYSLGKFGQRALDFYSIHVTKESTHPVKPLAQIAGNRYASGPVGKALSDACMGTIASFLSKYQDIIIEHQKVVKGNQKRLESLRELAGKENLEYPSVTLPPQPHTKEGVDAYNEVIARVRMWVNLNLWQKLKLSRDDAKPLLRLKGFPSFPLVERQANEVDWWDMVCNVKKLINEKKEDGKVFWQNLAGYKRQEALRPYLSSEEDRKKGKKFARTQLGDLLLHLEKKHEGEDWGKVYDEAWERIDKKVEGLSKHIKLEEERRSEDAQSKAALTDWLRAKASFVIEGLKEADKDEFCRCELKLQKWYGDLRGKPFAIEAENSILDISGFSKQYNCAFIWQKDGVKKLNLYLIINYFKGGKLRFKKIKPEAFEANRFYTVINKKSGEIVPMEVNFNFDDPNLIILPLAFGKRQGREFIWNDLLSLETGSLKLANGRVIEKTLYNRRTRQDEPALFVALTFERREVLDSSNIKPMNLIGVDRGENIPAVIALTDPEGCPLSRFKDSLGNPTHILRIGESYKEKQRTIQAKKEVEQRRAGGYSRKYASKAKNLADDMVRNTARDLLYYAVTQDAMLIFENLSRGFGRQGKRTFMAERQYTRMEDWLTAKLAYEGLPSKTYLSKTLAQYTSKTCSNCGFTITSADYDRVLEKLKKTATGWMTTINGKELKVEGQITYYNRYKRQNVVKDLSVELDRLSEESVNNDISSWTKGRSGEALSLLKKRFSHRPVQEKFVCLNCGFETHADEQAALNIARSWLFLRSQEYKKYQTNKTTGNTDKRAFVETWQSFYRKKLKEVWKPAV

SEQ ID NO: 36880 - protein, 978 aa, synthetic construct
  REGION 1..978: note = engineered CasX variant
QEIKRINKIRRRLVKDSNTKKAGKTGPMKTLLVRVMTPDLRERLENLRKKPENIPQPISNTSRANLNKLLTDYTEMKKAILHVYWEEFQKDPVGLMSRVAQPASKKIDQNKLKPEMDEKGNLTTAGFACSQCGQPLFVYKLEQVSEKGKAYTNYFGRCNVAEHEKLILLAQLKPEKDSDEAVTYSLGKFGQRALDFYSIHVTKESTHPVKPLAQIAGNRYASPVGKALSDACMGTIASFLSKYQDIIIEHQKVVKGNQKRLESLRELAGKENLEYPSVTLPPQPHTKEGVDAYNEVIARVRMWVNLNLWQKLKLSRDDAKPLLRLKGFPSFPLVERQANEVDWWDMVCNVKKLINEKKEDGKVFWQNLAGYKRQEALRPYLSSEEDRKKGKKFARTQLGDLLLHLEKKHEGEDWGKVYDEAWERIDKKVEGLSKHIKLEEERRSEDAQSKAALTDWLRAKASFVIEGLKEADKDEFCRCELKLQKWYGDLRGKPFAIEAENSILDISGFSKQYNCAFIWQKDGVKKLNLYLIINYFKGGKLRFKKIKPEAFEANRFYTVINKKSGEIVPMEVNFNFDDPNLIILPLAFGKRQGREFIWNDLLSLETGSLKLANGRVIEKTLYNRRTRQDEPALFVALTFERREVLDSSNIKPMNLIGVDRGENIPAVIALTDPEGCPLSRFKDSLGNPTHILRIGESYKEKQRTIQAKKEVEQRRAGGYSRKYASKAKNLADDMVRNTARDLLYYAVTQDAMLIFENLSRGFGRQGKRTFMAERQYTRMEDWLTAKLAYEGLPSKTYLSKTLAQYTSKTCSNCGFTITSADYDRVLEKLKKTATGWMTTINGKELKVEGQITYYNRYKRQNVVKDLSVELDRLSEESVNNDISSWTKGRSGEALSLLKKRFSHRPVQEKFVCLNCGFETHADEQAALNIARSWLFLRSQEYKKYQTNKTTGNTDKRAFVETWQSFYRKKLKEVWKPAV

SEQ ID NO: 36881 - protein, 978 aa, synthetic construct
  REGION 1..978: note = engineered CasX variant
QEIKRINKIRRRLVKDSNTKKAGKTGPMKTLLVRVMTPDLRERLENLRKKPENIPQPISNTSRANLNKLLTDYTEMKKAILHVYWEEFQKDPVGLMSRVAQPASKKIDQNKLKPEMDEKGNLTTAGFACSQCGQPLFVYKLEQVSEKGKAYTNYFGRCNVAEHEKLILLAQLKPEKDSDEAVTYSLGKFGQRALDFYSIHVTKESTHPVKPLAQIAGNRYASYPVGKALSDACMGTIASFLSKYQDIIIEHQKVVKGNQKRLESLRELAGKENLEYPSVTLPPQPHTKEGVDAYNEVIARVRMWVNLNLWQKLKLSRDDAKPLLRLKGFPSFPLVERQANEVDWWDMVCNVKKLINEKKEDGKVFWQNLAGYKRQEALRPYLSSEEDRKKGKKFARTQLGDLLLHLEKKHGEDWGKVYDEAWERIDKKVEGLSKHIKLEEERRSEDAQSKAALTDWLRAKASFVIEGLKEADKDEFCRCDLKLQKWYGDLRGKPFAIEAENSILDISGFSKQYNCAFIWQKDGVKKLNLYLIINYFKGGKLRFKKIKPEAFEANRFYTVINKKSGEIVPMEVNFNFDDPNLIILPLAFGKRQGREFIWNDLLSLETGSLKLANGRVIEKTLYNRRTRQDEPALFVALTFERREVLDSSNIKPMNLIGVDRGENIPAVIALTDPEGCPLSRFKDSLGNPTHILRIGESYKEKQRTIQAKKEVEQRRAGGYSRKYASKAKNLADDMVRNTARDLLYYAVTQDAMLIFENLSRGFGRQGKRTFMAERQYTRMEDWLTAKLAYEGLPSKTYLSKTLAQYTSKTCSNCGFTITSADYDRVLEKLKKTATGWMTTINGKELKVEGQITYYNRYKRQNVVKDLSVELDRLSEESVNNDISSWTKGRSGEALSLLKKRFSHRPVQEKFVCLNCGFETHADEQAALNIARSWLFLRSQEYKKYQTNKTTGNTDKRAFVETWQSFYRKKLKEVWKPAV

SEQ ID NO: 36882 - protein, 978 aa, synthetic construct
  REGION 1..978: note = engineered CasX variant
QEIKRINKIRRRLVKDSNTKKAGKTGPMKTLLVRVMTPDLRERLENLRKKPENIPQPISNTSRANLNKLLTDYTEMKKAILHVYWEEFQKDPVGLMSRVAQPASKKIDQNKLKPEMDEKGNLTTAGFACSQCGQPLFVYKLEQVSEKGKAYTNYFGRCNVAEHEKLILLAQLKPEKDSDEAVTYSLGKFGQRALDFYSIHVTKESTHPVKPLAQIAGNRYASHPVGKALSDACMGTIASFLSKYQDIIIEHQKVVKGNQKRLESLRELAGKENLEYPSVTLPPQPHTKEGVDAYNEVIARVRMWVNLNLWQKLKLSRDDAKPLLRLKGFPSFPLVERQANEVDWWDMVCNVKKLINEKKEDGKVFWQNLAGYKRQEALRPYLSSEEDRKKGKKFARTQLGDLLLHLEKKHGEDWGKVYDEAWERIDKKVEGLSKHIKLEEERRSEDAQSKAALTDWLRAKASFVIEGLKEADKDEFCRCDLKLQKWYGDLRGKPFAIEAENSILDISGFSKQYNCAFIWQKDGVKKLNLYLIINYFKGGKLRFKKIKPEAFEANRFYTVINKKSGEIVPMEVNFNFDDPNLIILPLAFGKRQGREFIWNDLLSLETGSLKLANGRVIEKTLYNRRTRQDEPALFVALTFERREVLDSSNIKPMNLIGVDRGENIPAVIALTDPEGCPLSRFKDSLGNPTHILRIGESYKEKQRTIQAKKEVEQRRAGGYSRKYASKAKNLADDMVRNTARDLLYYAVTQDAMLIFENLSRGFGRQGKRTFMAERQYTRMEDWLTAKLAYEGLPSKTYLSKTLAQYTSKTCSNCGFTITSADYDRVLEKLKKTATGWMTTINGKELKVEGQITYYNRYKRQNVVKDLSVELDRLSEESVNNDISSWTKGRSGEALSLLKKRFSHRPVQEKFVCLNCGFETHADEQAALNIARSWLFLRSQEYKKYQTNKTTGNTDKRAFVETWQSFYRKKLKEVWKPAV

SEQ ID NO: 36883 - protein, 978 aa, synthetic construct
  REGION 1..978: note = engineered CasX variant
QEIKRINKIRRRLVKDSNTKKAGKTGPMKTLLVRVMTPDLRERLENLRKKPENIPQPISNTSRANLNKLLTDYTEMKKAILHVYWEEFQKDPVGLMSRVAQPASKKIDQNKLKPEMDEKGNLTTAGFACSQCGQPLFVYKLEQVSEKGKAYTNYFGRCNVAEHEKLILLAQLKPEKDSDEAVTYSLGKFGQRALDFYSIHVTKESTHPVKPLAQIAGNRYASSPVGKALSDACMGTIASFLSKYQDIIIEHQKVVKGNQKRLESLRELAGKENLEYPSVTLPPQPHTKEGVDAYNEVIARVRMWVNLNLWQKLKLSRDDAKPLLRLKGFPSFPLVERQANEVDWWDMVCNVKKLINEKKEDGKVFWQNLAGYKRQEALRPYLSSEEDRKKGKKFARTQLGDLLLHLEKKHGEDWGKVYDEAWERIDKKVEGLSKHIKLEEERRSEDAQSKAALTDWLRAKASFVIEGLKEADKDEFCRCDLKLQKWYGDLRGKPFAIEAENSILDISGFSKQYNCAFIWQKDGVKKLNLYLIINYFKGGKLRFKKIKPEAFEANRFYTVINKKSGEIVPMEVNFNFDDPNLIILPLAFGKRQGREFIWNDLLSLETGSLKLANGRVIEKTLYNRRTRQDEPALFVALTFERREVLDSSNIKPMNLIGVDRGENIPAVIALTDPEGCPLSRFKDSLGNPTHILRIGESYKEKQRTIQAKKEVEQRRAGGYSRKYASKAKNLADDMVRNTARDLLYYAVTQDAMLIFENLSRGFGRQGKRTFMAERQYTRMEDWLTAKLAYEGLPSKTYLSKTLAQYTSKTCSNCGFTITSADYDRVLEKLKKTATGWMTTINGKELKVEGQITYYNRYKRQNVVKDLSVELDRLSEESVNNDISSWTKGRSGEALSLLKKRFSHRPVQEKFVCLNCGFETHADEQAALNIARSWLFLRSQEYKKYQTNKTTGNTDKRAFVETWQSFYRKKLKEVWKPAV

SEQ ID NO: 36884 - protein, 978 aa, synthetic construct
  REGION 1..978: note = engineered CasX variant
QEIKRINKIRRRLVKDSNTKKAGKTGPMKTLLVRVMTPDLRERLENLRKKPENIPQPISNTSRANLNKLLTDYTEMKKAILHVYWEEFQKDPVGLMSRVAQPASKKIDQNKLKPEMDEKGNLTTAGFACSQCGQPLFVYKLEQVSEKGKAYTNYFGRCNVAEHEKLILLAQLKPEKDSDEAVTYSLGKFGQRALDFYSIHVTKESTHPVKPLAQIAGNRYASTPVGKALSDACMGTIASFLSKYQDIIIEHQKVVKGNQKRLESLRELAGKENLEYPSVTLPPQPHTKEGVDAYNEVIARVRMWVNLNLWQKLKLSRDDAKPLLRLKGFPSFPLVERQANEVDWWDMVCNVKKLINEKKEDGKVFWQNLAGYKRQEALRPYLSSEEDRKKGKKFARTQLGDLLLHLEKKHGEDWGKVYDEAWERIDKKVEGLSKHIKLEEERRSEDAQSKAALTDWLRAKASFVIEGLKEADKDEFCRCDLKLQKWYGDLRGKPFAIEAENSILDISGFSKQYNCAFIWQKDGVKKLNLYLIINYFKGGKLRFKKIKPEAFEANRFYTVINKKSGEIVPMEVNFNFDDPNLIILPLAFGKRQGREFIWNDLLSLETGSLKLANGRVIEKTLYNRRTRQDEPALFVALTFERREVLDSSNIKPMNLIGVDRGENIPAVIALTDPEGCPLSRFKDSLGNPTHILRIGESYKEKQRTIQAKKEVEQRRAGGYSRKYASKAKNLADDMVRNTARDLLYYAVTQDAMLIFENLSRGFGRQGKRTFMAERQYTRMEDWLTAKLAYEGLPSKTYLSKTLAQYTSKTCSNCGFTITSADYDRVLEKLKKTATGWMTTINGKELKVEGQITYYNRYKRQNVVKDLSVELDRLSEESVNNDISSWTKGRSGEALSLLKKRFSHRPVQEKFVCLNCGFETHADEQAALNIARSWLFLRSQEYKKYQTNKTTGNTDKRAFVETWQSFYRKKLKEVWKPAV

SEQ ID NO: 36885 - protein, 978 aa, synthetic construct
  REGION 1..978: note = engineered CasX variant
QEIKRINKIRRRLVKDSNTKKAGKTGPMKTLLVRVMTPDLRERLENLRKKPENIPQPISNTSRANLNKLLTDYTEMKKAILHVYWEEFQKDPVGLMSRVAQPASKKIDQNKLKPEMDEKGNLTTAGFACSQCGQPLFVYKLEQVSEKGKAYTNYFGRCNVAEHEKLILLAQLKPEKDSDEAVTYSLGKFGQRALDFYSIHVTKESTHPVKPLAQIAGNRYASAPVGKALSDACMGTIASFLSKYQDIIIEHQKVVKGNQKRLESLRELAGKENLEYPSVTLPPQPHTKEGVDAYNEVIARVRMWVNLNLWQKLKLSRDDAKPLLRLKGFPSFPLVERQANEVDWWDMVCNVKKLINEKKEDGKVFWQNLAGYKRQEALRPYLSSEEDRKKGKKFARTQLGDLLLHLEKKHGEDWGKVYDEAWERIDKKVEGLSKHIKLEEERRSEDAQSKAALTDWLRAKASFVIEGLKEADKDEFCRCDLKLQKWYGDLRGKPFAIEAENSILDISGFSKQYNCAFIWQKDGVKKLNLYLIINYFKGGKLRFKKIKPEAFEANRFYTVINKKSGEIVPMEVNFNFDDPNLIILPLAFGKRQGREFIWNDLLSLETGSLKLANGRVIEKTLYNRRTRQDEPALFVALTFERREVLDSSNIKPMNLIGVDRGENIPAVIALTDPEGCPLSRFKDSLGNPTHILRIGESYKEKQRTIQAKKEVEQRRAGGYSRKYASKAKNLADDMVRNTARDLLYYAVTQDAMLIFENLSRGFGRQGKRTFMAERQYTRMEDWLTAKLAYEGLPSKTYLSKTLAQYTSKTCSNCGFTITSADYDRVLEKLKKTATGWMTTINGKELKVEGQITYYNRYKRQNVVKDLSVELDRLSEESVNNDISSWTKGRSGEALSLLKKRFSHRPVQEKFVCLNCGFETHADEQAALNIARSWLFLRSQEYKKYQTNKTTGNTDKRAFVETWQSFYRKKLKEVWKPAV

SEQ ID NO: 36886 - protein, 978 aa, synthetic construct
  REGION 1..978: note = engineered CasX variant
QEIKRINKIRRRLVKDSNTKKAGKTGPMKTLLVRVMTPDLRERLENLRKKPENIPQPISNTSRANLNKLLTDYTEMKKAILHVYWEEFQKDPVGLMSRVAQPASKKIDQNKLKPEMDEKGNLTTAGFACSQCGQPLFVYKLEQVSEKGKAYTNYFGRCNVAEHEKLILLAQLKPEKDSDEAVTYSLGKFGQRALDFYSIHVTKESTHPVKPLAQIAGNRYASVPVGKALSDACMGTIASFLSKYQDIIIEHQKVVKGNQKRLESLRELAGKENLEYPSVTLPPQPHTKEGVDAYNEVIARVRMWVNLNLWQKLKLSRDDAKPLLRLKGFPSFPLVERQANEVDWWDMVCNVKKLINEKKEDGKVFWQNLAGYKRQEALRPYLSSEEDRKKGKKFARTQLGDLLLHLEKKHGEDWGKVYDEAWERIDKKVEGLSKHIKLEEERRSEDAQSKAALTDWLRAKASFVIEGLKEADKDEFCRCDLKLQKWYGDLRGKPFAIEAENSILDISGFSKQYNCAFIWQKDGVKKLNLYLIINYFKGGKLRFKKIKPEAFEANRFYTVINKKSGEIVPMEVNFNFDDPNLIILPLAFGKRQGREFIWNDLLSLETGSLKLANGRVIEKTLYNRRTRQDEPALFVALTFERREVLDSSNIKPMNLIGVDRGENIPAVIALTDPEGCPLSRFKDSLGNPTHILRIGESYKEKQRTIQAKKEVEQRRAGGYSRKYASKAKNLADDMVRNTARDLLYYAVTQDAMLIFENLSRGFGRQGKRTFMAERQYTRMEDWLTAKLAYEGLPSKTYLSKTLAQYTSKTCSNCGFTITSADYDRVLEKLKKTATGWMTTINGKELKVEGQITYYNRYKRQNVVKDLSVELDRLSEESVNNDISSWTKGRSGEALSLLKKRFSHRPVQEKFVCLNCGFETHADEQAALNIARSWLFLRSQEYKKYQTNKTTGNTDKRAFVETWQSFYRKKLKEVWKPAV

SEQ ID NO: 36887 - protein, 978 aa, synthetic construct
  REGION 1..978: note = engineered CasX variant
QEIKRINKIRRRLVKDSNTKKAGKTGPMKTLLVRVMTPDLRERLENLRKKPENIPQPISNTSRANLNKLLTDYTEMKKAILHVYWEEFQKDPVGLMSRVAQPASKKIDQNKLKPEMDEKGNLTTAGFACSQCGQPLFVYKLEQVSEKGKAYTNYFGRCNVAEHEKLIKLAQLKPEKDSDEAVTYSLGKFGQRALDFYSIHVTKESTHPVKPLAQIAGNRYASGPVGKALSDACMGTIASFLSKYQDIIIEHQKVVKGNQKRLESLRELAGKENLEYPSVTLPPQPHTKEGVDAYNEVIARVRMWVNLNLWQKLKLSRDDAKPLLRLKGFPSFPLVERQANEVDWWDMVCNVKKLINEKKEDGKVFWQNLAGYKRQEALRPYLSSEEDRKKGKKFARTQLGDLLLHLEKKHGEDWGKVYDEAWERIDKKVEGLSKHIKLEEERRSEDAQSKAALTDWLRAKASFVIEGLKEADKDEFCRCDLKLQKWYGDLRGKPFAIEAENSILDISGFSKQYNCAFIWQKDGVKKLNLYLIINYFKGGKLRFKKIKPEAFEANRFYTVINKKSGEIVPMEVNFNFDDPNLIILPLAFGKRQGREFIWNDLLSLETGSLKLANGRVIEKTLYNRRTRQDEPALFVALTFERREVLDSSNIKPMNLIGVDRGENIPAVIALTDPEGCPLSRFKDSLGNPTHILRIGESYKEKQRTIQAKKEVEQRRAGGYSRKYASKAKNLADDMVRNTARDLLYYAVTQDAMLIFENLSRGFGRQGKRTFMAERQYTRMEDWLTAKLAYEGLPSKTYLSKTLAQYTSKTCSNCGFTITSADYDRVLEKLKKTATGWMTTINGKELKVEGQITYYNRYKRQNVVKDLSVELDRLSEESVNNDISSWTKGRSGEALSLLKKRFSHRPVQEKFVCLNCGFETHADEQAALNIARSWLFLRSQEYKKYQTNKTTGNTDKRAFVETWQSFYRKKLKEVWKPAV

SEQ ID NO: 36888 - protein, 977 aa, synthetic construct
  REGION 1..977: note = engineered CasX variant
QEIKRINKIRRRLVKDSNTKKAGKTGPMKTLLVRVMTPDLRERLENLRKKPENIPQPISNTSRANLNKLLTDYTEMKKAILHVYWEEFQKDPVGLMSRVAQPASKKIDQNKLKPEMDEKGNLTTAGFACSQCGQPLFVYKLEQVSEKGKAYTNYFGRCNVAEHEKLILLAQLKPEKDSDEAVTYSLGKFGQRALDFYSIHVTKESTHPVKPLAQIAGNRYASPVGKALSDACMGTIASFLSKYQDIIIEHQKVVKGNQKRLESLRELAGKENLEYPSVTLPPQPHTKEGVDAYNEVIARVRMWVNLNLWQKLKLSRDDAKPLLRLKGFPSFPLVERQANEVDWWDMVCNVKKLINEKKEDGKVFWQNLAGYKRQEALRPYLSSEEDRKKGKKFARTQLGDLLLHLEKKHGEDWGKVYDEAWERIDKKVEGLSKHIKLEEERRSEDAQSKAALTDWLRAKASFVIEGLKEADKDEFCRCDLKLQKWYGDLRGKPFAIEAENSILDISGFSKQYNCAFIWQKDGVKKLNLYLIINYFKGGKLRFKKIKPEAFEANRFYTVINKKSGEIVPMEVNFNFDDPNLIILPLAFGKRQGREFIWNDLLSLETGSLKLANGRVIEKTLYNRRTRQDEPALFVALTFERREVLDSSNIKPMNLIGVDRGENIPAVIALTDPEGCPLSRFKDSLGNPTHILRIGESYKEKQRTIQAKKEVEQRRAGGYSRKYASKAKNLADDMVRNTARDLLYYAVTQDAMLIFENLSRGFGRQGKRTFMAERQYTRMEDWLTAKLAYEGLPSKTYLSKTLAQYTSKTCSNCGFTITSADYDRVLEKLKKTATGWMTTINGKELKVEGQITYYNRYKRQNVVKDLSVELDRLSEESVNNDISSWTKGRSGEALSLLKKRFSHRPVQEKFVCLNCGFETHADEQAALNIARSWLFLRSQEYKKYQTNKTTGNTDKRAFVETWQSFYRKKLKEVWKPAV

SEQ ID NO: 36889 - protein, 978 aa, synthetic construct
  REGION 1..978: note = engineered CasX variant
QEIKRINKIRRRLVKDSNTKKAGKTGPMKTLLVRVMTPDLRERLENLRKKPENIPQPISNTSRANLNKLLTDYTEMKKAILHVYWEEFQKDPVGLMSRVAQPASKKIDQNKLKPEMDEKGNLTTAGFACSQCGQPLFVYKLEQVSEKGKAYTNYFGRCNVAEHEKLILLAQLKPEKDSDEAVTYSLGKFGQRALDFYSIHVTKESTHPVKPLAQIAGNRYASYPVGKALSDACMGTIASFLSKYQDIIIEHQKVVKGNQKRLESLRELAGKENLEYPSVTLPPQPHTKEGVDAYNEVIARVRMWVNLNLWQKLKLSRDDAKPLLRLKGFPSFPLVERQANEVDWWDMVCNVKKLINEKKEDGKVFWQNLAGYKRQEALRPYLSSEEDRKKGKKFARTQLGDLLLHLEKKHGEDWGKVYDEAWERIDKKVEGLSKHIKLEEERRSEDAQSKAALTDWLRAKASFVIEGLKEADKDEFCRCELKLQKWYGDLRGKPFAIEAENSILDISGFSKQYNCAFIWQKDGVKKLNLYLIINYFKGGKLRFKKIKPEAFEANRFYTVINKKSGEIVPMEVNFNFDDPNLIILPLAFGKRFGREFIWNDLLSLETGSLKLANGRVIEKTLYNRRTRQDEPALFVALTFERREVLDSSNIKPMNLIGVDRGENIPAVIALTDPEGCPLSRFKDSLGNPTHILRIGESYKEKQRTIQAKKEVEQRRAGGYSRKYASKAKNLADDMVRNTARDLLYYAVTQDAMLIFENLSRGFGRQGKRTFMAERQYTRMEDWLTAKLAYEGLPSKTYLSKTLAQYTSKTCSNCGFTITSADYDRVLEKLKKTATGWMTTINGKELKVEGQITYYNRYKRQNVVKDLSVELDRLSEESVNNDISSWTKGRSGEALSLLKKRFSHRPVQEKFVCLNCGFETHADEQAALNIARSWLFLRSQEYKKYQTNKTTGNTDKRAFVETWQSFYRKKLKEVWKPAV

SEQ ID NO: 36890 - protein, 978 aa, synthetic construct
  REGION 1..978: note = engineered CasX variant
QEIKRINKIRRRLVKDSNTKKAGKTGPMKTLLVRVMTPDLRERLENLRKKPENIPQPISNTSRANLNKLLTDYTEMKKAILHVYWEEFQKDPVGLMSRVAQPASKKIDQNKLKPEMDEKGNLTTAGFACSQCGQPLFVYKLEQVSEKGKAYTNYFGRCNVAEHEKLILLAQLKPEKDSDEAVTYSLGKFGQRALDFYSIHVTKESTHPVKPLAQIAGNRYASHPVGKALSDACMGTIASFLSKYQDIIIEHQKVVKGNQKRLESLRELAGKENLEYPSVTLPPQPHTKEGVDAYNEVIARVRMWVNLNLWQKLKLSRDDAKPLLRLKGFPSFPLVERQANEVDWWDMVCNVKKLINEKKEDGKVFWQNLAGYKRQEALRPYLSSEEDRKKGKKFARTQLGDLLLHLEKKHGEDWGKVYDEAWERIDKKVEGLSKHIKLEEERRSEDAQSKAALTDWLRAKASFVIEGLKEADKDEFCRCELKLQKWYGDLRGKPFAIEAENSILDISGFSKQYNCAFIWQKDGVKKLNLYLIINYFKGGKLRFKKIKPEAFEANRFYTVINKKSGEIVPMEVNFNFDDPNLIILPLAFGKRFGREFIWNDLLSLETGSLKLANGRVIEKTLYNRRTRQDEPALFVALTFERREVLDSSNIKPMNLIGVDRGENIPAVIALTDPEGCPLSRFKDSLGNPTHILRIGESYKEKQRTIQAKKEVEQRRAGGYSRKYASKAKNLADDMVRNTARDLLYYAVTQDAMLIFENLSRGFGRQGKRTFMAERQYTRMEDWLTAKLAYEGLPSKTYLSKTLAQYTSKTCSNCGFTITSADYDRVLEKLKKTATGWMTTINGKELKVEGQITYYNRYKRQNVVKDLSVELDRLSEESVNNDISSWTKGRSGEALSLLKKRFSHRPVQEKFVCLNCGFETHADEQAALNIARSWLFLRSQEYKKYQTNKTTGNTDKRAFVETWQSFYRKKLKEVWKPAV

SEQ ID NO: 36891 - protein, 978 aa, synthetic construct
  REGION 1..978: note = engineered CasX variant
QEIKRINKIRRRLVKDSNTKKAGKTGPMKTLLVRVMTPDLRERLENLRKKPENIPQPISNTSRANLNKLLTDYTEMKKAILHVYWEEFQKDPVGLMSRVAQPASKKIDQNKLKPEMDEKGNLTTAGFACSQCGQPLFVYKLEQVSEKGKAYTNYFGRCNVAEHEKLILLAQLKPEKDSDEAVTYSLGKFGQRALDFYSIHVTKESTHPVKPLAQIAGNRYASSPVGKALSDACMGTIASFLSKYQDIIIEHQKVVKGNQKRLESLRELAGKENLEYPSVTLPPQPHTKEGVDAYNEVIARVRMWVNLNLWQKLKLSRDDAKPLLRLKGFPSFPLVERQANEVDWWDMVCNVKKLINEKKEDGKVFWQNLAGYKRQEALRPYLSSEEDRKKGKKFARTQLGDLLLHLEKKHGEDWGKVYDEAWERIDKKVEGLSKHIKLEEERRSEDAQSKAALTDWLRAKASFVIEGLKEADKDEFCRCELKLQKWYGDLRGKPFAIEAENSILDISGFSKQYNCAFIWQKDGVKKLNLYLIINYFKGGKLRFKKIKPEAFEANRFYTVINKKSGEIVPMEVNFNFDDPNLIILPLAFGKRFGREFIWNDLLSLETGSLKLANGRVIEKTLYNRRTRQDEPALFVALTFERREVLDSSNIKPMNLIGVDRGENIPAVIALTDPEGCPLSRFKDSLGNPTHILRIGESYKEKQRTIQAKKEVEQRRAGGYSRKYASKAKNLADDMVRNTARDLLYYAVTQDAMLIFENLSRGFGRQGKRTFMAERQYTRMEDWLTAKLAYEGLPSKTYLSKTLAQYTSKTCSNCGFTITSADYDRVLEKLKKTATGWMTTINGKELKVEGQITYYNRYKRQNVVKDLSVELDRLSEESVNNDISSWTKGRSGEALSLLKKRFSHRPVQEKFVCLNCGFETHADEQAALNIARSWLFLRSQEYKKYQTNKTTGNTDKRAFVETWQSFYRKKLKEVWKPAV

SEQ ID NO: 36892 - protein, 978 aa, synthetic construct
  REGION 1..978: note = engineered CasX variant
QEIKRINKIRRRLVKDSNTKKAGKTGPMKTLLVRVMTPDLRERLENLRKKPENIPQPISNTSRANLNKLLTDYTEMKKAILHVYWEEFQKDPVGLMSRVAQPASKKIDQNKLKPEMDEKGNLTTAGFACSQCGQPLFVYKLEQVSEKGKAYTNYFGRCNVAEHEKLILLAQLKPEKDSDEAVTYSLGKFGQRALDFYSIHVTKESTHPVKPLAQIAGNRYASTPVGKALSDACMGTIASFLSKYQDIIIEHQKVVKGNQKRLESLRELAGKENLEYPSVTLPPQPHTKEGVDAYNEVIARVRMWVNLNLWQKLKLSRDDAKPLLRLKGFPSFPLVERQANEVDWWDMVCNVKKLINEKKEDGKVFWQNLAGYKRQEALRPYLSSEEDRKKGKKFARTQLGDLLLHLEKKHGEDWGKVYDEAWERIDKKVEGLSKHIKLEEERRSEDAQSKAALTDWLRAKASFVIEGLKEADKDEFCRCELKLQKWYGDLRGKPFAIEAENSILDISGFSKQYNCAFIWQKDGVKKLNLYLIINYFKGGKLRFKKIKPEAFEANRFYTVINKKSGEIVPMEVNFNFDDPNLIILPLAFGKRFGREFIWNDLLSLETGSLKLANGRVIEKTLYNRRTRQDEPALFVALTFERREVLDSSNIKPMNLIGVDRGENIPAVIALTDPEGCPLSRFKDSLGNPTHILRIGESYKEKQRTIQAKKEVEQRRAGGYSRKYASKAKNLADDMVRNTARDLLYYAVTQDAMLIFENLSRGFGRQGKRTFMAERQYTRMEDWLTAKLAYEGLPSKTYLSKTLAQYTSKTCSNCGFTITSADYDRVLEKLKKTATGWMTTINGKELKVEGQITYYNRYKRQNVVKDLSVELDRLSEESVNNDISSWTKGRSGEALSLLKKRFSHRPVQEKFVCLNCGFETHADEQAALNIARSWLFLRSQEYKKYQTNKTTGNTDKRAFVETWQSFYRKKLKEVWKPAV

SEQ ID NO: 36893 - protein, 978 aa, synthetic construct
  REGION 1..978: note = engineered CasX variant
QEIKRINKIRRRLVKDSNTKKAGKTGPMKTLLVRVMTPDLRERLENLRKKPENIPQPISNTSRANLNKLLTDYTEMKKAILHVYWEEFQKDPVGLMSRVAQPASKKIDQNKLKPEMDEKGNLTTAGFACSQCGQPLFVYKLEQVSEKGKAYTNYFGRCNVAEHEKLILLAQLKPEKDSDEAVTYSLGKFGQRALDFYSIHVTKESTHPVKPLAQIAGNRYASAPVGKALSDACMGTIASFLSKYQDIIIEHQKVVKGNQKRLESLRELAGKENLEYPSVTLPPQPHTKEGVDAYNEVIARVRMWVNLNLWQKLKLSRDDAKPLLRLKGFPSFPLVERQANEVDWWDMVCNVKKLINEKKEDGKVFWQNLAGYKRQEALRPYLSSEEDRKKGKKFARTQLGDLLLHLEKKHGEDWGKVYDEAWERIDKKVEGLSKHIKLEEERRSEDAQSKAALTDWLRAKASFVIEGLKEADKDEFCRCELKLQKWYGDLRGKPFAIEAENSILDISGFSKQYNCAFIWQKDGVKKLNLYLIINYFKGGKLRFKKIKPEAFEANRFYTVINKKSGEIVPMEVNFNFDDPNLIILPLAFGKRFGREFIWNDLLSLETGSLKLANGRVIEKTLYNRRTRQDEPALFVALTFERREVLDSSNIKPMNLIGVDRGENIPAVIALTDPEGCPLSRFKDSLGNPTHILRIGESYKEKQRTIQAKKEVEQRRAGGYSRKYASKAKNLADDMVRNTARDLLYYAVTQDAMLIFENLSRGFGRQGKRTFMAERQYTRMEDWLTAKLAYEGLPSKTYLSKTLAQYTSKTCSNCGFTITSADYDRVLEKLKKTATGWMTTINGKELKVEGQITYYNRYKRQNVVKDLSVELDRLSEESVNNDISSWTKGRSGEALSLLKKRFSHRPVQEKFVCLNCGFETHADEQAALNIARSWLFLRSQEYKKYQTNKTTGNTDKRAFVETWQSFYRKKLKEVWKPAV

SEQ ID NO: 36894 - protein, 978 aa, synthetic construct
  REGION 1..978: note = engineered CasX variant
QEIKRINKIRRRLVKDSNTKKAGKTGPMKTLLVRVMTPDLRERLENLRKKPENIPQPISNTSRANLNKLLTDYTEMKKAILHVYWEEFQKDPVGLMSRVAQPASKKIDQNKLKPEMDEKGNLTTAGFACSQCGQPLFVYKLEQVSEKGKAYTNYFGRCNVAEHEKLILLAQLKPEKDSDEAVTYSLGKFGQRALDFYSIHVTKESTHPVKPLAQIAGNRYASVPVGKALSDACMGTIASFLSKYQDIIIEHQKVVKGNQKRLESLRELAGKENLEYPSVTLPPQPHTKEGVDAYNEVIARVRMWVNLNLWQKLKLSRDDAKPLLRLKGFPSFPLVERQANEVDWWDMVCNVKKLINEKKEDGKVFWQNLAGYKRQEALRPYLSSEEDRKKGKKFARTQLGDLLLHLEKKHGEDWGKVYDEAWERIDKKVEGLSKHIKLEEERRSEDAQSKAALTDWLRAKASFVIEGLKEADKDEFCRCELKLQKWYGDLRGKPFAIEAENSILDISGFSKQYNCAFIWQKDGVKKLNLYLIINYFKGGKLRFKKIKPEAFEANRFYTVINKKSGEIVPMEVNFNFDDPNLIILPLAFGKRFGREFIWNDLLSLETGSLKLANGRVIEKTLYNRRTRQDEPALFVALTFERREVLDSSNIKPMNLIGVDRGENIPAVIALTDPEGCPLSRFKDSLGNPTHILRIGESYKEKQRTIQAKKEVEQRRAGGYSRKYASKAKNLADDMVRNTARDLLYYAVTQDAMLIFENLSRGFGRQGKRTFMAERQYTRMEDWLTAKLAYEGLPSKTYLSKTLAQYTSKTCSNCGFTITSADYDRVLEKLKKTATGWMTTINGKELKVEGQITYYNRYKRQNVVKDLSVELDRLSEESVNNDISSWTKGRSGEALSLLKKRFSHRPVQEKFVCLNCGFETHADEQAALNIARSWLFLRSQEYKKYQTNKTTGNTDKRAFVETWQSFYRKKLKEVWKPAV

SEQ ID NO: 36895 - protein, 978 aa, synthetic construct
  REGION 1..978: note = engineered CasX variant
QEIKRINKIRRRLVKDSNTKKAGKTGPMKTLLVRVMTPDLRERLENLRKKPENIPQPISNTSRANLNKLLTDYTEMKKAILHVYWEEFQKDPVGLMSRVAQPASKKIDQNKLKPEMDEKGNLTTAGFACSQCGQPLFVYKLEQVSEKGKAYTNYFGRCNVAEHEKLIKLAQLKPEKDSDEAVTYSLGKFGQRALDFYSIHVTKESTHPVKPLAQIAGNRYASGPVGKALSDACMGTIASFLSKYQDIIIEHQKVVKGNQKRLESLRELAGKENLEYPSVTLPPQPHTKEGVDAYNEVIARVRMWVNLNLWQKLKLSRDDAKPLLRLKGFPSFPLVERQANEVDWWDMVCNVKKLINEKKEDGKVFWQNLAGYKRQEALRPYLSSEEDRKKGKKFARTQLGDLLLHLEKKHGEDWGKVYDEAWERIDKKVEGLSKHIKLEEERRSEDAQSKAALTDWLRAKASFVIEGLKEADKDEFCRCELKLQKWYGDLRGKPFAIEAENSILDISGFSKQYNCAFIWQKDGVKKLNLYLIINYFKGGKLRFKKIKPEAFEANRFYTVINKKSGEIVPMEVNFNFDDPNLIILPLAFGKRFGREFIWNDLLSLETGSLKLANGRVIEKTLYNRRTRQDEPALFVALTFERREVLDSSNIKPMNLIGVDRGENIPAVIALTDPEGCPLSRFKDSLGNPTHILRIGESYKEKQRTIQAKKEVEQRRAGGYSRKYASKAKNLADDMVRNTARDLLYYAVTQDAMLIFENLSRGFGRQGKRTFMAERQYTRMEDWLTAKLAYEGLPSKTYLSKTLAQYTSKTCSNCGFTITSADYDRVLEKLKKTATGWMTTINGKELKVEGQITYYNRYKRQNVVKDLSVELDRLSEESVNNDISSWTKGRSGEALSLLKKRFSHRPVQEKFVCLNCGFETHADEQAALNIARSWLFLRSQEYKKYQTNKTTGNTDKRAFVETWQSFYRKKLKEVWKPAV

SEQ ID NO: 36896 - protein, 977 aa, synthetic construct
  REGION 1..977: note = engineered CasX variant
QEIKRINKIRRRLVKDSNTKKAGKTGPMKTLLVRVMTPDLRERLENLRKKPENIPQPISNTSRANLNKLLTDYTEMKKAILHVYWEEFQKDPVGLMSRVAQPASKKIDQNKLKPEMDEKGNLTTAGFACSQCGQPLFVYKLEQVSEKGKAYTNYFGRCNVAEHEKLILLAQLKPEKDSDEAVTYSLGKFGQRALDFYSIHVTKESTHPVKPLAQIAGNRYASPVGKALSDACMGTIASFLSKYQDIIIEHQKVVKGNQKRLESLRELAGKENLEYPSVTLPPQPHTKEGVDAYNEVIARVRMWVNLNLWQKLKLSRDDAKPLLRLKGFPSFPLVERQANEVDWWDMVCNVKKLINEKKEDGKVFWQNLAGYKRQEALRPYLSSEEDRKKGKKFARTQLGDLLLHLEKKHGEDWGKVYDEAWERIDKKVEGLSKHIKLEEERRSEDAQSKAALTDWLRAKASFVIEGLKEADKDEFCRCELKLQKWYGDLRGKPFAIEAENSILDISGFSKQYNCAFIWQKDGVKKLNLYLIINYFKGGKLRFKKIKPEAFEANRFYTVINKKSGEIVPMEVNFNFDDPNLIILPLAFGKRFGREFIWNDLLSLETGSLKLANGRVIEKTLYNRRTRQDEPALFVALTFERREVLDSSNIKPMNLIGVDRGENIPAVIALTDPEGCPLSRFKDSLGNPTHILRIGESYKEKQRTIQAKKEVEQRRAGGYSRKYASKAKNLADDMVRNTARDLLYYAVTQDAMLIFENLSRGFGRQGKRTFMAERQYTRMEDWLTAKLAYEGLPSKTYLSKTLAQYTSKTCSNCGFTITSADYDRVLEKLKKTATGWMTTINGKELKVEGQITYYNRYKRQNVVKDLSVELDRLSEESVNNDISSWTKGRSGEALSLLKKRFSHRPVQEKFVCLNCGFETHADEQAALNIARSWLFLRSQEYKKYQTNKTTGNTDKRAFVETWQSFYRKKLKEVWKPAV

SEQ ID NO: 36897 - protein, 978 aa, synthetic construct
  REGION 1..978: note = engineered CasX variant
QEIKRINKIRRRLVKDSNTKKAGKTGPMKTLLVRVMTPDLRERLENLRKKPENIPQPISNTSRANLNKLLTDYTEMKKAILHVYWEEFQKDPVGLMSRVAQPASKKIDQNKLKPEMDEKGNLTTAGFACSQCGQPLFVYKLEQVSEKGKAYTNYFGRCNVAEHEKLILLAQLKPEKDSDEAVTYSLGKFGQRALDFYSIHVTKESTHPVKPLAQIAGNRYASYPVGKALSDACMGTIASFLSKYQDIIIEHQKVVKGNQKRLESLRELAGKENLEYPSVTLPPQPHTKEGVDAYNEVIARVRMWVNLNLWQKLKLSRDDAKPLLRLKGFPSFPLVERQANEVDWWDMVCNVKKLINEKKEDGKVFWQNLAGYKRQEALRPYLSSEEDRKKGKKFARTQLGDLLLHLEKKHGEDWGKVYDEAWERIDKKVEGLSKHIKLEEERRSEDAQSKAALTDWLRAKASFVIEGLKEADKDEFCRCELKLQKWYGDLRGKPFAIEAENSILDISGFSKQYNCAFIWQKDGVKKLNLYLIINYFKGGKLRFKKIKPEAFEANRFYTVINKKSGEIVPMEVNFNFDDPNLIILPLAFGKRVGREFIWNDLLSLETGSLKLANGRVIEKTLYNRRTRQDEPALFVALTFERREVLDSSNIKPMNLIGVDRGENIPAVIALTDPEGCPLSRFKDSLGNPTHILRIGESYKEKQRTIQAKKEVEQRRAGGYSRKYASKAKNLADDMVRNTARDLLYYAVTQDAMLIFENLSRGFGRQGKRTFMAERQYTRMEDWLTAKLAYEGLPSKTYLSKTLAQYTSKTCSNCGFTITSADYDRVLEKLKKTATGWMTTINGKELKVEGQITYYNRYKRQNVVKDLSVELDRLSEESVNNDISSWTKGRSGEALSLLKKRFSHRPVQEKFVCLNCGFETHADEQAALNIARSWLFLRSQEYKKYQTNKTTGNTDKRAFVETWQSFYRKKLKEVWKPAV

SEQ ID NO: 36898 - protein, 978 aa, synthetic construct
  REGION 1..978: note = engineered CasX variant
QEIKRINKIRRRLVKDSNTKKAGKTGPMKTLLVRVMTPDLRERLENLRKKPENIPQPISNTSRANLNKLLTDYTEMKKAILHVYWEEFQKDPVGLMSRVAQPASKKIDQNKLKPEMDEKGNLTTAGFACSQCGQPLFVYKLEQVSEKGKAYTNYFGRCNVAEHEKLILLAQLKPEKDSDEAVTYSLGKFGQRALDFYSIHVTKESTHPVKPLAQIAGNRYASHPVGKALSDACMGTIASFLSKYQDIIIEHQKVVKGNQKRLESLRELAGKENLEYPSVTLPPQPHTKEGVDAYNEVIARVRMWVNLNLWQKLKLSRDDAKPLLRLKGFPSFPLVERQANEVDWWDMVCNVKKLINEKKEDGKVFWQNLAGYKRQEALRPYLSSEEDRKKGKKFARTQLGDLLLHLEKKHGEDWGKVYDEAWERIDKKVEGLSKHIKLEEERRSEDAQSKAALTDWLRAKASFVIEGLKEADKDEFCRCELKLQKWYGDLRGKPFAIEAENSILDISGFSKQYNCAFIWQKDGVKKLNLYLIINYFKGGKLRFKKIKPEAFEANRFYTVINKKSGEIVPMEVNFNFDDPNLIILPLAFGKRVGREFIWNDLLSLETGSLKLANGRVIEKTLYNRRTRQDEPALFVALTFERREVLDSSNIKPMNLIGVDRGENIPAVIALTDPEGCPLSRFKDSLGNPTHILRIGESYKEKQRTIQAKKEVEQRRAGGYSRKYASKAKNLADDMVRNTARDLLYYAVTQDAMLIFENLSRGFGRQGKRTFMAERQYTRMEDWLTAKLAYEGLPSKTYLSKTLAQYTSKTCSNCGFTITSADYDRVLEKLKKTATGWMTTINGKELKVEGQITYYNRYKRQNVVKDLSVELDRLSEESVNNDISSWTKGRSGEALSLLKKRFSHRPVQEKFVCLNCGFETHADEQAALNIARSWLFLRSQEYKKYQTNKTTGNTDKRAFVETWQSFYRKKLKEVWKPAV

SEQ ID NO: 36899 - protein, 978 aa, synthetic construct
  REGION 1..978: note = engineered CasX variant
QEIKRINKIRRRLVKDSNTKKAGKTGPMKTLLVRVMTPDLRERLENLRKKPENIPQPISNTSRANLNKLLTDYTEMKKAILHVYWEEFQKDPVGLMSRVAQPASKKIDQNKLKPEMDEKGNLTTAGFACSQCGQPLFVYKLEQVSEKGKAYTNYFGRCNVAEHEKLILLAQLKPEKDSDEAVTYSLGKFGQRALDFYSIHVTKESTHPVKPLAQIAGNRYASSPVGKALSDACMGTIASFLSKYQDIIIEHQKVVKGNQKRLESLRELAGKENLEYPSVTLPPQPHTKEGVDAYNEVIARVRMWVNLNLWQKLKLSRDDAKPLLRLKGFPSFPLVERQANEVDWWDMVCNVKKLINEKKEDGKVFWQNLAGYKRQEALRPYLSSEEDRKKGKKFARTQLGDLLLHLEKKHGEDWGKVYDEAWERIDKKVEGLSKHIKLEEERRSEDAQSKAALTDWLRAKASFVIEGLKEADKDEFCRCELKLQKWYGDLRGKPFAIEAENSILDISGFSKQYNCAFIWQKDGVKKLNLYLIINYFKGGKLRFKKIKPEAFEANRFYTVINKKSGEIVPMEVNFNFDDPNLIILPLAFGKRVGREFIWNDLLSLETGSLKLANGRVIEKTLYNRRTRQDEPALFVALTFERREVLDSSNIKPMNLIGVDRGENIPAVIALTDPEGCPLSRFKDSLGNPTHILRIGESYKEKQRTIQAKKEVEQRRAGGYSRKYASKAKNLADDMVRNTARDLLYYAVTQDAMLIFENLSRGFGRQGKRTFMAERQYTRMEDWLTAKLAYEGLPSKTYLSKTLAQYTSKTCSNCGFTITSADYDRVLEKLKKTATGWMTTINGKELKVEGQITYYNRYKRQNVVKDLSVELDRLSEESVNNDISSWTKGRSGEALSLLKKRFSHRPVQEKFVCLNCGFETHADEQAALNIARSWLFLRSQEYKKYQTNKTTGNTDKRAFVETWQSFYRKKLKEVWKPAV

SEQ ID NO: 36900 - protein, 978 aa, synthetic construct
  REGION 1..978: note = engineered CasX variant
QEIKRINKIRRRLVKDSNTKKAGKTGPMKTLLVRVMTPDLRERLENLRKKPENIPQPISNTSRANLNKLLTDYTEMKKAILHVYWEEFQKDPVGLMSRVAQPASKKIDQNKLKPEMDEKGNLTTAGFACSQCGQPLFVYKLEQVSEKGKAYTNYFGRCNVAEHEKLILLAQLKPEKDSDEAVTYSLGKFGQRALDFYSIHVTKESTHPVKPLAQIAGNRYASTPVGKALSDACMGTIASFLSKYQDIIIEHQKVVKGNQKRLESLRELAGKENLEYPSVTLPPQPHTKEGVDAYNEVIARVRMWVNLNLWQKLKLSRDDAKPLLRLKGFPSFPLVERQANEVDWWDMVCNVKKLINEKKEDGKVFWQNLAGYKRQEALRPYLSSEEDRKKGKKFARTQLGDLLLHLEKKHGEDWGKVYDEAWERIDKKVEGLSKHIKLEEERRSEDAQSKAALTDWLRAKASFVIEGLKEADKDEFCRCELKLQKWYGDLRGKPFAIEAENSILDISGFSKQYNCAFIWQKDGVKKLNLYLIINYFKGGKLRFKKIKPEAFEANRFYTVINKKSGEIVPMEVNFNFDDPNLIILPLAFGKRVGREFIWNDLLSLETGSLKLANGRVIEKTLYNRRTRQDEPALFVALTFERREVLDSSNIKPMNLIGVDRGENIPAVIALTDPEGCPLSRFKDSLGNPTHILRIGESYKEKQRTIQAKKEVEQRRAGGYSRKYASKAKNLADDMVRNTARDLLYYAVTQDAMLIFENLSRGFGRQGKRTFMAERQYTRMEDWLTAKLAYEGLPSKTYLSKTLAQYTSKTCSNCGFTITSADYDRVLEKLKKTATGWMTTINGKELKVEGQITYYNRYKRQNVVKDLSVELDRLSEESVNNDISSWTKGRSGEALSLLKKRFSHRPVQEKFVCLNCGFETHADEQAALNIARSWLFLRSQEYKKYQTNKTTGNTDKRAFVETWQSFYRKKLKEVWKPAV

SEQ ID NO: 36901 - protein, 978 aa, synthetic construct
  REGION 1..978: note = engineered CasX variant
QEIKRINKIRRRLVKDSNTKKAGKTGPMKTLLVRVMTPDLRERLENLRKKPENIPQPISNTSRANLNKLLTDYTEMKKAILHVYWEEFQKDPVGLMSRVAQPASKKIDQNKLKPEMDEKGNLTTAGFACSQCGQPLFVYKLEQVSEKGKAYTNYFGRCNVAEHEKLILLAQLKPEKDSDEAVTYSLGKFGQRALDFYSIHVTKESTHPVKPLAQIAGNRYASAPVGKALSDACMGTIASFLSKYQDIIIEHQKVVKGNQKRLESLRELAGKENLEYPSVTLPPQPHTKEGVDAYNEVIARVRMWVNLNLWQKLKLSRDDAKPLLRLKGFPSFPLVERQANEVDWWDMVCNVKKLINEKKEDGKVFWQNLAGYKRQEALRPYLSSEEDRKKGKKFARTQLGDLLLHLEKKHGEDWGKVYDEAWERIDKKVEGLSKHIKLEEERRSEDAQSKAALTDWLRAKASFVIEGLKEADKDEFCRCELKLQKWYGDLRGKPFAIEAENSILDISGFSKQYNCAFIWQKDGVKKLNLYLIINYFKGGKLRFKKIKPEAFEANRFYTVINKKSGEIVPMEVNFNFDDPNLIILPLAFGKRVGREFIWNDLLSLETGSLKLANGRVIEKTLYNRRTRQDEPALFVALTFERREVLDSSNIKPMNLIGVDRGENIPAVIALTDPEGCPLSRFKDSLGNPTHILRIGESYKEKQRTIQAKKEVEQRRAGGYSRKYASKAKNLADDMVRNTARDLLYYAVTQDAMLIFENLSRGFGRQGKRTFMAERQYTRMEDWLTAKLAYEGLPSKTYLSKTLAQYTSKTCSNCGFTITSADYDRVLEKLKKTATGWMTTINGKELKVEGQITYYNRYKRQNVVKDLSVELDRLSEESVNNDISSWTKGRSGEALSLLKKRFSHRPVQEKFVCLNCGFETHADEQAALNIARSWLFLRSQEYKKYQTNKTTGNTDKRAFVETWQSFYRKKLKEVWKPAV

SEQ ID NO: 36902 - protein, 978 aa, synthetic construct
  REGION 1..978: note = engineered CasX variant
QEIKRINKIRRRLVKDSNTKKAGKTGPMKTLLVRVMTPDLRERLENLRKKPENIPQPISNTSRANLNKLLTDYTEMKKAILHVYWEEFQKDPVGLMSRVAQPASKKIDQNKLKPEMDEKGNLTTAGFACSQCGQPLFVYKLEQVSEKGKAYTNYFGRCNVAEHEKLILLAQLKPEKDSDEAVTYSLGKFGQRALDFYSIHVTKESTHPVKPLAQIAGNRYASVPVGKALSDACMGTIASFLSKYQDIIIEHQKVVKGNQKRLESLRELAGKENLEYPSVTLPPQPHTKEGVDAYNEVIARVRMWVNLNLWQKLKLSRDDAKPLLRLKGFPSFPLVERQANEVDWWDMVCNVKKLINEKKEDGKVFWQNLAGYKRQEALRPYLSSEEDRKKGKKFARTQLGDLLLHLEKKHGEDWGKVYDEAWERIDKKVEGLSKHIKLEEERRSEDAQSKAALTDWLRAKASFVIEGLKEADKDEFCRCELKLQKWYGDLRGKPFAIEAENSILDISGFSKQYNCAFIWQKDGVKKLNLYLIINYFKGGKLRFKKIKPEAFEANRFYTVINKKSGEIVPMEVNFNFDDPNLIILPLAFGKRVGREFIWNDLLSLETGSLKLANGRVIEKTLYNRRTRQDEPALFVALTFERREVLDSSNIKPMNLIGVDRGENIPAVIALTDPEGCPLSRFKDSLGNPTHILRIGESYKEKQRTIQAKKEVEQRRAGGYSRKYASKAKNLADDMVRNTARDLLYYAVTQDAMLIFENLSRGFGRQGKRTFMAERQYTRMEDWLTAKLAYEGLPSKTYLSKTLAQYTSKTCSNCGFTITSADYDRVLEKLKKTATGWMTTINGKELKVEGQITYYNRYKRQNVVKDLSVELDRLSEESVNNDISSWTKGRSGEALSLLKKRFSHRPVQEKFVCLNCGFETHADEQAALNIARSWLFLRSQEYKKYQTNKTTGNTDKRAFVETWQSFYRKKLKEVWKPAV

SEQ ID NO: 36903 - protein, 978 aa, synthetic construct
  REGION 1..978: note = engineered CasX variant
QEIKRINKIRRRLVKDSNTKKAGKTGPMKTLLVRVMTPDLRERLENLRKKPENIPQPISNTSRANLNKLLTDYTEMKKAILHVYWEEFQKDPVGLMSRVAQPASKKIDQNKLKPEMDEKGNLTTAGFACSQCGQPLFVYKLEQVSEKGKAYTNYFGRCNVAEHEKLIKLAQLKPEKDSDEAVTYSLGKFGQRALDFYSIHVTKESTHPVKPLAQIAGNRYASGPVGKALSDACMGTIASFLSKYQDIIIEHQKVVKGNQKRLESLRELAGKENLEYPSVTLPPQPHTKEGVDAYNEVIARVRMWVNLNLWQKLKLSRDDAKPLLRLKGFPSFPLVERQANEVDWWDMVCNVKKLINEKKEDGKVFWQNLAGYKRQEALRPYLSSEEDRKKGKKFARTQLGDLLLHLEKKHGEDWGKVYDEAWERIDKKVEGLSKHIKLEEERRSEDAQSKAALTDWLRAKASFVIEGLKEADKDEFCRCELKLQKWYGDLRGKPFAIEAENSILDISGFSKQYNCAFIWQKDGVKKLNLYLIINYFKGGKLRFKKIKPEAFEANRFYTVINKKSGEIVPMEVNFNFDDPNLIILPLAFGKRVGREFIWNDLLSLETGSLKLANGRVIEKTLYNRRTRQDEPALFVALTFERREVLDSSNIKPMNLIGVDRGENIPAVIALTDPEGCPLSRFKDSLGNPTHILRIGESYKEKQRTIQAKKEVEQRRAGGYSRKYASKAKNLADDMVRNTARDLLYYAVTQDAMLIFENLSRGFGRQGKRTFMAERQYTRMEDWLTAKLAYEGLPSKTYLSKTLAQYTSKTCSNCGFTITSADYDRVLEKLKKTATGWMTTINGKELKVEGQITYYNRYKRQNVVKDLSVELDRLSEESVNNDISSWTKGRSGEALSLLKKRFSHRPVQEKFVCLNCGFETHADEQAALNIARSWLFLRSQEYKKYQTNKTTGNTDKRAFVETWQSFYRKKLKEVWKPAV

SEQ ID NO: 36904 - protein, 977 aa, synthetic construct
  REGION 1..977: note = engineered CasX variant
QEIKRINKIRRRLVKDSNTKKAGKTGPMKTLLVRVMTPDLRERLENLRKKPENIPQPISNTSRANLNKLLTDYTEMKKAILHVYWEEFQKDPVGLMSRVAQPASKKIDQNKLKPEMDEKGNLTTAGFACSQCGQPLFVYKLEQVSEKGKAYTNYFGRCNVAEHEKLILLAQLKPEKDSDEAVTYSLGKFGQRALDFYSIHVTKESTHPVKPLAQIAGNRYASPVGKALSDACMGTIASFLSKYQDIIIEHQKVVKGNQKRLESLRELAGKENLEYPSVTLPPQPHTKEGVDAYNEVIARVRMWVNLNLWQKLKLSRDDAKPLLRLKGFPSFPLVERQANEVDWWDMVCNVKKLINEKKEDGKVFWQNLAGYKRQEALRPYLSSEEDRKKGKKFARTQLGDLLLHLEKKHGEDWGKVYDEAWERIDKKVEGLSKHIKLEEERRSEDAQSKAALTDWLRAKASFVIEGLKEADKDEFCRCELKLQKWYGDLRGKPFAIEAENSILDISGFSKQYNCAFIWQKDGVKKLNLYLIINYFKGGKLRFKKIKPEAFEANRFYTVINKKSGEIVPMEVNFNFDDPNLIILPLAFGKRVGREFIWNDLLSLETGSLKLANGRVIEKTLYNRRTRQDEPALFVALTFERREVLDSSNIKPMNLIGVDRGENIPAVIALTDPEGCPLSRFKDSLGNPTHILRIGESYKEKQRTIQAKKEVEQRRAGGYSRKYASKAKNLADDMVRNTARDLLYYAVTQDAMLIFENLSRGFGRQGKRTFMAERQYTRMEDWLTAKLAYEGLPSKTYLSKTLAQYTSKTCSNCGFTITSADYDRVLEKLKKTATGWMTTINGKELKVEGQITYYNRYKRQNVVKDLSVELDRLSEESVNNDISSWTKGRSGEALSLLKKRFSHRPVQEKFVCLNCGFETHADEQAALNIARSWLFLRSQEYKKYQTNKTTGNTDKRAFVETWQSFYRKKLKEVWKPAV

SEQ ID NO: 36905 - protein, 979 aa, synthetic construct
  REGION 1..979: note = engineered CasX variant
QEIKRINKIRRRLVKDSNTKKAGKTGPMKTLLVRVMTPDLRERLENLRKKPENIPQPISNTSRANLNKLLTDYTEMKKAILHVYWEEFQKDPVGLMSRVAQPASKKIDQNKLKPEMDEKGNLTTAGFACSQCGQPLFVYKLEQVSEKGKAYTNYFGRCNVAEHEKLILLAQLKPEKDSDEAVTYSLGKFGQRALDFYSIHVTKESTHPVKPLAQIAGNRYASYPVGKALSDACMGTIASFLSKYQDIIIEHQKVVKGNQKRLESLRELAGKENLEYPSVTLPPQPHTKEGVDAYNEVIARVRMWVNLNLWQKLKLSRDDAKPLLRLKGFPSFPLVERQANEVDWWDMVCNVKKLINEKKEDGKVFWQNLAGYKRQEALRPYLSSEEDRKKGKKFARTQLGDLLLHLEKKHGEDWGKVYDEAWERIDKKVEGLSKHIKLEEERRSEDAQSKAALTDWLRAKASFVIEGLKEADKDEFCRCELKLQKWYGDLRGKPFAIEAENSILDISGFSKQYNCAFIWQKDGVKKLNLYLIINYFKGGKLRFKKIKPEAFEANRFYTVINKKSGEIVPMEVNFNFDDPNLIILPLAFGKRQGREFIWNDLLSLETGSLKLANGRVIEKTLYNRRTRQDEPALFVALTFERREVLDSSNIKTPMNLIGVDRGENIPAVIALTDPEGCPLSRFKDSLGNPTHILRIGESYKEKQRTIQAKKEVEQRRAGGYSRKYASKAKNLADDMVRNTARDLLYYAVTQDAMLIFENLSRGFGRQGKRTFMAERQYTRMEDWLTAKLAYEGLPSKTYLSKTLAQYTSKTCSNCGFTITSADYDRVLEKLKKTATGWMTTINGKELKVEGQITYYNRYKRQNVVKDLSVELDRLSEESVNNDISSWTKGRSGEALSLLKKRFSHRPVQEKFVCLNCGFETHADEQAALNIARSWLFLRSQEYKKYQTNKTTGNTDKRAFVETWQSFYRKKLKEVWKPAV

SEQ ID NO: 36906 - protein, 979 aa, synthetic construct
  REGION 1..979: note = engineered CasX variant
QEIKRINKIRRRLVKDSNTKKAGKTGPMKTLLVRVMTPDLRERLENLRKKPENIPQPISNTSRANLNKLLTDYTEMKKAILHVYWEEFQKDPVGLMSRVAQPASKKIDQNKLKPEMDEKGNLTTAGFACSQCGQPLFVYKLEQVSEKGKAYTNYFGRCNVAEHEKLILLAQLKPEKDSDEAVTYSLGKFGQRALDFYSIHVTKESTHPVKPLAQIAGNRYASHPVGKALSDACMGTIASFLSKYQDIIIEHQKVVKGNQKRLESLRELAGKENLEYPSVTLPPQPHTKEGVDAYNEVIARVRMWVNLNLWQKLKLSRDDAKPLLRLKGFPSFPLVERQANEVDWWDMVCNVKKLINEKKEDGKVFWQNLAGYKRQEALRPYLSSEEDRKKGKKFARTQLGDLLLHLEKKHGEDWGKVYDEAWERIDKKVEGLSKHIKLEEERRSEDAQSKAALTDWLRAKASFVIEGLKEADKDEFCRCELKLQKWYGDLRGKPFAIEAENSILDISGFSKQYNCAFIWQKDGVKKLNLYLIINYFKGGKLRFKKIKPEAFEANRFYTVINKKSGEIVPMEVNFNFDDPNLIILPLAFGKRQGREFIWNDLLSLETGSLKLANGRVIEKTLYNRRTRQDEPALFVALTFERREVLDSSNIKTPMNLIGVDRGENIPAVIALTDPEGCPLSRFKDSLGNPTHILRIGESYKEKQRTIQAKKEVEQRRAGGYSRKYASKAKNLADDMVRNTARDLLYYAVTQDAMLIFENLSRGFGRQGKRTFMAERQYTRMEDWLTAKLAYEGLPSKTYLSKTLAQYTSKTCSNCGFTITSADYDRVLEKLKKTATGWMTTINGKELKVEGQITYYNRYKRQNVVKDLSVELDRLSEESVNNDISSWTKGRSGEALSLLKKRFSHRPVQEKFVCLNCGFETHADEQAALNIARSWLFLRSQEYKKYQTNKTTGNTDKRAFVETWQSFYRKKLKEVWKPAV

SEQ ID NO: 36907 - protein, 979 aa, synthetic construct
  REGION 1..979: note = engineered CasX variant
QEIKRINKIRRRLVKDSNTKKAGKTGPMKTLLVRVMTPDLRERLENLRKKPENIPQPISNTSRANLNKLLTDYTEMKKAILHVYWEEFQKDPVGLMSRVAQPASKKIDQNKLKPEMDEKGNLTTAGFACSQCGQPLFVYKLEQVSEKGKAYTNYFGRCNVAEHEKLILLAQLKPEKDSDEAVTYSLGKFGQRALDFYSIHVTKESTHPVKPLAQIAGNRYASSPVGKALSDACMGTIASFLSKYQDIIIEHQKVVKGNQKRLESLRELAGKENLEYPSVTLPPQPHTKEGVDAYNEVIARVRMWVNLNLWQKLKLSRDDAKPLLRLKGFPSFPLVERQANEVDWWDMVCNVKKLINEKKEDGKVFWQNLAGYKRQEALRPYLSSEEDRKKGKKFARTQLGDLLLHLEKKHGEDWGKVYDEAWERIDKKVEGLSKHIKLEEERRSEDAQSKAALTDWLRAKASFVIEGLKEADKDEFCRCELKLQKWYGDLRGKPFAIEAENSILDISGFSKQYNCAFIWQKDGVKKLNLYLIINYFKGGKLRFKKIKPEAFEANRFYTVINKKSGEIVPMEVNFNFDDPNLIILPLAFGKRQGREFIWNDLLSLETGSLKLANGRVIEKTLYNRRTRQDEPALFVALTFERREVLDSSNIKTPMNLIGVDRGENIPAVIALTDPEGCPLSRFKDSLGNPTHILRIGESYKEKQRTIQAKKEVEQRRAGGYSRKYASKAKNLADDMVRNTARDLLYYAVTQDAMLIFENLSRGFGRQGKRTFMAERQYTRMEDWLTAKLAYEGLPSKTYLSKTLAQYTSKTCSNCGFTITSADYDRVLEKLKKTATGWMTTINGKELKVEGQITYYNRYKRQNVVKDLSVELDRLSEESVNNDISSWTKGRSGEALSLLKKRFSHRPVQEKFVCLNCGFETHADEQAALNIARSWLFLRSQEYKKYQTNKTTGNTDKRAFVETWQSFYRKKLKEVWKPAV

SEQ ID NO: 36908 - protein, 979 aa, synthetic construct
  REGION 1..979: note = engineered CasX variant
QEIKRINKIRRRLVKDSNTKKAGKTGPMKTLLVRVMTPDLRERLENLRKKPENIPQPISNTSRANLNKLLTDYTEMKKAILHVYWEEFQKDPVGLMSRVAQPASKKIDQNKLKPEMDEKGNLTTAGFACSQCGQPLFVYKLEQVSEKGKAYTNYFGRCNVAEHEKLILLAQLKPEKDSDEAVTYSLGKFGQRALDFYSIHVTKESTHPVKPLAQIAGNRYASTPVGKALSDACMGTIASFLSKYQDIIIEHQKVVKGNQKRLESLRELAGKENLEYPSVTLPPQPHTKEGVDAYNEVIARVRMWVNLNLWQKLKLSRDDAKPLLRLKGFPSFPLVERQANEVDWWDMVCNVKKLINEKKEDGKVFWQNLAGYKRQEALRPYLSSEEDRKKGKKFARTQLGDLLLHLEKKHGEDWGKVYDEAWERIDKKVEGLSKHIKLEEERRSEDAQSKAALTDWLRAKASFVIEGLKEADKDEFCRCELKLQKWYGDLRGKPFAIEAENSILDISGFSKQYNCAFIWQKDGVKKLNLYLIINYFKGGKLRFKKIKPEAFEANRFYTVINKKSGEIVPMEVNFNFDDPNLIILPLAFGKRQGREFIWNDLLSLETGSLKLANGRVIEKTLYNRRTRQDEPALFVALTFERREVLDSSNIKTPMNLIGVDRGENIPAVIALTDPEGCPLSRFKDSLGNPTHILRIGESYKEKQRTIQAKKEVEQRRAGGYSRKYASKAKNLADDMVRNTARDLLYYAVTQDAMLIFENLSRGFGRQGKRTFMAERQYTRMEDWLTAKLAYEGLPSKTYLSKTLAQYTSKTCSNCGFTITSADYDRVLEKLKKTATGWMTTINGKELKVEGQITYYNRYKRQNVVKDLSVELDRLSEESVNNDISSWTKGRSGEALSLLKKRFSHRPVQEKFVCLNCGFETHADEQAALNIARSWLFLRSQEYKKYQTNKTTGNTDKRAFVETWQSFYRKKLKEVWKPAV

SEQ ID NO: 36909 - protein, 979 aa, synthetic construct
  REGION 1..979: note = engineered CasX variant
QEIKRINKIRRRLVKDSNTKKAGKTGPMKTLLVRVMTPDLRERLENLRKKPENIPQPISNTSRANLNKLLTDYTEMKKAILHVYWEEFQKDPVGLMSRVAQPASKKIDQNKLKPEMDEKGNLTTAGFACSQCGQPLFVYKLEQVSEKGKAYTNYFGRCNVAEHEKLILLAQLKPEKDSDEAVTYSLGKFGQRALDFYSIHVTKESTHPVKPLAQIAGNRYASAPVGKALSDACMGTIASFLSKYQDIIIEHQKVVKGNQKRLESLRELAGKENLEYPSVTLPPQPHTKEGVDAYNEVIARVRMWVNLNLWQKLKLSRDDAKPLLRLKGFPSFPLVERQANEVDWWDMVCNVKKLINEKKEDGKVFWQNLAGYKRQEALRPYLSSEEDRKKGKKFARTQLGDLLLHLEKKHGEDWGKVYDEAWERIDKKVEGLSKHIKLEEERRSEDAQSKAALTDWLRAKASFVIEGLKEADKDEFCRCELKLQKWYGDLRGKPFAIEAENSILDISGFSKQYNCAFIWQKDGVKKLNLYLIINYFKGGKLRFKKIKPEAFEANRFYTVINKKSGEIVPMEVNFNFDDPNLIILPLAFGKRQGREFIWNDLLSLETGSLKLANGRVIEKTLYNRRTRQDEPALFVALTFERREVLDSSNIKTPMNLIGVDRGENIPAVIALTDPEGCPLSRFKDSLGNPTHILRIGESYKEKQRTIQAKKEVEQRRAGGYSRKYASKAKNLADDMVRNTARDLLYYAVTQDAMLIFENLSRGFGRQGKRTFMAERQYTRMEDWLTAKLAYEGLPSKTYLSKTLAQYTSKTCSNCGFTITSADYDRVLEKLKKTATGWMTTINGKELKVEGQITYYNRYKRQNVVKDLSVELDRLSEESVNNDISSWTKGRSGEALSLLKKRFSHRPVQEKFVCLNCGFETHADEQAALNIARSWLFLRSQEYKKYQTNKTTGNTDKRAFVETWQSFYRKKLKEVWKPAV

SEQ ID NO: 36910 - protein, 979 aa, synthetic construct
  REGION 1..979: note = engineered CasX variant
QEIKRINKIRRRLVKDSNTKKAGKTGPMKTLLVRVMTPDLRERLENLRKKPENIPQPISNTSRANLNKLLTDYTEMKKAILHVYWEEFQKDPVGLMSRVAQPASKKIDQNKLKPEMDEKGNLTTAGFACSQCGQPLFVYKLEQVSEKGKAYTNYFGRCNVAEHEKLILLAQLKPEKDSDEAVTYSLGKFGQRALDFYSIHVTKESTHPVKPLAQIAGNRYASVPVGKALSDACMGTIASFLSKYQDIIIEHQKVVKGNQKRLESLRELAGKENLEYPSVTLPPQPHTKEGVDAYNEVIARVRMWVNLNLWQKLKLSRDDAKPLLRLKGFPSFPLVERQANEVDWWDMVCNVKKLINEKKEDGKVFWQNLAGYKRQEALRPYLSSEEDRKKGKKFARTQLGDLLLHLEKKHGEDWGKVYDEAWERIDKKVEGLSKHIKLEEERRSEDAQSKAALTDWLRAKASFVIEGLKEADKDEFCRCELKLQKWYGDLRGKPFAIEAENSILDISGFSKQYNCAFIWQKDGVKKLNLYLIINYFKGGKLRFKKIKPEAFEANRFYTVINKKSGEIVPMEVNFNFDDPNLIILPLAFGKRQGREFIWNDLLSLETGSLKLANGRVIEKTLYNRRTRQDEPALFVALTFERREVLDSSNIKTPMNLIGVDRGENIPAVIALTDPEGCPLSRFKDSLGNPTHILRIGESYKEKQRTIQAKKEVEQRRAGGYSRKYASKAKNLADDMVRNTARDLLYYAVTQDAMLIFENLSRGFGRQGKRTFMAERQYTRMEDWLTAKLAYEGLPSKTYLSKTLAQYTSKTCSNCGFTITSADYDRVLEKLKKTATGWMTTINGKELKVEGQITYYNRYKRQNVVKDLSVELDRLSEESVNNDISSWTKGRSGEALSLLKKRFSHRPVQEKFVCLNCGFETHADEQAALNIARSWLFLRSQEYKKYQTNKTTGNTDKRAFVETWQSFYRKKLKEVWKPAV

SEQ ID NO: 36911 - protein, 979 aa, synthetic construct
  REGION 1..979: note = engineered CasX variant
QEIKRINKIRRRLVKDSNTKKAGKTGPMKTLLVRVMTPDLRERLENLRKKPENIPQPISNTSRANLNKLLTDYTEMKKAILHVYWEEFQKDPVGLMSRVAQPASKKIDQNKLKPEMDEKGNLTTAGFACSQCGQPLFVYKLEQVSEKGKAYTNYFGRCNVAEHEKLIKLAQLKPEKDSDEAVTYSLGKFGQRALDFYSIHVTKESTHPVKPLAQIAGNRYASGPVGKALSDACMGTIASFLSKYQDIIIEHQKVVKGNQKRLESLRELAGKENLEYPSVTLPPQPHTKEGVDAYNEVIARVRMWVNLNLWQKLKLSRDDAKPLLRLKGFPSFPLVERQANEVDWWDMVCNVKKLINEKKEDGKVFWQNLAGYKRQEALRPYLSSEEDRKKGKKFARTQLGDLLLHLEKKHGEDWGKVYDEAWERIDKKVEGLSKHIKLEEERRSEDAQSKAALTDWLRAKASFVIEGLKEADKDEFCRCELKLQKWYGDLRGKPFAIEAENSILDISGFSKQYNCAFIWQKDGVKKLNLYLIINYFKGGKLRFKKIKPEAFEANRFYTVINKKSGEIVPMEVNFNFDDPNLIILPLAFGKRQGREFIWNDLLSLETGSLKLANGRVIEKTLYNRRTRQDEPALFVALTFERREVLDSSNIKTPMNLIGVDRGENIPAVIALTDPEGCPLSRFKDSLGNPTHILRIGESYKEKQRTIQAKKEVEQRRAGGYSRKYASKAKNLADDMVRNTARDLLYYAVTQDAMLIFENLSRGFGRQGKRTFMAERQYTRMEDWLTAKLAYEGLPSKTYLSKTLAQYTSKTCSNCGFTITSADYDRVLEKLKKTATGWMTTINGKELKVEGQITYYNRYKRQNVVKDLSVELDRLSEESVNNDISSWTKGRSGEALSLLKKRFSHRPVQEKFVCLNCGFETHADEQAALNIARSWLFLRSQEYKKYQTNKTTGNTDKRAFVETWQSFYRKKLKEVWKPAV

SEQ ID NO: 36912 - protein, 978 aa, synthetic construct
  REGION 1..978: note = engineered CasX variant
QEIKRINKIRRRLVKDSNTKKAGKTGPMKTLLVRVMTPDLRERLENLRKKPENIPQPISNTSRANLNKLLTDYTEMKKAILHVYWEEFQKDPVGLMSRVAQPASKKIDQNKLKPEMDEKGNLTTAGFACSQCGQPLFVYKLEQVSEKGKAYTNYFGRCNVAEHEKLILLAQLKPEKDSDEAVTYSLGKFGQRALDFYSIHVTKESTHPVKPLAQIAGNRYASPVGKALSDACMGTIASFLSKYQDIIIEHQKVVKGNQKRLESLRELAGKENLEYPSVTLPPQPHTKEGVDAYNEVIARVRMWVNLNLWQKLKLSRDDAKPLLRLKGFPSFPLVERQANEVDWWDMVCNVKKLINEKKEDGKVFWQNLAGYKRQEALRPYLSSEEDRKKGKKFARTQLGDLLLHLEKKHGEDWGKVYDEAWERIDKKVEGLSKHIKLEEERRSEDAQSKAALTDWLRAKASFVIEGLKEADKDEFCRCELKLQKWYGDLRGKPFAIEAENSILDISGFSKQYNCAFIWQKDGVKKLNLYLIINYFKGGKLRFKKIKPEAFEANRFYTVINKKSGEIVPMEVNFNFDDPNLIILPLAFGKRQGREFIWNDLLSLETGSLKLANGRVIEKTLYNRRTRQDEPALFVALTFERREVLDSSNIKTPMNLIGVDRGENIPAVIALTDPEGCPLSRFKDSLGNPTHILRIGESYKEKQRTIQAKKEVEQRRAGGYSRKYASKAKNLADDMVRNTARDLLYYAVTQDAMLIFENLSRGFGRQGKRTFMAERQYTRMEDWLTAKLAYEGLPSKTYLSKTLAQYTSKTCSNCGFTITSADYDRVLEKLKKTATGWMTTINGKELKVEGQITYYNRYKRQNVVKDLSVELDRLSEESVNNDISSWTKGRSGEALSLLKKRFSHRPVQEKFVCLNCGFETHADEQAALNIARSWLFLRSQEYKKYQTNKTTGNTDKRAFVETWQSFYRKKLKEVWKPAV

SEQ ID NO: 36913 - protein, 979 aa, synthetic construct
  REGION 1..979: note = engineered CasX variant
QEIKRINKIRRRLVKDSNTKKAGKTGPMKTLLVRVMTPDLRERLENLRKKPENIPQPISNTSRANLNKLLTDYTEMKKAILHVYWEEFQKDPVGLMSRVAQPASKKIDQNKLKPEMDEKGNLTTAGFACSQCGQPLFVYKLEQVSEKGKAYTNYFGRCNVAEHEKLILLAQLKPEKDSDEAVTYSLGKFGQRALDFYSIHVTKESTHPVKPLAQIAGNRYASYPVGKALSDACMGTIASFLSKYQDIIIEHQKVVKGNQKRLESLRELAGKENLEYPSVTLPPQPHTKEGVDAYNEVIARVRMWVNLNLWQKLKLSRDDAKPLLRLKGFPSFPLVERQANEVDWWDMVCNVKKLINEKKEDGKVFWQNLAGYKRQEALRPYLSSEEDRKKGKKFARTQLGDLLLHLEKKHGEDWGKVYDEAWERIDKKVEGLSKHIKLEEERRSEDAQSKAALTDWLRAKASFVIEGLKEADKDEFCRCELKLQKWYGDLRGKPFAIEAENSILDISGFSKQYNCAFIWQKDGVKKLNLYLIINYFKGGKLRFKKIKPEAFEANRFYTVINKKSGEIVPMEVNFNFDDPNLIILPLAFGKRQGREFIWNDLLSLETGSLKLANGRVIEKTLYNRRTRQDEPALFVALTFERREVLDSSNIKPMSNLIGVDRGENIPAVIALTDPEGCPLSRFKDSLGNPTHILRIGESYKEKQRTIQAKKEVEQRRAGGYSRKYASKAKNLADDMVRNTARDLLYYAVTQDAMLIFENLSRGFGRQGKRTFMAERQYTRMEDWLTAKLAYEGLPSKTYLSKTLAQYTSKTCSNCGFTITSADYDRVLEKLKKTATGWMTTINGKELKVEGQITYYNRYKRQNVVKDLSVELDRLSEESVNNDISSWTKGRSGEALSLLKKRFSHRPVQEKFVCLNCGFETHADEQAALNIARSWLFLRSQEYKKYQTNKTTGNTDKRAFVETWQSFYRKKLKEVWKPAV

SEQ ID NO: 36914 - protein, 979 aa, synthetic construct
  REGION 1..979: note = engineered CasX variant
QEIKRINKIRRRLVKDSNTKKAGKTGPMKTLLVRVMTPDLRERLENLRKKPENIPQPISNTSRANLNKLLTDYTEMKKAILHVYWEEFQKDPVGLMSRVAQPASKKIDQNKLKPEMDEKGNLTTAGFACSQCGQPLFVYKLEQVSEKGKAYTNYFGRCNVAEHEKLILLAQLKPEKDSDEAVTYSLGKFGQRALDFYSIHVTKESTHPVKPLAQIAGNRYASHPVGKALSDACMGTIASFLSKYQDIIIEHQKVVKGNQKRLESLRELAGKENLEYPSVTLPPQPHTKEGVDAYNEVIARVRMWVNLNLWQKLKLSRDDAKPLLRLKGFPSFPLVERQANEVDWWDMVCNVKKLINEKKEDGKVFWQNLAGYKRQEALRPYLSSEEDRKKGKKFARTQLGDLLLHLEKKHGEDWGKVYDEAWERIDKKVEGLSKHIKLEEERRSEDAQSKAALTDWLRAKASFVIEGLKEADKDEFCRCELKLQKWYGDLRGKPFAIEAENSILDISGFSKQYNCAFIWQKDGVKKLNLYLIINYFKGGKLRFKKIKPEAFEANRFYTVINKKSGEIVPMEVNFNFDDPNLIILPLAFGKRQGREFIWNDLLSLETGSLKLANGRVIEKTLYNRRTRQDEPALFVALTFERREVLDSSNIKPMSNLIGVDRGENIPAVIALTDPEGCPLSRFKDSLGNPTHILRIGESYKEKQRTIQAKKEVEQRRAGGYSRKYASKAKNLADDMVRNTARDLLYYAVTQDAMLIFENLSRGFGRQGKRTFMAERQYTRMEDWLTAKLAYEGLPSKTYLSKTLAQYTSKTCSNCGFTITSADYDRVLEKLKKTATGWMTTINGKELKVEGQITYYNRYKRQNVVKDLSVELDRLSEESVNNDISSWTKGRSGEALSLLKKRFSHRPVQEKFVCLNCGFETHADEQAALNIARSWLFLRSQEYKKYQTNKTTGNTDKRAFVETWQSFYRKKLKEVWKPAV

SEQ ID NO: 36915 - protein, 979 aa, synthetic construct
  REGION 1..979: note = engineered CasX variant
QEIKRINKIRRRLVKDSNTKKAGKTGPMKTLLVRVMTPDLRERLENLRKKPENIPQPISNTSRANLNKLLTDYTEMKKAILHVYWEEFQKDPVGLMSRVAQPASKKIDQNKLKPEMDEKGNLTTAGFACSQCGQPLFVYKLEQVSEKGKAYTNYFGRCNVAEHEKLILLAQLKPEKDSDEAVTYSLGKFGQRALDFYSIHVTKESTHPVKPLAQIAGNRYASSPVGKALSDACMGTIASFLSKYQDIIIEHQKVVKGNQKRLESLRELAGKENLEYPSVTLPPQPHTKEGVDAYNEVIARVRMWVNLNLWQKLKLSRDDAKPLLRLKGFPSFPLVERQANEVDWWDMVCNVKKLINEKKEDGKVFWQNLAGYKRQEALRPYLSSEEDRKKGKKFARTQLGDLLLHLEKKHGEDWGKVYDEAWERIDKKVEGLSKHIKLEEERRSEDAQSKAALTDWLRAKASFVIEGLKEADKDEFCRCELKLQKWYGDLRGKPFAIEAENSILDISGFSKQYNCAFIWQKDGVKKLNLYLIINYFKGGKLRFKKIKPEAFEANRFYTVINKKSGEIVPMEVNFNFDDPNLIILPLAFGKRQGREFIWNDLLSLETGSLKLANGRVIEKTLYNRRTRQDEPALFVALTFERREVLDSSNIKPMSNLIGVDRGENIPAVIALTDPEGCPLSRFKDSLGNPTHILRIGESYKEKQRTIQAKKEVEQRRAGGYSRKYASKAKNLADDMVRNTARDLLYYAVTQDAMLIFENLSRGFGRQGKRTFMAERQYTRMEDWLTAKLAYEGLPSKTYLSKTLAQYTSKTCSNCGFTITSADYDRVLEKLKKTATGWMTTINGKELKVEGQITYYNRYKRQNVVKDLSVELDRLSEESVNNDISSWTKGRSGEALSLLKKRFSHRPVQEKFVCLNCGFETHADEQAALNIARSWLFLRSQEYKKYQTNKTTGNTDKRAFVETWQSFYRKKLKEVWKPAV

SEQ ID NO: 36916 - protein, 979 aa, synthetic construct
  REGION 1..979: note = engineered CasX variant
QEIKRINKIRRRLVKDSNTKKAGKTGPMKTLLVRVMTPDLRERLENLRKKPENIPQPISNTSRANLNKLLTDYTEMKKAILHVYWEEFQKDPVGLMSRVAQPASKKIDQNKLKPEMDEKGNLTTAGFACSQCGQPLFVYKLEQVSEKGKAYTNYFGRCNVAEHEKLILLAQLKPEKDSDEAVTYSLGKFGQRALDFYSIHVTKESTHPVKPLAQIAGNRYASTPVGKALSDACMGTIASFLSKYQDIIIEHQKVVKGNQKRLESLRELAGKENLEYPSVTLPPQPHTKEGVDAYNEVIARVRMWVNLNLWQKLKLSRDDAKPLLRLKGFPSFPLVERQANEVDWWDMVCNVKKLINEKKEDGKVFWQNLAGYKRQEALRPYLSSEEDRKKGKKFARTQLGDLLLHLEKKHGEDWGKVYDEAWERIDKKVEGLSKHIKLEEERRSEDAQSKAALTDWLRAKASFVIEGLKEADKDEFCRCELKLQKWYGDLRGKPFAIEAENSILDISGFSKQYNCAFIWQKDGVKKLNLYLIINYFKGGKLRFKKIKPEAFEANRFYTVINKKSGEIVPMEVNFNFDDPNLIILPLAFGKRQGREFIWNDLLSLETGSLKLANGRVIEKTLYNRRTRQDEPALFVALTFERREVLDSSNIKPMSNLIGVDRGENIPAVIALTDPEGCPLSRFKDSLGNPTHILRIGESYKEKQRTIQAKKEVEQRRAGGYSRKYASKAKNLADDMVRNTARDLLYYAVTQDAMLIFENLSRGFGRQGKRTFMAERQYTRMEDWLTAKLAYEGLPSKTYLSKTLAQYTSKTCSNCGFTITSADYDRVLEKLKKTATGWMTTINGKELKVEGQITYYNRYKRQNVVKDLSVELDRLSEESVNNDISSWTKGRSGEALSLLKKRFSHRPVQEKFVCLNCGFETHADEQAALNIARSWLFLRSQEYKKYQTNKTTGNTDKRAFVETWQSFYRKKLKEVWKPAV

SEQ ID NO: 36917 - protein, 979 aa, synthetic construct
  REGION 1..979: note = engineered CasX variant
QEIKRINKIRRRLVKDSNTKKAGKTGPMKTLLVRVMTPDLRERLENLRKKPENIPQPISNTSRANLNKLLTDYTEMKKAILHVYWEEFQKDPVGLMSRVAQPASKKIDQNKLKPEMDEKGNLTTAGFACSQCGQPLFVYKLEQVSEKGKAYTNYFGRCNVAEHEKLILLAQLKPEKDSDEAVTYSLGKFGQRALDFYSIHVTKESTHPVKPLAQIAGNRYASAPVGKALSDACMGTIASFLSKYQDIIIEHQKVVKGNQKRLESLRELAGKENLEYPSVTLPPQPHTKEGVDAYNEVIARVRMWVNLNLWQKLKLSRDDAKPLLRLKGFPSFPLVERQANEVDWWDMVCNVKKLINEKKEDGKVFWQNLAGYKRQEALRPYLSSEEDRKKGKKFARTQLGDLLLHLEKKHGEDWGKVYDEAWERIDKKVEGLSKHIKLEEERRSEDAQSKAALTDWLRAKASFVIEGLKEADKDEFCRCELKLQKWYGDLRGKPFAIEAENSILDISGFSKQYNCAFIWQKDGVKKLNLYLIINYFKGGKLRFKKIKPEAFEANRFYTVINKKSGEIVPMEVNFNFDDPNLIILPLAFGKRQGREFIWNDLLSLETGSLKLANGRVIEKTLYNRRTRQDEPALFVALTFERREVLDSSNIKPMSNLIGVDRGENIPAVIALTDPEGCPLSRFKDSLGNPTHILRIGESYKEKQRTIQAKKEVEQRRAGGYSRKYASKAKNLADDMVRNTARDLLYYAVTQDAMLIFENLSRGFGRQGKRTFMAERQYTRMEDWLTAKLAYEGLPSKTYLSKTLAQYTSKTCSNCGFTITSADYDRVLEKLKKTATGWMTTINGKELKVEGQITYYNRYKRQNVVKDLSVELDRLSEESVNNDISSWTKGRSGEALSLLKKRFSHRPVQEKFVCLNCGFETHADEQAALNIARSWLFLRSQEYKKYQTNKTTGNTDKRAFVETWQSFYRKKLKEVWKPAV

SEQ ID NO: 36918 - protein, 979 aa, synthetic construct
  REGION 1..979: note = engineered CasX variant
QEIKRINKIRRRLVKDSNTKKAGKTGPMKTLLVRVMTPDLRERLENLRKKPENIPQPISNTSRANLNKLLTDYTEMKKAILHVYWEEFQKDPVGLMSRVAQPASKKIDQNKLKPEMDEKGNLTTAGFACSQCGQPLFVYKLEQVSEKGKAYTNYFGRCNVAEHEKLILLAQLKPEKDSDEAVTYSLGKFGQRALDFYSIHVTKESTHPVKPLAQIAGNRYASVPVGKALSDACMGTIASFLSKYQDIIIEHQKVVKGNQKRLESLRELAGKENLEYPSVTLPPQPHTKEGVDAYNEVIARVRMWVNLNLWQKLKLSRDDAKPLLRLKGFPSFPLVERQANEVDWWDMVCNVKKLINEKKEDGKVFWQNLAGYKRQEALRPYLSSEEDRKKGKKFARTQLGDLLLHLEKKHGEDWGKVYDEAWERIDKKVEGLSKHIKLEEERRSEDAQSKAALTDWLRAKASFVIEGLKEADKDEFCRCELKLQKWYGDLRGKPFAIEAENSILDISGFSKQYNCAFIWQKDGVKKLNLYLIINYFKGGKLRFKKIKPEAFEANRFYTVINKKSGEIVPMEVNFNFDDPNLIILPLAFGKRQGREFIWNDLLSLETGSLKLANGRVIEKTLYNRRTRQDEPALFVALTFERREVLDSSNIKPMSNLIGVDRGENIPAVIALTDPEGCPLSRFKDSLGNPTHILRIGESYKEKQRTIQAKKEVEQRRAGGYSRKYASKAKNLADDMVRNTARDLLYYAVTQDAMLIFENLSRGFGRQGKRTFMAERQYTRMEDWLTAKLAYEGLPSKTYLSKTLAQYTSKTCSNCGFTITSADYDRVLEKLKKTATGWMTTINGKELKVEGQITYYNRYKRQNVVKDLSVELDRLSEESVNNDISSWTKGRSGEALSLLKKRFSHRPVQEKFVCLNCGFETHADEQAALNIARSWLFLRSQEYKKYQTNKTTGNTDKRAFVETWQSFYRKKLKEVWKPAV

SEQ ID NO: 36919 - protein, 979 aa, synthetic construct
  REGION 1..979: note = engineered CasX variant
QEIKRINKIRRRLVKDSNTKKAGKTGPMKTLLVRVMTPDLRERLENLRKKPENIPQPISNTSRANLNKLLTDYTEMKKAILHVYWEEFQKDPVGLMSRVAQPASKKIDQNKLKPEMDEKGNLTTAGFACSQCGQPLFVYKLEQVSEKGKAYTNYFGRCNVAEHEKLIKLAQLKPEKDSDEAVTYSLGKFGQRALDFYSIHVTKESTHPVKPLAQIAGNRYASGPVGKALSDACMGTIASFLSKYQDIIIEHQKVVKGNQKRLESLRELAGKENLEYPSVTLPPQPHTKEGVDAYNEVIARVRMWVNLNLWQKLKLSRDDAKPLLRLKGFPSFPLVERQANEVDWWDMVCNVKKLINEKKEDGKVFWQNLAGYKRQEALRPYLSSEEDRKKGKKFARTQLGDLLLHLEKKHGEDWGKVYDEAWERIDKKVEGLSKHIKLEEERRSEDAQSKAALTDWLRAKASFVIEGLKEADKDEFCRCELKLQKWYGDLRGKPFAIEAENSILDISGFSKQYNCAFIWQKDGVKKLNLYLIINYFKGGKLRFKKIKPEAFEANRFYTVINKKSGEIVPMEVNFNFDDPNLIILPLAFGKRQGREFIWNDLLSLETGSLKLANGRVIEKTLYNRRTRQDEPALFVALTFERREVLDSSNIKPMSNLIGVDRGENIPAVIALTDPEGCPLSRFKDSLGNPTHILRIGESYKEKQRTIQAKKEVEQRRAGGYSRKYASKAKNLADDMVRNTARDLLYYAVTQDAMLIFENLSRGFGRQGKRTFMAERQYTRMEDWLTAKLAYEGLPSKTYLSKTLAQYTSKTCSNCGFTITSADYDRVLEKLKKTATGWMTTINGKELKVEGQITYYNRYKRQNVVKDLSVELDRLSEESVNNDISSWTKGRSGEALSLLKKRFSHRPVQEKFVCLNCGFETHADEQAALNIARSWLFLRSQEYKKYQTNKTTGNTDKRAFVETWQSFYRKKLKEVWKPAV

SEQ ID NO: 36920 - protein, 978 aa, synthetic construct
  REGION 1..978: note = engineered CasX variant
QEIKRINKIRRRLVKDSNTKKAGKTGPMKTLLVRVMTPDLRERLENLRKKPENIPQPISNTSRANLNKLLTDYTEMKKAILHVYWEEFQKDPVGLMSRVAQPASKKIDQNKLKPEMDEKGNLTTAGFACSQCGQPLFVYKLEQVSEKGKAYTNYFGRCNVAEHEKLILLAQLKPEKDSDEAVTYSLGKFGQRALDFYSIHVTKESTHPVKPLAQIAGNRYASPVGKALSDACMGTIASFLSKYQDIIIEHQKVVKGNQKRLESLRELAGKENLEYPSVTLPPQPHTKEGVDAYNEVIARVRMWVNLNLWQKLKLSRDDAKPLLRLKGFPSFPLVERQANEVDWWDMVCNVKKLINEKKEDGKVFWQNLAGYKRQEALRPYLSSEEDRKKGKKFARTQLGDLLLHLEKKHGEDWGKVYDEAWERIDKKVEGLSKHIKLEEERRSEDAQSKAALTDWLRAKASFVIEGLKEADKDEFCRCELKLQKWYGDLRGKPFAIEAENSILDISGFSKQYNCAFIWQKDGVKKLNLYLIINYFKGGKLRFKKIKPEAFEANRFYTVINKKSGEIVPMEVNFNFDDPNLIILPLAFGKRQGREFIWNDLLSLETGSLKLANGRVIEKTLYNRRTRQDEPALFVALTFERREVLDSSNIKPMSNLIGVDRGENIPAVIALTDPEGCPLSRFKDSLGNPTHILRIGESYKEKQRTIQAKKEVEQRRAGGYSRKYASKAKNLADDMVRNTARDLLYYAVTQDAMLIFENLSRGFGRQGKRTFMAERQYTRMEDWLTAKLAYEGLPSKTYLSKTLAQYTSKTCSNCGFTITSADYDRVLEKLKKTATGWMTTINGKELKVEGQITYYNRYKRQNVVKDLSVELDRLSEESVNNDISSWTKGRSGEALSLLKKRFSHRPVQEKFVCLNCGFETHADEQAALNIARSWLFLRSQEYKKYQTNKTTGNTDKRAFVETWQSFYRKKLKEVWKPAV

SEQ ID NO: 36921 - protein, 978 aa, synthetic construct
  REGION 1..978: note = engineered CasX variant
QEIKRINKIRRRLVKDSNTKKAGKTGPMKTLLVRVMTPDLRERLENLRKKPENIPQPISNTSRANLNKLLTDYTEMKKAILHVYWEEFQKDPVGLMSRVAQPASKKIDQNKLKPEMDEKGNLTTAGFACSQCGQPLFVYKLEQVSEKGKAYTNYFGRCNVAEHEKLILLAQLKPEKDSDEAVTYSLGKFGQRALDFYSIHVTKESTHPVKPLAQIAGNRYASYPVGKALSDACMGTIASFLSKYQDIIIEHQKVVKGNQKRLESLRELAGKENLEYPSVTLPPQPHTKEGVDAYNEVIARVRMWVNLNLWQKLKLSRDDAKPLLRLKGFPSFPLVERQANEVDWWDMVCNVKKLINEKKEDGKVFWQNLAGYKRQEALRPYLSSEEDRKKGKKFARTQLGDLLLHLEKKHGEDWGKVYDEAWERIDKKVEGLSKHIKLEEERRSEDAQSKAALTDWLRAKASFVIEGLKEADKDEFCRCELKLQKWYGDLRGKPFAIEAENSILDISGFSKQYNCAFIWQKDGVKKLNLYLIINYFKGGKLRFKKIKPEAFEANRFYTVINKKSGEIVPMEVNFNFDDPNLIILPLAFGKRQGREFIWNDLLSLETGSLKLANGRVIEKTLYNRRTRQDEPALFVALTFERREVLDSSNIKPMNLIGVDRGENIPAVIALTDPEGCPLSRFKDSLGNPTHILRIRESYKEKQRTIQAKKEVEQRRAGGYSRKYASKAKNLADDMVRNTARDLLYYAVTQDAMLIFENLSRGFGRQGKRTFMAERQYTRMEDWLTAKLAYEGLPSKTYLSKTLAQYTSKTCSNCGFTITSADYDRVLEKLKKTATGWMTTINGKELKVEGQITYYNRYKRQNVVKDLSVELDRLSEESVNNDISSWTKGRSGEALSLLKKRFSHRPVQEKFVCLNCGFETHADEQAALNIARSWLFLRSQEYKKYQTNKTTGNTDKRAFVETWQSFYRKKLKEVWKPAV

SEQ ID NO: 36922 - protein, 978 aa, synthetic construct
  REGION 1..978: note = engineered CasX variant
QEIKRINKIRRRLVKDSNTKKAGKTGPMKTLLVRVMTPDLRERLENLRKKPENIPQPISNTSRANLNKLLTDYTEMKKAILHVYWEEFQKDPVGLMSRVAQPASKKIDQNKLKPEMDEKGNLTTAGFACSQCGQPLFVYKLEQVSEKGKAYTNYFGRCNVAEHEKLILLAQLKPEKDSDEAVTYSLGKFGQRALDFYSIHVTKESTHPVKPLAQIAGNRYASHPVGKALSDACMGTIASFLSKYQDIIIEHQKVVKGNQKRLESLRELAGKENLEYPSVTLPPQPHTKEGVDAYNEVIARVRMWVNLNLWQKLKLSRDDAKPLLRLKGFPSFPLVERQANEVDWWDMVCNVKKLINEKKEDGKVFWQNLAGYKRQEALRPYLSSEEDRKKGKKFARTQLGDLLLHLEKKHGEDWGKVYDEAWERIDKKVEGLSKHIKLEEERRSEDAQSKAALTDWLRAKASFVIEGLKEADKDEFCRCELKLQKWYGDLRGKPFAIEAENSILDISGFSKQYNCAFIWQKDGVKKLNLYLIINYFKGGKLRFKKIKPEAFEANRFYTVINKKSGEIVPMEVNFNFDDPNLIILPLAFGKRQGREFIWNDLLSLETGSLKLANGRVIEKTLYNRRTRQDEPALFVALTFERREVLDSSNIKPMNLIGVDRGENIPAVIALTDPEGCPLSRFKDSLGNPTHILRIRESYKEKQRTIQAKKEVEQRRAGGYSRKYASKAKNLADDMVRNTARDLLYYAVTQDAMLIFENLSRGFGRQGKRTFMAERQYTRMEDWLTAKLAYEGLPSKTYLSKTLAQYTSKTCSNCGFTITSADYDRVLEKLKKTATGWMTTINGKELKVEGQITYYNRYKRQNVVKDLSVELDRLSEESVNNDISSWTKGRSGEALSLLKKRFSHRPVQEKFVCLNCGFETHADEQAALNIARSWLFLRSQEYKKYQTNKTTGNTDKRAFVETWQSFYRKKLKEVWKPAV

SEQ ID NO: 36923 - protein, 978 aa, synthetic construct
  REGION 1..978: note = engineered CasX variant
QEIKRINKIRRRLVKDSNTKKAGKTGPMKTLLVRVMTPDLRERLENLRKKPENIPQPISNTSRANLNKLLTDYTEMKKAILHVYWEEFQKDPVGLMSRVAQPASKKIDQNKLKPEMDEKGNLTTAGFACSQCGQPLFVYKLEQVSEKGKAYTNYFGRCNVAEHEKLILLAQLKPEKDSDEAVTYSLGKFGQRALDFYSIHVTKESTHPVKPLAQIAGNRYASSPVGKALSDACMGTIASFLSKYQDIIIEHQKVVKGNQKRLESLRELAGKENLEYPSVTLPPQPHTKEGVDAYNEVIARVRMWVNLNLWQKLKLSRDDAKPLLRLKGFPSFPLVERQANEVDWWDMVCNVKKLINEKKEDGKVFWQNLAGYKRQEALRPYLSSEEDRKKGKKFARTQLGDLLLHLEKKHGEDWGKVYDEAWERIDKKVEGLSKHIKLEEERRSEDAQSKAALTDWLRAKASFVIEGLKEADKDEFCRCELKLQKWYGDLRGKPFAIEAENSILDISGFSKQYNCAFIWQKDGVKKLNLYLIINYFKGGKLRFKKIKPEAFEANRFYTVINKKSGEIVPMEVNFNFDDPNLIILPLAFGKRQGREFIWNDLLSLETGSLKLANGRVIEKTLYNRRTRQDEPALFVALTFERREVLDSSNIKPMNLIGVDRGENIPAVIALTDPEGCPLSRFKDSLGNPTHILRIRESYKEKQRTIQAKKEVEQRRAGGYSRKYASKAKNLADDMVRNTARDLLYYAVTQDAMLIFENLSRGFGRQGKRTFMAERQYTRMEDWLTAKLAYEGLPSKTYLSKTLAQYTSKTCSNCGFTITSADYDRVLEKLKKTATGWMTTINGKELKVEGQITYYNRYKRQNVVKDLSVELDRLSEESVNNDISSWTKGRSGEALSLLKKRFSHRPVQEKFVCLNCGFETHADEQAALNIARSWLFLRSQEYKKYQTNKTTGNTDKRAFVETWQSFYRKKLKEVWKPAV

SEQ ID NO: 36924 - protein, 978 aa, synthetic construct
  REGION 1..978: note = engineered CasX variant
QEIKRINKIRRRLVKDSNTKKAGKTGPMKTLLVRVMTPDLRERLENLRKKPENIPQPISNTSRANLNKLLTDYTEMKKAILHVYWEEFQKDPVGLMSRVAQPASKKIDQNKLKPEMDEKGNLTTAGFACSQCGQPLFVYKLEQVSEKGKAYTNYFGRCNVAEHEKLILLAQLKPEKDSDEAVTYSLGKFGQRALDFYSIHVTKESTHPVKPLAQIAGNRYASTPVGKALSDACMGTIASFLSKYQDIIIEHQKVVKGNQKRLESLRELAGKENLEYPSVTLPPQPHTKEGVDAYNEVIARVRMWVNLNLWQKLKLSRDDAKPLLRLKGFPSFPLVERQANEVDWWDMVCNVKKLINEKKEDGKVFWQNLAGYKRQEALRPYLSSEEDRKKGKKFARTQLGDLLLHLEKKHGEDWGKVYDEAWERIDKKVEGLSKHIKLEEERRSEDAQSKAALTDWLRAKASFVIEGLKEADKDEFCRCELKLQKWYGDLRGKPFAIEAENSILDISGFSKQYNCAFIWQKDGVKKLNLYLIINYFKGGKLRFKKIKPEAFEANRFYTVINKKSGEIVPMEVNFNFDDPNLIILPLAFGKRQGREFIWNDLLSLETGSLKLANGRVIEKTLYNRRTRQDEPALFVALTFERREVLDSSNIKPMNLIGVDRGENIPAVIALTDPEGCPLSRFKDSLGNPTHILRIRESYKEKQRTIQAKKEVEQRRAGGYSRKYASKAKNLADDMVRNTARDLLYYAVTQDAMLIFENLSRGFGRQGKRTFMAERQYTRMEDWLTAKLAYEGLPSKTYLSKTLAQYTSKTCSNCGFTITSADYDRVLEKLKKTATGWMTTINGKELKVEGQITYYNRYKRQNVVKDLSVELDRLSEESVNNDISSWTKGRSGEALSLLKKRFSHRPVQEKFVCLNCGFETHADEQAALNIARSWLFLRSQEYKKYQTNKTTGNTDKRAFVETWQSFYRKKLKEVWKPAV
